United States Patent Application Publication US 2006/0123505 A1 - sequence listing, part 13

SEQ ID NO: 21326 - DNA, 1230 bp, Oryza sativa
  ref <308>: DATABASE ACCESSION NUMBER: AK071612
  ref <309>: DATABASE ENTRY DATE: 2001-12-06
gacttctccactcactcccctctctctctcacatcggtgggcgagcggggtgctgcctcaccgcgagcaccggcggcacttcccaaaccatgacagcaacgacggcgccctccccaccgtgagcagcggcagcgacggcgccctctccaccctcaagatcaccacgagcggcagcggtggcggcgacgccctcccccaccacgagcggcagcgatgacggcgtcaatggcttcccctggtggatccgatggcgacgccacgtcggcggcttcccacaacgagattggattttttttttcatgagattggattggatttattggagaggagtttaggatttgtctcgtgtgtcttgagattggatttggggggattttacgatttttccgtgtgtgtttggggaatcagactcggattgaacgcaacacagcgatctgggagggttttttttcgcgtcattaaatcggactatcctttttcttttctttttatatatgttttttcgcccttttattttgtataaattttgtgtgtataaaacttcagtttttaaagaaacacgtagtcccccgtccaaaaaactcaacctaatattggattagacgtatattggattagaaaggacaacaaatttaggcatactagaaaacgtaatatctaatactaaattggttttaaatagaatatgaggaaaggttgggtcgttggttcacatggtttattttttctatctatattatcttatgcatacattgggattatcagtagtttctcattctgtaatgaatttcagttttgaaaactacataccaatttaaaatggaagatggttcacctctcattacgacgggtgatataagagcaagtttaatagtatagctcactactagctccaaatcatctatagctaaatttatacaatagttgtttactatactattaatacttagtcccacctatcatacacacattatgtcttaaagtccgtgctgtagctggctacagatctgtagtccactgttcttctcttttcctttatctctttaaaatatgtttatagctggcttatagcctactattgtatctgctctaaggctatctttgctggttcactagaaaatcagttgtcagtacagtcagtaatgtgcacatggcgattggattggtggatgacatgtacgcgggtatgctgtttttaccacacataaatttgcaaacaagatgttaccc

SEQ ID NO: 21327 - DNA, 814 bp, Oryza sativa
  ref <308>: DATABASE ACCESSION NUMBER: AK071613
  ref <309>: DATABASE ENTRY DATE: 2001-12-06
gacaagcacaagcacaagcagctctagctagctacaggcatcagtggtcagtagagtgatcagttgcaactagctagctagttagattatatcttcagtgatggctccggcctgcgtctccgacgagcacgccgtcgcggtgtcggcggagcggctgtggaaggcgttcatggacgcgtccactttgcccaaggcctgcgccggcttggtcgacgacattgcggtcgaggggaacggtggtccgggcaccatctacaccatgaagcttaaccctgccgcgggtgtgggaagcacatacaagacccgggtggcggtgtgcgacgccgcaagtcatgtcctaaagtcggatgtgctcgaggcagaaagcaaggtggggaagctcaagtcacactcgacggagacgaagcttgaggccaccggcgatggctcctgtgtggccaagctcaaggtggagtacgagctcgaggacggcagctcactgtcgccggagaaggagaaggacatcgtggatggctactatggcatgctcaagatgatcgaggactacctcgtcgctcaccctgccgaatacgcctaagatgaagaggaatactgcctctatccagtatatcccacctagagtgagtgataattaaataatgagagccgcagaaatgtccaaattctcgtggcgtttgagtccgtgagagtaatttcgtgctttaagtttgtggttgtgtttatgtgcctttctatggtcgtattcagtgttaaagttatcattttgcttcatcaatgggtgaataaagagaggcaagtctgaatgtgttctgct

SEQ ID NO: 21328 - DNA, 1672 bp, Oryza sativa
  ref <308>: DATABASE ACCESSION NUMBER: AK071614
  ref <309>: DATABASE ENTRY DATE: 2001-12-06
gaccacgacgaagacgacgccaagatcgaataatatgacggagccgagatcgaatacggcaaagacgatgaccattatgcagcgccgcgaccggctgagcgatctcccggatgcgacgctggcgcgggtactctaccacctcggctccgtcaacgcgaccgtcacgtccgcgctgtcccggcggtggcgcaacgtccacgccgccgtccccgtcgtcgacctcgtcgaccccaagaagggcgaacggtggggaaacgtctcgggacagaagacctgcttcgatcatcaggttaccgccgccatcctcggcaaggacttgccgacccgcaagttccggctcgacgcgttctacccgccttacgacctgcgcgaccagtggttcgccatcgtctccgtctccggcctcgaggagttcgacgtcaagctccggtactgggaccactccaggcgcaacctctgtccgtttggcacccaccccaaggcctccgccgacttcgacgaggagatgcgccactcgttcaccgcaacgccgccgcacatcttccggtgcgacacgctgcgccgtctgctgctcaccaactggacgctcgacgtgccggcgggcggcgtctccatgccgtcgctggagaccctattcctcaagaggatcatggcggaggacggggcggtgcagcgtctcatctctggctgcccgaacatcgccgacctgacgctggagcagtgccccagcgtgaagaggctcgtcgtcgccagcccgcgcctcgacagcttcgccatgatctgctgccaccacgccagccacgtcgtgctccaagccgagcgcctccggacgctgcgctacaagggcggcctccccggtgagaacttcttctccatcgccaactgcggtgacgtactggccatgaccatcgacatctgcgaaagcctcctcgggaaatcggcatcggctgtcgtccccatcacaaaggtcatcacccggtgcaccaacgtcaccttcctccacctccaccttcgcccgacaatggcgttccacagcgggactttcacacgcgccctccgccatcttccccacctccggcagctcgctctcaagggcctcctcgacaatgacgaaaccgccttatcagtctccacgttgcttcgcaacacgccgaacctcgacgtgctctcgctgatccctctccgtcctcgccccccaaagcctgactatctttacatgttcgacggctccgacgatgactcctcgcagaacggctaagaggaaaacaagaaggacaagagcgccttggacggtgaagacacctatgttcatgtgccgaagatcttgtgggagactcgagtagagtgcttgcacaggctgaggaagatcaagctgctcaactacaaagggacgcccaacgagaggatgcttgcaaagtatctcctctccaaggcatcagctttggagcaatgctccattaccctgccagctaataaaacatcaacagaagatcgtcgatggaagttgacgaaggagctgtcatactggcgagcgaacaagcggacaagaatctcttataagagtcacgtctagattatgaaatctttgcttcaattctttgggtaaaaatctgtatattggttgagtcactattggatgacgaaagtttaattgcttcgagcatatcgattc

SEQ ID NO: 21329 - DNA, 1291 bp, Oryza sativa
  ref <308>: DATABASE ACCESSION NUMBER: AK099185
  ref <309>: DATABASE ENTRY DATE: 2002-08-28
gaaaagctcccttcccagtttcccccaaagctcctttcccagagaccccaaaccaaagcagcttgcttgcttgcttgattgtttgttgcttcttgagcccctctcctccttgcccaagtctgtgtttttgtggcagacttcagcataagggtgaagcaaagcatagggtctggttttgggttcttgacagaagtcatgtttcatggtggcaggcctttgtccctcaggggctctctcaaggcgcttgaagctgatatccaccatgccaacaccctggcgcatgctatacacagggcctatgggggtgcctgtgtgcagatgaggctgtcttacagctccatggctccaatcatccttaacctcatccagtggatggattgcagctgctccctttcatataccctccctagttacctaggtctccttgaggttcttgtgtacaaggtatatgttgatgaggatgcctctatatccaccaacattgaaaggagagcaagcctcaaggaattctatgctgtaatatatccattcttgcaacaactcgaggggaatttgatggagaaagactgcaacgagaaaggatggtgcaaggaggcggcctccggtggcggcggccggaagctttacgccgacgataaggacgacgagagggaagatgagtgcggcatttgcttggagacttgcaccaagatggtccttccaaattgcaaccatgccatgtgcatcaactgttatcgagactggtacacaagatctcagtcatgcccgttctgccgcgggagcctgaagagagtccgatcaagggacctctgggtgctcaccggagacgacgacgtgatcgacaccgtgacgctggagaaggagaatgtgaggcacttccacagcttcatcgacagcctgcccctcatagtccctgacaacctcttgctggtgtactacgactacctagtctgacgaagctcagctctcctcttctgaaagatattgagattcagagttcagtacgtgttccgggcagccgaccatcctctgcagattgagtctggctagcgaaatgccatgccgtcaatggcgaagacgacgacaccattgctccttattagggctgggctctgcgtaatcgcattgtttgttgtaataagtgtatatacagaattaaaaagagatattggggaagatggttttctcatgtttaactacttgtttggcacttctgctctggcaaattgccaaatgattcagaaaagggacaggtgctgggtgtttattgacctgcaccaactgtcgattt

SEQ ID NO: 21330 - DNA, 1209 bp, Oryza sativa
  ref <308>: DATABASE ACCESSION NUMBER: AK071615
  ref <309>: DATABASE ENTRY DATE: 2001-12-06
gattcctcctcgcttcgacaaacaaaaccccccaaaaccctagcctccgccgcccgccgccgccgccgccgcgcaacccccgagctcgagcggcgcgatgaacatcaagggcggaggccgggtcccggtgcccccggccggcgcgggcacgctcgtcaagctggtggtgctcggcggcacggccgtgtacgccgccgtcaacagcctctacaacgtcgagggtggccaccgcgccatcgtcttcaaccgcatccagggaatcaaggacaaggtataccctgaggggactcactttatgattccatggtttgagaggccaatcatttatgatgtccgtgctcgtcccaatcttgtggagagtacttctggaagcagggatctccagatggtgaaaattggtctccgtgtccttacaaggcccatgccagagaagctaccaactatctacaggactctgggggagaacttcaatgagagagttttgccttcaattatccatgaaacacttaaagctgttgtcgcacaatacaatgcgagtcagctaatcacacagagagagaccgtgagtagggagataagaaagatactgactgagagggccaggaattttaatattgcccttgatgatgtgtccatcacaagcctgagcttcggaaaggagttcactcatgctattgaagccaaacaggttgctgcacaagaagctgagcgtgctaagttcattgttgagaaagctgagcaagacaagaggagtgcgattatcagggcacagggtgaagctaaaagtgctgagctgattggtcaagccattgcaaacaaccctgctttccttgccctcaggcagatcgaagctgccagggagatctctcatacgatgtcatcttcagctaacaaggtgttcctggactccaatgatctcttgctcaatctccagcagctcaccgtggcaaacaagtcgaaggaatgaagtcattctcgcaccatgttctaggttattagcagatgtcagtctaccagacaatgtgaggaacacttggtcctctctgtagttgcactagtgatcatctgtgatacagaactcgacgagtgactcaacttttggcaaccggcaatctttttgcaaattgcagctaaactttgcaggctacattttgactctgctagtccttgaggaagttcaataaggaataccattctgttttaaggttc

SEQ ID NO: 21331 - DNA, 1001 bp, Oryza sativa
  ref <308>: DATABASE ACCESSION NUMBER: AK071616
  ref <309>: DATABASE ENTRY DATE: 2001-12-06
gactcccagccattcaacgtcgccacgagcggcggctagctctcgtccctcctgtaccaatcgtcgtcggcggttgtggtggcatctccgacgagattccctggtgaggtcgtacgtgctccacttctccccgtcgacagcgaatggagtgctgcagtttctaatcctcggcggatccatggaggaggtagacaagtagtatatatagtcttcttctgagttgatctgagtccctcccgtccagatcaaatcttcaatggtgctgtgtcgtagattcaactcatcctcccagccctcaccctcagcgttcccagccgagtggtgcgcggccgctgcgtcagtgcaatttgttttctggaccggcgagagctccggcagatcaaacccattgcgtcacactgaaaattgcaatatactattttgctgacagcttctacagtgaagatactccccctggactccggttcaaggattctcctattggaactctagcttctccccttgcagttgatgtaccaactcagctcctcctcctggagctgaaacccctctcctcttgaagctcagattcttgcttctcctggatctcaagcatctcctactcatctactttgatttgtctatatgatttcctggccatggtcgctatggttgctctgattgttttgtactaaactaatgaactacaacagcaactatctctctctctctctgagtcaccctagtctcctctgctgctcactctaggctgctacggctgtggtgttgcatgactgaggtgtttactattgatatgctacctatgattatttctctgtcttcagctgagtctctagccgaattgctggctactactgcttgattctgtggttgattgttcttgcgactgaggagtattttactatggctgctgcttgagattggtttccaaccgatgtaaccaagactggttctctagtagctgggttgatatatgggataatttttttcttttgtgactc

SEQ ID NO: 21332 - DNA, 1274 bp, Oryza sativa
  ref <308>: DATABASE ACCESSION NUMBER: AK071617
  ref <309>: DATABASE ENTRY DATE: 2001-12-06
gtgtcgttcccctcccgattttcttcgctttttctctgtcccctccatcagcgcctccctcccacccgcatcttcttccacctcctcccatccatccgagctccttcccttccacctcccatccgtcgacgccaacgccggtggtgcggcggccaacctggcccatgcgccgccgccaccggtgcccaacctggcccgtgcggtgggggcaccgccggggaagcgaatcgaggtggtgtgggagcgggagaacacgctgctctcgttcggccaggccgccgcgcacgccgccgtcgccttcgtcgagttcaacgtccagtttacgggctggcggcagaatgcggcctagcggcagggttcgcgggacgtggtggttgctaggcaaagagccgcgtccagtggcggaaggcgtttgttttgacgacttggtgtttgtccctgactcggatgatgaaggggctggcaatgagttcaactcacaaggttttgacgacgaatttgtgcctgaaacacaacaagatgttccaatcgaggagattggcatagggttcctctcttatttatttaattattagtcctttccattcaattttgttaaataatgtgctttttgatgttccatttatttctccttacggtgcagccatcctgtgacaagcaaatcaggagggccgcgccagctcggagtgcatcctcgcttgggtacaatgttgcacgattggcttcgggctatttcagagtatgagaagccaagcatcgacatgacaaccatcgagaaggcatgggccgatgagaaaaaggcaatcgctgatgcggactatgagggaaatccaagcaaggtgaacacaagctccgagaagaaggcatgtgtcgacgaggggaagtcaatctccgatgcagaaactgatgatgagggcgtcggtgtgcctgagaagaaggcatgcatcgccgagggaaagtcaatctccgacgcagagactgatgatgagggcgtcggtgtgcctcggaatttacagatgaaagatttgcacgatatcatgtttcctacctgctgaatgtgattgtgttgtggtattttattgtggaaatgcacaatggacataggagtacttagtgcaatatggatgtaagactaccatgtttataagtgtacaaattaccgtagtgttccatatggttgccagactagtacgaagtattttgttatggaaatgccctagttatagtcatatactcctataatatattgttctaatgattgtagtattgttccg

SEQ ID NO: 21333 - DNA, 700 bp, Oryza sativa
  ref <308>: DATABASE ACCESSION NUMBER: AK099186
  ref <309>: DATABASE ENTRY DATE: 2002-08-28
gacactctcctgcaaaggcacttcacctggaggtgtagtgtgaggagagctttttctttgcaccttttggttttttggagcttcagcaatgggggaggtcaagcatctttgcctggtgaagttcaaggaagaggtcttggtggatgacatcctgcaaggcatgaccaagcttgtctcggagatggacatggtgaaatccttcgagtgggggaaggatgtgttgaaccaggagatgctgacacagggcttcactcatgtcttctcgctgaccttcgcgagctctgaagatctgacgacctacatgagccacgagagacaccaggagttcgccggcacgttcatggcggcgatcgacaaggtcgtcgtcgtcgacttccccgtcgtcgcctccaagcctgcaccaccggcggcaccggcggcggcggcgtgatgatgacgacatcaactgtccatcaagcatccatccgccatggcatcaaccattgcatcattgttccaagtactttcaggtatccatccatccatctacacacgcagatagctgtgatagatgtaccttaggttccattattgcatgtttctgctgcttcagtgttgagctggtgtagcttagctaaagctgtaatgcagctctatcccgtgcattccgttcaaagcttgttcggttattcttggaataaatttcggtgatcttttggtt

SEQ ID NO: 21334 - DNA, 916 bp, Oryza sativa
  ref <308>: DATABASE ACCESSION NUMBER: AK071618
  ref <309>: DATABASE ENTRY DATE: 2001-12-06
ggccattgtagtggtcaaatctttcagcgtgggcgtggacgccagaggaggaagacgcgtcgccgcgcggccaagccatccccgatcgatccccacccgcagcggcggcgaggcggccggagaggagggagatggagatggaggcggtgccggcgctggcggtggtggacgcgcggttcgtcgcgggggacgcggcggcgctgtccgtggcgaagacgctgagcctgtccgggagtgacttcaccgtcaccgacgccgccacgggcgccgtcgtgctgcgcgtcgacggcgtgctcttcagcctccgccgccgctgcctcctcgccgacgccgaccgccgccccgtcctcaccgtccaagaatcggcgatggtgatgaacaggaggtggaaggtgttccggggggagagcacgagccggcgtgacctgctcttcaccgtggtgaagccgtcggcgatccagctatggggttcgaccaaggtgagcgtgttcctcgccagcaacgacgccgagcaggccagcgacttccgcgtcaccggcagctaccacgacggcgcctgcgccgtctccctcggcgactctgacaccgtcatcgcaaagatcgaccggcggttcagcgtggcgagcgcgctgctggggaagaacgcatacagcgtcaccgtcaacgccggcatcgactacgccttcatcgtcgcgctcgtcgtcgtcctcgacgagatgcatttccagccatgacaagatcgaaaccaaagctctccctgctcccatcgattcaaaaagacacgatttttttacccttcagttttgctagctctgtatacaggcttgatagacgagaggaaggttgtaattggttgagaagtgaaaacaattcagaaaattatacggtggatgattgcaattgattattgttgacg

SEQ ID NO: 21335 - DNA, 1867 bp, Oryza sativa
  ref <308>: DATABASE ACCESSION NUMBER: AK071619
  ref <309>: DATABASE ENTRY DATE: 2001-12-06
gctctactcctcttctacctctcctcctcctcctcttcttggtcgtcttctcctagctcgccaagatgaggatttccatggctctcgcggcggccgcgctgctgctgctgctgtcgctggcagcggcggacatgtcgatcgtgtcgtacggggagaggagcgaggaggaggcgcggcggctgtacgcggagtggaaggccgagcacggcaagagctacaacgccgtcggcgaggaggagcggcggtacgcggcgttcagggacaacctccggtacatcgacgagcacaacgccgccgccgcctcctcctcctctcgccttctcccgtcttctccttcgagttagctacctccttattaaccatgggtaaggagaagacgcacatcaacatcgtggtcattggccacgtcgactccggcaagtcgaccaccacgggccatctgatttacaagcttggaggtatcgacaagcgtgtgatcgagaggttcgagaaggaagccgctgagatgaacaagaggtccttcaagtacgcgtgggtgcttgacaagctcaaggccgagcgtgagagaggtatcaccatcgatattgccctgtggaagttcgagaccaccaagtactactgcacggtcatcgatgcccctggtcaccgtgacttcatcaagaacatgatcacgggtacctcccaggctgactgtgccgtgctcatcattgactccaccactggtggttttgaggctggtatctccaaggatggccagacccgtgagcacgctcttcttgctttcactcttggagtgaagcagatgatctgctgctgcaacaagatggatgccaccactcccaagtactccaaggcccgttatgatgaaatcgtgaaggaagtctcatcctacctgaagaaggtcggctacaatcctgacaagattcccttcgttcccatctctgggtttgagggtgacaacatgattgagaggtccaccaaccttgactggtacaagggccccaccttgcttgaggctcttgaccagatcaacgagcccaagaggccatcagacaagcccctgcgtcttccccttcaggacgtgtacaagatcggtggtattggcaccgtgcctgtgggtcgtgttgagactggagtcctcaagcctggtatggtggtgacctttggtcccagtggcctgaccactgaggtcaagtcggttgagatgcaccacgaggctctccaggaggctcttcctggtgacaacgtcgggttcaacgtgaagaacgttgcggtgaaggatctgaagcgtgggtacgtggcctccaactccaaggatgaccctgccaaggaggctgccagcttcacctcccaggtgatcatcatgaaccaccctgggcagatcggtaacggctatgctccagtgctggactgccacacctcccacattgctgtcaagtttgctgagctggtgaccaagattgacagacgatctggcaaggagctggagaaggagcccaagttcttgaagaacggtgatgctggtatggtcaagatgattcctaccaagcccatggttgtggagaccttctctgagtaccctcctcttggtcgttttgcggtgcgtgacatgaggcaaacggtggctgttggcgtcatcaagaacgtggagaagaaggacccaaccggtgccaaggtgaccaaggctgccgccaagaagaagtgagcctcgttcaaatggtggtttgcatgtctgcagttgagatatctagttctagtatttgttaagttttgcccacggccatggctctcgtttcatggaccgttaatatctgctcgcaatgtgcactatgtcagtcgtttaatactcgtttatttctgttcggtt

SEQ ID NO: 21336 - DNA, 1763 bp, Oryza sativa
  ref <308>: DATABASE ACCESSION NUMBER: AK071620
  ref <309>: DATABASE ENTRY DATE: 2001-12-06
gacctcacccacacccactgttcttggccatagctgcctactcccatggtctcctcgtccttgcccttgtgctcgatcgatcaccagccgagctgatttttctcttctgcttgatctctacctctgacatgcatctgaagaccggagagcatctgcatctgcctatatcatccggtcatggatatggatagatgaccggcctgttcatgtctgaagaaaaatcaaaggtttggttttgatcggcttgagagcgtgcctggctccctgtatgccactcatgtagcccaatccatggtgtgtttggatgctgtgggtggcgtgcaaggagccaagcatgcgtgccatgatctctctttctgccttaattcagtttcagacatgtgtagttggatttgtttcctctaggtgttcatgttaattacatatttcatgttgattttgcccgtttggatatgtgtttgtctgcttggtttcgaattgttttagcaggggggcagaactaatcaaggatactgcaaatcgttggaattaatttcttgttcaatcttgatccagataactatgagagcttttaatcacaacgagaaaaggtaatctctctctatcagctgcccctttttcttctactagtttatatttagatcgcattcatactcttgactagctcgctgcagtttatttgcatatgttttcccagcaagatctaattagatacttagatgagatttggactgtatggtaattttgttacttctccttgcgcatttgtatttctgtttatttgtatttattctctgctagtactggagtacttgttatgttgcgtgtaattaattaagcaatgttaattaagtaaattgttaatgtacatacatacatgaggtcatttcttggttttcgtcttgtactttagttcttgaattgttcactgggctggcacttagaaaaagcataacgatttagtttaattgagaaatgcctatgggtcttcccggctagctccataaggttgtcggctagatgacctggattcgaagcttcacaacttctaattatttgatattaggtcattccctaatattcacgtctttttatttagtttaattcttttttcaaagaaaaaactgacacgtatttaaatttctgctagaaatggccatctgtgggatagggatagaaagcttcagttactagtacacactagctagttgtttgtttgatttggccaagaaatctgaagagatatggattgtgttctttgaaattcattacctttcttcactgtacttatcgtgtgcggtcatccatgcttggacgaatttcttctctctttcttaagatcaaagattaagcacccatcatattgtgccttaagtacgtaatccaataaagttcaacattaggtttggctccttaatttgtacacttaattattacatatgcgcttccaatttttagatgaataatgattcttttgcagcaagataaacttaaacacacacaggtgaaacttttagatggaaggtacacttgctctgacggtagcaaaagttgatcatgccctactttagctgtaacatgagacatgtcagcatatgcttacatgcatgaatcagcagggctacagttttattatttgctttgacagctttctctcaacaatcattctcattatattttttatcctaggctccttaggaacatagtaattttacaggatttttgctgaaatcgatcagttcagttcccgcaaaattccactg

SEQ ID NO: 21337 - DNA, 821 bp, Oryza sativa
  ref <308>: DATABASE ACCESSION NUMBER: AK071621
  ref <309>: DATABASE ENTRY DATE: 2001-12-06
gccactcgaagagctcggcggtggaacagctcgctcgatcatggccgccgccgccgccgcctcaagggcgctctgggcttgccgcaccgcctcctaccttcggatctcctccttccccagggctttctccaccgtccttaaagatctaaaatatgctgatactcatgagtgggtgaaggttgagggtgattcagcaaccataggggtcacagaccatgctcaggaccatttgggtgatgttgtgtatgttgagcttccagaagttggttccacagtatcacaaggaacgaactttggtgcggttgaaagtgtgaaagcaaccagtgatatcaatgcaccagtatctggagagattattcaagtaaatgatgaactaagtgaaaaaccaggatttataaatggaagtccatatgagaagggatggatcatcaaggttaagataagtgatccaagtgagttaaactcgctgatggatgatgagaagtacaagaagttttgtgaggaagaagatggcaaacactgatcaatcccctaactgctggatttcaagaaactatgcagcaactcaccatcatgacaatgagccatctcgcctctcctaccacattatattattctggatagaggagtcccaaggaatgtaataagctgaaacatttttcttgcaaatcagacatgaaaattttgtagtgtcctgatcattccgtttgtgctccatttgaaattcagctcttgatttgcttatcatctgaatacaggtggaggattgggtttgtttaaactttgattaagtgacagtgacttgattgtattgagattgc

SEQ ID NO: 21338 - DNA, 1150 bp, Oryza sativa
  ref <308>: DATABASE ACCESSION NUMBER: AK071622
  ref <309>: DATABASE ENTRY DATE: 2001-12-06
ggctttcccttttctgttcttccttccactcgcaaactctccaagaagaagaagttgcgagccaatccccgcttgcgatcccgacctggccacggatggtgggcggcggcggcggcggggaggcggcaatgtcgccgccttcgggcggcgggaagcgcgggagggatccggaggaggacgtgtacgtggacaacctccactcccacaagcgctacctcagcgagataatggcatccagtttgaatggattgtctgtcggagattcactggttgacaatatcatggagtcccctgcgaggtcggagaatacctcttatttcagggatgaaataatatcccaatactcaccaatgtctgaagattcagatgactaccggtgctacgacactcaattacccaatggaagtcaaaccgatgcaatggttagcccttcaactagtccaatgtcatccccacaccgattccagaaaccacaatctggtcttttatccgcaaacccgtaccctctgcccagctgctcactctcgtcggtcgtctgctctaatcctcgtcgtggctctgaaaatgaaggccggttcccatcttctccaaatgacatgtgccatggaggtgacctgaggaaaacagcactactgaggtcagtgcaaatgagggttcagggaccacatgcatatgaactgtcgttctgtggcagacaagaacaagaacatgcacacgaccatgaggatgaacatcagcatgaacatctagagggtttggaaggggcagaaagatcgtcatcacatagagaaacaatcagtgatggagtcagttaccagatgccggaaaacagctatgggcgaccagagcatgatatagattacattgaggattgcaccccgcatggttgtctgagtgacctcaagtttaagcaagaggacaaggattgtagtaaactaaccagcatggataagaataggtagcagagagatcacaccatatgccattttcctggaaattatttttgtgggagattatggctcatatgcttatgataattctgattgatgttcaatccactgtaacccctagtatgaacatgtgcttttcgagatcctgaaattgtaacctttgagtaaaattaacccctgaaatgcggtattttagcgcc

SEQ ID NO: 21339 - DNA, 2005 bp, Oryza sativa
  ref <308>: DATABASE ACCESSION NUMBER: AK071623
  ref <309>: DATABASE ENTRY DATE: 2001-12-06
ggtcggagtcgaaatccccccccaaatagttggtggtagcgatcagtaggcaggagaggattaggagggatcggagaccgacatggcggaggaagggcagcgcggcggctacagccggctcgccggcgatgaggaggtggctacggcgagcggcggcggcggcggcgactacgacgagcggaagctgaggctgctcggctacgagccgcagctcaagcgcaacctctcgctgctgtccaacttcgcggtgtcgttctcgatcgtgtcggtgctgacggggatcacgacgctgttcgggacggggctgcagttcggcgggccggcgacgatggtgtacggctggcccatcgccggcgccatgacgctcgtcgtcggcctcgccatggccgagatctgctccgcctacccgacctccggtggcctctacttctggagcgcgaggctctgcagccaccgccgctggggccccttcgcttcatggctcaccggctggtttaacattgtcggacagtgggcggtgacgaccagcgtggacttctcactggcccagctgattcaggtgatcatcctgctcagcactgggggcaacaacggaggagggtacatggcgtccaagtacgtcgtgatcgccttccacgccgccatcctgctgagccacgccgccatcaacagcctccccatcacctggctttccttctttgggcagttcgcggctgcctggaacatgctaggtgtctttgtcctcatgattgctgtgccgacggttgctaccgagagggccagtgccaagtttgtgttcacccatttcaacactgaaaacaacgctgggattcacagtaacttttacatcttcgtgctggggctcctgatgagccagtacacgctgacaggatatgacgcgtctgcgcatatgaccgaggagacgaagaatgctgacaggaatggcccgatcggcatcatcagcgcgattgggatatcgataatagtaggatggggatacattcttggcatcacctttgcagtgaaggacataccttacctgctgaaccccgagaacgatgctggagggtatgccattgctgaggtgttctacctcgccttcaagagccggtacgggagcggcatcggcggatcatctgcctagggatcgtcgccgtcgcgatatacttctgtggcatgagctcggtaacaagcaactcaaggatggcgtacgcgttctcgagagacggcgcgatgccattgtcgtccgtctggcacaaggtcaacaagcacgaggtgccgatcaacgccgtctggctctcggccctcatctccctctgcatggcattgccgtcgctggggagcttggtggcgttccaggcgatggtgtcgatcgcgacgatcgggctgtacgtggcgtacgcgctgccgatcctgttcagggtgacgctggcgcggaagcacttcgtgccggggcccttcaacctggggcggtgcggcgtcgccgtcggctgggcggcggtgctgtgggtggccaccatcaccgtgctcttctcgctgccggtgtcgtacccggtcaccaaggacaccctcaactacacccccgtcgccgtcggcggcctcttcctcctcgtcctctcctcctggctcctcagcgccaggcactggttcaaaggccccatcaccaacctcgatggctagctaagccaagattgaggctttggttttggttttcgccggtggatatggaaatgcagtgggagatggaagaatcgtcgtcgatgatcggaggcgtttcaggtgggaggagaagtataactgaagaacaggtaagaagatgatctggaagggaaacgggagcatatcatgtcatggtggtggtgttgtgattagttgttgatttgttcagcgaaattatattacgtggaaggggattatacattttatacactggttgtagattgacaatatgtactaagaaattgacgattcaattgaaggctaaaagcagctgaaacagttgtgg

SEQ ID NO: 21340 - DNA, 1012 bp, Oryza sativa
  ref <308>: DATABASE ACCESSION NUMBER: AK071624
  ref <309>: DATABASE ENTRY DATE: 2001-12-06
ggttccctccccctcgctctccctgctccggtatagctagttgagctctgatcgatcaggttgcatgagacggagaagctgagtgaggctagggtggttggttgtgatcatcaccatgagctgcaacggttgccgggtgctgcggaaggggtgcagtgacggctgcgtgctgcggccatgcctgcagtggatcgacgccgccgacgcgcagggccacgccaccgtcttcgtcgccaagttcttcggccgcgccggactcctctccttcatctccgctgtccccgaggcgcagcgacctgcgttgttccagtcgctgctgtacgaagcagcggggcgaaccatcaatccggtgcacggcgcggtgggcctcctctggacggggaactggcccctctgccaggccgctgtcgagaccgtgctgcgtggaggcgccatcggccctctgccggagctcggcggggcctgcggcggcgctggcggggacctctacggcgccgccaagcgcaacggcggctggtctaccttctccactgcgaagcgggtgaggaaggccgaggtacctgaagccccgtcgtgcgacctaggcctgtgcctcagccccggctctccgccggcggtgggggagaggaaaccagcactgcggccggggacgccgtcaatgagctccgatgagtccggcaccacaaccggaggcgaaagggatcctgtgctgctcaacctttttgtctgaggccggtcgtcaagctagctaatactaatccttgcttgacctccgtctactggatcccggcggcgaagcagtagtaattttttctcgccggcgagcctagtttattggcatttttttttctttccctttcttttaggagtactagtctacgagtcttggtttttgccgtgtacgtagaaaagaaattaccggccggcctggacgccccgtttgcgtgggcgagcaactttttaccctttttgttcgtttaaattatataaataatccttcattaagctatat

SEQ ID NO: 21341 - DNA, 1427 bp, Oryza sativa
  ref <308>: DATABASE ACCESSION NUMBER: AK071625
  ref <309>: DATABASE ENTRY DATE: 2001-12-06
gaccgacgcgacaccaccccgcccccccttatccacggaggcggcctcctcctccgcccagcgccgccgctcttggtccgccggacgcgcgggtcacctcccacggaggggaaaggcctcaatttaggctgttcaactattccttgagatgttggcacatagtctagcaatcaatccttcaagggctgctcgatgtccggttacttcgagggcgtcgagtgcacccttgggacttgtctcttcgttggccttcagcaggggacgtaaggaaagtgttaaacttttcatcaatgtggatagatacacaaagtatagtactcctttctgttatgcaccgcgaaacaccagaatcacaccgcttgctactgcatcatttggtgacacagctgactcgtcaactcccatctttcctagaatccatgtgaaggatccctatcagcgacttggaatcagcagggaagcatctgaagaagaaattcgagctgccaggaattttctgataaacaagtatgcagggcataagccaagtgttgatgcaattgagtctgcccatgacagaatcatcatgcagagtttctctgatagaaaaaaaccaaaagtggatctcaagaaaaagtatagggaacttactcagtcacgtccagtcaaggctattcagggaagatttcaaacaccttctagtaaagtgatttggcagacagcaataacttttgtattgcttggagtgcttacccttgttttccctactgaagaagggccaactctccaggtggccatctcttgtgcagcaaatatctatttcatttatcagaggctgaaaagtggatggcgaacattcttttatgggttcggatccttctttgcttcctggttccttgccacattcttgatggtttctgtaattccgcctatactgcctggtccaagaaacttggaagtgagcactgcatgtgttacttatgcactcctttttgtatcatcggccttcctgaagtaggaaatctccatgttgtcattttcttgttagccactagtctttcaacaatcaaaatgattcccacttataatagcttgtacaatccatcggcatcttccttttttcagagtttttttcagaagtggaaatgtagtcctttgctgggttgctaatagttaatataaggttgtagtgtgaggtgtagaacatttttttgccctggcccttgagagagtttgatacctcctctagatattctcaatgctgtattaaatacagttggttttgagatagataatatgagatactacctccgtttcatgttataagactttctagcattacccacattcatataaatgctgtctagattcatttacatatatatgaatgtgggcaatgctagaaaatcttataatatgaaacggaggaagtaacatttatgtggatt

SEQ ID NO: 21342 - DNA, 1555 bp, Oryza sativa
  ref <308>: DATABASE ACCESSION NUMBER: AK071626
  ref <309>: DATABASE ENTRY DATE: 2001-12-06
ggttggtgaccagctagctgatagctgagtcaatttgtgtgacttaatttgcgaccacgtagcagtatatgtatagtattagtatagccccgaagttagttgaagacctcttggagtagagatcgaggaagaagaaataatcaatggagtgttgggagaagaagccaaggaatctgggtggctcgctgccggtgcccaacgtgcaagacctcgccgcccgcccggaccacctcacgcccaccctcctccgccgctatcttcgcccgcaccacctgtccctgcccgccgacgaccaccatgccatggctatgatacctgtcgttgactttgccaggctcatcgatcaccatgaggaggccgccaagctgaggcacgcctgcgaggagtggggtttcttccaggtgatcaaccacggaatcgccgacgagacggtggaggagatgaagcgcgacgtcatggccttcttcaacctcccgctggccgacaaggcggcgttcgcgcagcagccggaatggatcgagggctacggccaggcgttcgtcacgtcggaggaccagacgctggactggtccgacctctacttcctcaccacgcagccgcccagctaccgcgatctccgcttctggccaccggagacatcctccaccttccgccgctccatggaccgctactccctcgagacgcagcgggtggccaccgagctcctccgagccatggcgcgcaacctgggcctgcgcgacgccgacaagatgacaaggctcgccgcggcgcagtccatgcggatgaactactacccgccatgcccggccaaggagagggacagggtcctgggcgtgtcgccgcactcggacgccgtggggctgacgctgctgctgcaggtgagcccggtgaaggggctgcagatcaggaggggcgacgactggatccccgtcgaccccatccccggcgcactggtggcgaacgtcggcgacgtggtcgagatggtgacgaacggcaggtacaagagcatcgagcaccgggtggtggtggacgcggcgcaggagcgggtgtccgtggcggcgttccacaacgccacgttcgggtcgacgtacggaccactggaggagatggtgggaggcggcgaggcgcgctaccggagcatcagcgtggaggactacgtcaggctcgtcgtctccagcaagctccagggcaagaacatcttggacgctgtcaagattattactacgacttaatttctcatcttatcatgcctgctgattaatcaatcaatcaatctccctggttggttggttgctgccgagtaaactattcatgccacttcaattattagtaggtaaaaaggatctatcatgcatactactttccgtttttattggagtaaggtttatataggagtacctttgaataaacaaacaaatctcgtctactttgatgtaaaggtttgttgtatatgaggtttgcttcattgtacgctacagttgcctgagtatacggctaatgtacatgtgtcttgctacataaacaattagtaattacaaggtacacaagctttagc

SEQ ID NO: 21343 - DNA, 1006 bp, Oryza sativa
  ref <308>: DATABASE ACCESSION NUMBER: AK071627
  ref <309>: DATABASE ENTRY DATE: 2001-12-06
ggctctgctgtgctgtgctgctagggtttaggcggcggcggcggcggcggcggctgcggctttccgattccaatccaacaagaagaagattcggagagattgccggccatgtcttccaccggtcgcccctacggccgtcgcggcggcgccgctccctcctacgtgccgcgcccccgcgcacccaacccctcgccatccgctcccgctcccgcacggccgccgcagcaactgcgtaaaccggtgttcaccaccgtggagcggctgcggccccagagccacggccacaccctcaccgcccgcgtcctctccgcccgcatcatcctcgacaaccctcctccccgcgctcgtctcgctgagtgcctcgtcggcgacaacaccggcaccgtcctcttcaccgcccgcaaccaacaagttgacttggtgaagccaggcaccacggtcatcttccgcaatgccaagattgacatgttcaaggggaccatgaggctggcagttgacaaatggggccggatcgaggtgacggaccctgccagctttcaagttaaggaagacaacaacgtgtcgctggtcgagtatgagctggtggatgtcgtcgacgaggattgactacttagactttgattggctctcgggctgtggacatagatttttgatgcagcggtagcagtaggttcatcttatcctggaaagctattgaaaagatttggagctggttattacttatgtacaggggaaggttcaactgatgcttttgtgcaagacctgttctatcattaggtttggtttatgaaatgtgttgatgttgccggtggtacctaaatctaaatgttggcaagcctagtggacttgtttctgtcaatttaatggtatggagttggatcttgtgtcgctgatggttctacatatacgatgaagaatatttctgggatgtcttactacaccttgttgtgagctgcaatgtttgcgtgcatgtttaacaaagctgtgttatatgtgtttgttcacc

SEQ ID NO: 21344 - DNA, 1205 bp, Oryza sativa
  ref <308>: DATABASE ACCESSION NUMBER: AK071628
  ref <309>: DATABASE ENTRY DATE: 2001-12-06
tggaacccaaaattcctcccccacaccacgcctccacctccgcctcatttgctccagttcccggagggccgcaaccaccgctagccactcacccggcacggcatggctgcgtcgctccggtcgccgccccccttccccgccgcggcgttccgccgccgccgcgccgtcgtgcgcgcctcttcctcctcgtcgtcctcctcctcggccgtgtcgtccgcacccaaggcgcgcttcgtcgcccgccgctccgagtccaccttcgtccagcagctcgcccgcccgctcggtcggtatctcctagtcctcctcccctcccgagtactaaccccgggctcgggattcgcctttgcctcgcgcttcgtttgtcggagagatccccgccctgaagctgagcctgagatgttttgctttgctcgtgtcgtgtagcggagtacatgagcttgccggcgagtcagtactcggtgctcgacgcggagcgcatcgagcgcgtcgacgagtccaccttccgctgctacgtctaccgcttccgcttcttcgcgctcgaggtctgccccgtgctacttgttcgcgtcgacgaggagcccaacggctgctgtattagcctcctctcctgcaagctcgagggatcaccgcttgtggaggctcaaaatgacaagttttcaggaaatcattgacatgatttgctgtgggatgcagcttccatggtgaataaggtgttctgcaacagtagtatgagtgattcaacatctcaacagcttacatcggatactacaatcgaggttacaattgatataccatttccatttcgagcattacctgttgaagccattgaatcaagtggcaagcaagttcttgagcaactactccgagtcatgcttccacgatttttgaagcagcttgttaaagactaccaagcatgggcttcgggtgattcttcaaggaaaccacttggcactggtgaaatatgaagcttcgcagtgtctccattaggcattatagtcttttcttgttgcattagttattgcttgatggggtatagaaaagctgtttatacgtcgttttgctcacaaaatccatttgcttctttgtggtctttgcctgaagatgttctgtagtgtgtatggatttgtgccatgcgaccagtcacatacatttgtaggttgttcattcacaatgtgttgttgtaagattaacaatatccgacc

SEQ ID NO: 21345 - DNA, 752 bp, Oryza sativa
  ref <308>: DATABASE ACCESSION NUMBER: AK071629
  ref <309>: DATABASE ENTRY DATE: 2001-12-06
ggggttctttcttttttctctgcattttaataaaggcaaggaagagcaggacaaggaggaaattaaagatgtctgatcttccagggttcctgagcgtgagagtgctgcgaggggtaaaccttgttagtcgtgatgccggcggcagtgatccctatgttgtgcttcacctggacaatcagaaattaaagacaggtgtggtaaagaagacaacaaacccagtttggaacgaagagctgactttagctgtcaggaatccagaaacacctatccagctagaggtatttgacaaggacacattcagtaaagatgaccagatgggtgacgcagagttcgacattgaggcgctgatgcaaatcgtgaggatggatctgcaggacatccgcagtggcaccgtcgtacgcaccgtgcgacccggcagacagtgctgcctagcagacgagagtcacattgtgtgggagaatggtcagattgtgcaagacatgcttctcaagttgagaaatgttgagaccggcgtggtgcacctgcagctgaaatgggtgaacattccaggctgaagaagaatctgaatttcggtacattcatgcaaagatattggttcctcaaattggtgaagaaaccggtgttgttttgtttcagcattttgccatacacattaattgttgtgttgttcttcagactgtatgtagctgcctgtatatgtatgtaatttctgtgacaatgttgatcagacttcagagtatatgcattttgcc

SEQ ID NO: 21346 - DNA, 1271 bp, Oryza sativa
  ref <308>: DATABASE ACCESSION NUMBER: AK099187
  ref <309>: DATABASE ENTRY DATE: 2002-08-28
gaatataatctctctctcacagctgcacaagtggtagctggcttactctaattaaccttggttgtaatccatggcgagctgcagcaagtggctggccgggctgatgctgctggcggcggcgctggcgtgctcgctgccggcggcgagccgggcgcagctgcaggtggggttctacaacacgagctgccccaccgccgaggcgctggtccggcaggccgtcgtggccgccgtcgccaacaactccggcctcgccgccggcctcatccgcctccatttccacgactgcttcgtcagggggtgtgatgcatcagtgctgatcttctcgccgaacggcacggcggagcgcgacgcggcgccgaacaaccccagcctccggggtttcgaggtgatcgacgccgccaaggccgccgtcgaggcggcgtgcccgcgcaccgtctcctgcgccgacatcctcgccttcgccgcccgcgacagcgtcaacctcaccggcaactccttctaccaggtccccgccggccgccgcgacggcaacgtctccatcgacaccgacgccttcacgctccccgggccaaacctcacggcgacgcagctcgtcgacggcttcaagctcaggaacctgaccgccgaggagatggtcatcctctccggctcccacaccatcggccgctcgcactgcgcctccttcctcttcaagaaccgtgaacgtttggcgaatgggacgattagcccggcgtaccaggcgctgctggaggcgctgtgcccgccgacgacggggcggttcacgccgatcacgacggagatcgacgtgagcacgccggcgacgctggacaacaactactacaagctgctgccgctcaacctgggcctccacttctccgacgaccagctcatccgcaacgccacgctcctccccttcgtcgacgccttcgccgccaacgagacgctgtggaaggagaagttcgtcgccgccatgatcaagatgggcaacatcaacgtgctcaccggcgcccggggggagatccggctcaactgcagcgccgtcaacccgtcctcgtcgtcgtcgtcgtcctccgccgggaggatgatcgagaccgtcttccccggcgccggcggtgaggtcgccgcgagctaagctatacccttgctgaccatgtaatatacgtcatatatatgatgataatgtaaaattaataatgcatgacacgcacttgcactgtgtgttgtacggccagggcaagtgtggttggttgatgaaggctttgtttgcacct

SEQ ID NO: 21347 - DNA, 2024 bp, Oryza sativa
  ref <308>: DATABASE ACCESSION NUMBER: AK071630
  ref <309>: DATABASE ENTRY DATE: 2001-12-06
ggtgcttctccacctgttgttccattttctcctcgcttatctcttcctcgctcgctctccctttcgcgcaccagaaaagtcgttttttaattttcgagtttccgtggaagattctcgatacctgtccctcgtcgtcgtcctcctccgccggccgccgccgacgaccgcagcaggggtggatccggggcggcgccgattcgtatcctggtaggatcccactgaattcaactgttgaacaaaaagccaggaaggtggctgttcttgtggcactcagtgctagtggaagtgctccagtactgtacaggaccatggatgctctttgtgatttctgcagggagcaaaggtcaatggtctattgccgatcagatgcagcatccttgtgcttgtcgtgtgatcgtaatgtgcattcagccaatgccctttcccgacgccatacaagaacccttctttgtgatcgttgtgttggacagcctgcagcagtccgttgtcttgaagagaacacctcactttgccaaaactgtgactggaatggacatggggcagcatcctcagctgctgggcataaaaggcagaccataaactgttactcggggtgcccatcgtcggcagagctctcgagaatctggtcctttagtatggatatcccaactgtagctgcggagccaaactgtgaggaaggaataaacatgatgagcattaatgacaatgacgtcaataaccattgtggtgctccagaagatggccgcttgttggatatagctagcacagcactcatgagtgatttacctacaggagacaagttcaaacctttaataggttcttcttcaggagatgggatgaatcttctgccacttaattcagatcagccagctgagccagtttcaacgacgcctaaggcaccctgtgtcacagacaaagatatgttcaatgatgggagcgtatatggagacttctgtgtggatgatgctgacctaacatttgagaattatgaagaattattcggtacctctcacgttcaaacagaacaactctttgatgatgctggaattgacagttattttgaaatgaaggatgtgccagcagatgaatctaatgagcagcccaaacctgtgcagccagaatgtagcaatgtcgcatctgttgattctgggatgtcaaacccagctgcaagggctgattccagccattgtattcctggtaggcaggctatatccaacatatccctttccttctctggtttgactggtgaaagcagtgctggatattttcaagattgtggggtatcgtcaatgatccttatgggtgagccaccctggcatcctcctggtcctgaaagttcatctgctggaggcagcagagataatgctcttacacggtacaaggagaagaagaagagaagaaaatttgacaagaagataaggtatgcttctcgtaaggctagggcagatgtgagaaaaagggtcaaaggacggtttgtaaaggctggcgaagcatatgactacgatccgctgagccaaacaagaagctactaaagcctttcactcgattggtttcgtccagtgttcaagtagcaattttcagcagctgatttgatgttggttgcacggcaagcatgatcactggagaacacaagcaattgcggcagaccttgcaattgaaaacggggaaaggaaaccaaacgctgtgatcaaatcaaattaatgaaataaaaaaggaaaaaataggatgcaaacatgcgagaagctcatggatggtaatgctccattttctcctgtacagttcatgcatcttcagttgcttctggttgagatgtctgaatcactctctaccatctgtgcattaatcaaatacaaatacatgggcctaccgcacgacgacgaacgcacctgcttctgttgtgatgttttgtgttgcggctgtcaggctggatctctaggtaacatgattaattatactactgatggaatttgcaccgctgtaatattatttacgaatcacaatctgccgtgggattgttcttctgt

SEQ ID NO: 21348 - DNA, 1270 bp, Oryza sativa
  ref <308>: DATABASE ACCESSION NUMBER: AK071631
  ref <309>: DATABASE ENTRY DATE: 2001-12-06
gaagtatgcatccaagttgctataaaggttaggcaggcaggcccccgctcaccaggagaattagctagggagctaggtgagcacgagagcagcaatggcggcgacggcgagcaacaagagggtgatcctgaagcggtacgtgacggggctcctgtcggaggatgacatggaggtggtgacgacggaagtgccaccgttggccgtcgtcccagcagggtcggaggcggtggtggtgaagaacctgtatgtctcctgcgatccttacatgcgcaaccggatgacccgtcatgaggtgcctagctatgtctcagactttatcccgggagaggttttggcaaattttggcgtgatgagggtgatatcatccggccacccagatttcaaggcaggtgatcttgtttggggaataaccggatgggaagaatacaccgtgattaacaatccggaatcacttttcaggatcaatcaccctaaacttcctctgtcctactacactggtattttaggaatgccagggcttacagcctatgctggattctttgaagtgtctaagccgaagaaaggtgaatatgtctttatttcagcagcatctggtgccgtaggtcagattgttgggcagcttgctaagatcataggctgctatgtggttggcagtgctggttctgacgaaaaggtcagcttattgaagaccaagtttggctttaatgacgctttcaactataagaaggagccagacctcgaggcagccctaaggaggtattttccagagggtatcgacatctactttgagaatgtgggcggtgagacgctagatgcagtgctacctaacatgcgcctaggtggtcggatcgcggcatgtgggatgatctcgcagtacaacctagagcggccagagggggtgaaaaacttgttctatatcgtcaccaagcgtctgcgtatggaggggttccttgtgtttgacttctatgacaggtactaccagttcgaggatgaaatggctaggtacctaaaggaagggaaggtggcatacgtggaggacgtcgttgaggggcttgatgcggcaccggcagcactcattaagctcttcaccggccgcaatgtcggaaaacagctcgtcgccatcgcacgagagtgatacggtgccacactgctcggcacgcaaattagcattaccgaggagtactactgtagttgttcagatttcagaaatgggggcatcccgtttgtcttgtggggttcagaaaatagaaataaagaatagatatgttcg

SEQ ID NO: 21349 - DNA, 958 bp, Oryza sativa
  ref <308>: DATABASE ACCESSION NUMBER: AK071632
  ref <309>: DATABASE ENTRY DATE: 2001-12-06
gccgatcccccaaactcgcagtccacttcctcccgcggagatccatccaccaccagccgccagccgccgcggcgcgagattcagattcgtcgttctcttggttgtttgaggaggaggaggaggagggacaagatgggggcgtggatgtcgcgggtgtggttcttgatgttcccggcgaaggagtacaagatcgtcgtcgtggggctcgacaacgccggcaagaccaccacgctctacaagctccacctcggggaggccgtcaccgccgcacccaccatcggcagcaacgtcgaggaggtcgtcttcaagaacatccgattcgaggtgtgggatttaggaggacaagagagtctacggacttcgtgggcaacatactacagaggaacccatgctgtcatcgttgtaattgacagcacagaccgtgctcggatcaacattatcaaggatgagctcttccggctgcttcagcatggggacctcgagggcgcagtagtcctcgtgttcgcaaacaagcaggatctcaaggacgccatgtcgccagctgagatcaccgacgctctctccctccacagcataaagaaccacgattggcacatacaggcctcatgcgcgatcaccggtgagggcctctacgacgggctcggctggatagctcagaaagtcgccggcaaggccacaacaagctgacccatagcgcctgtatttccatggatttgttggagctggcaggttgtgtttgttattgctgctgctgctgctaccacttcagtgtttatttatgtctcacatgtctgaaaaaaaccatgtctgtattccctaccaatctgaaatataaaagatcaaatttgtgcgcaatcaactacaagttgctccattttttttctcatattctctgatgatatacacacatcattttcctgtgcgcaattcttgaaattcagagttttgatatttctgc

SEQ ID NO: 21350 - DNA, 1076 bp, Oryza sativa
  ref <308>: DATABASE ACCESSION NUMBER: AK071633
  ref <309>: DATABASE ENTRY DATE: 2001-12-06
ggctccccccacttgttgccgatcaagccgagagcttagcttgaggaagacgagacgcgcgagcacgagcgcgagcctgcttccgcggagctagatctcgccatggccgccggtccacgcggccgcctcctgctcgtcgcgctcgtgtcggccgcggccgtcgtggccggcgcgctactgccggggtgcgccgcggcggcggcggcgggggagaaggtgccactcgcgctctactacgagacgctgtgcccgtactgctcgcggttcatcgtcaaccacctcgccgggatcttcgaggacgggatcgtcgacgccgtcgacctccgcctcgtcccatacggcaacgcccacgtcgtcggcgccaacaacaccatctcttgccagcatggaagcgaggagtgcttcctgaacaccgtggaggcttgcgccatcgatgcatggccggatttgagagtgcatttccgtttcatctactgcgtggaggacctggtggtgaaccacaagcaacgggagtgggaatcctgcttcgggaagctcaacctcgatcccaagcctgtcaccgactgctacaagggcgaacgcggccaccagctctcgctcaagtatggaagacagactgacgctttgcagcctccccacaagtacgttccctgggtggtcgtcgacggtcagccgctctacgaggattacgagaacttcgaggcttacatctgcaaggcctacaagggccatcctcccaaggtgtgcgaggggctggcccgtcctccgactccgactgtgcttgaggtagcggaggcagtcaatagagtcagctattacgactccggtgatatcaggcttaagcctgatgaagatggccacgccaagatcaagaaggtggttccagatgatgatgattgaatgatggggggaagatatcaacataggcagtcccatgtttctgtctaggctataggacatagttcatccagtaataatgaagtgccgttcaaaaaaaatggtaataacaaagagattaagtttatatattgtgcatttgtgctgattaatttgtcccgctcaccattccatgcccc

SEQ ID NO: 21351 - DNA, 1082 bp, Oryza sativa
  ref <308>: DATABASE ACCESSION NUMBER: AK071634
  ref <309>: DATABASE ENTRY DATE: 2001-12-06
ggtggacaccctgcgctgcagccgaacgaccgagctaccgagctaatccagccatggcctccaccgcgctctccaccgcctccaaccctactcagctgtgcaggtctcgcgcctcgctgggcaagcccgtcaagggcctgggcttcggccgggagcgcgtgccgaggacggcgacgaccatcacatgccaggccgcgagcagcatcccggccgaccgcgtcccggacatgggcaagcgccagctgatgaacctcctcctgctcggcgccatctcgctccccaccgtcggcatgctcgtcccctacggcgccttcttcatccccgccgggtccgggaacgccggcggcgggcaggtcgccaaggacaagctcggcaacgacgtgctcgccgaggagtggctcaagacacacggccccaacgaccgcaccctcacccaggggctcaagggtgacccgacgtacctcgtcgtggaggccgacaagacgctggccacgtacgggatcaacgccgtgtgcacgcaccttgggtgcgtcgtgccgtggaacgccgccgagaacaagttcatctgcccctgccacggctcgcagtacaacaaccagggcagggtcgtccgtggacctgctcccctgtcgctggcattggtgcacgccgacgtcgacgacggcaaggttctcttcgtgccgtgggtggagaccgacttcaggaccggcgacaacccgtggtgggcgtaagctataacaacatgatccatatcatcatcagcagcaaagttcacttgtgtgatcagcttgtagctataagtccgctgtatctgagaaacgctgctgtaaatccatcttcactttgtttttccaaattatatgtacacacactgtcacactgtatgaaagagcataaaacccttttcactgcataagtaaccctttttgagggttatgaatctgtgagatggatactcttttatagcagatcataccttagatgtcttcctgaatatgggcatttctgcatctgcactacactctgaaactgaaagactgaagaattcagggcataagatagcatatatagagaattgtttc

SEQ ID NO: 21352 - DNA, 1377 bp, Oryza sativa
  ref <308>: DATABASE ACCESSION NUMBER: AK071635
  ref <309>: DATABASE ENTRY DATE: 2001-12-06
gctttaccctagtcgatctccccgtcgcttcggtctcgactcctcgtctcctcggccgccgccgccgccgccgccgccgagcagaggcgatctccacccgcgagcagcggcgccgtcgccggtgtgctgcttctcccgtcggaccctcgccggtgagcacacttcaagatgcctcgctatgatgaccgtgatcgctacgatgaccgttacggcggcaacacgaggctgtacgtaggtcgtctttcctcgcgcacccggacccgggaccttgaagaccttttcggcagatatgggagagtgcgatatgtggatatgaagcacgagtttgcatttgttgaatttagtgatgctcgggatgctgatgaggcaaggtacaacctggatggtcgggactttgatggaagccgcatgattgttgagtttgctaaaggggttccacgtggccctggaggatcacgtgaatatatgggcagaggaccaccacctggttctggccgctgctttaactgtgggattgatgggcactgggcccgtgactgcaaagctggagactggaaaaacagatgctatcggtgtggagacaggggccatatagagagggactgccggaacagccctaagaatctcaagcgtggaagaagctgctcaagatccccatcccctcgtcgtgggaggagccgtggtaggagctacagcaggagccgtagcaggagctacagccgctcccagtctccaaggagggatagccgtaatgaaaggagatcaaggagccctcgtgacagtcggagccctaggggaagcccccgtgacagtcgcagccctagggggagcccccgtgacagtcgcagccctaaggggagccctcgcgacacccagagccctaggggaagccctcgtgatagccgcagccctaggagaagtgcttcaccacccaacgggaggaaccgcagccctacccctaatgccagcaggagtcctgcaccaagggacagcaggagcccaatgagagctgacagccgtagccctgctgaccatgagcgccgtgacatgagtacagctgccaatggccggagcccaagccccagggattatgaagacaatggcaatcatcgggcctcgcctagaggaagcgcatccccttgaatgagaggaagcacatccccttaaatgagatgttaggggatgtatcagtcttaaagtttatgaatcaatttaaacctgttggagattttagtcatatctatgaacctgttgggatttgagtggatctgtatcctatttgttattgacgcctttcataagttgatagaccatgccatctgttggttgtactccgaactgcataaaatggaatttgcggcccaccgcggtttctgg

SEQ ID NO: 21353 - DNA, 2205 bp, Oryza sativa
  ref <308>: DATABASE ACCESSION NUMBER: AK071636
  ref <309>: DATABASE ENTRY DATE: 2001-12-06
atacacccacccacgaactcacgaggagggaaatgctcccctaaaaatcccccaattggagcgaagcaccgccttgatcccttcctcccagccaagcctgcggccggatctgagctccgccgcgccgcgcgccctcgtagcgatggatccgcgcgcgaggtaccctcccggcatcggcaacggccggggcgggaaccctaactactacggccgtggcccaccgccatcgcagcatcagcagcaccagcaccagcaccagcagccgccgcacccgcaccaccaccagtacgtgcagcggcagccgcagccgcagcaaacgccgcacaacagccagcatcagcagtggcttcggcggaaccagatcgccgccgaggccgcgggcgccagcgagcagaaggcgccgcctgtcgcggacggcatagattcgagttcacaagactggaaggcccaactgaagctcccaccgcaagatacacgctacaggacagaggatgttactgctaccaagggaaatgaatttgaagactattttctgaagcgagaactccttatggggatatatgagaaaggatttgaaagaccttctcctatacaagaagaaagtattcctattgcattaactggcagtgatattcttgcaagagcaaaaaatggaactggcaagactgctgcattttgtatacccgcgctggaaaagattgatcaagacaaaaatgctattcaagttgttatattggttcccacaagggaattggctctacaaacatcacaagtttgcaaggagcttgggaaacatttgaagattcaagtgatggtcactactggaggaaccagcctaaaggatgatattgtccgtctttatcaacctgttcatttacttgttggaactcctggtcgcattttagaccttacaaagaaaggtgtctgcgtcctgaagaactgttcaatgcttgttatggatgaggcagacaagcttctttctcctgagttccaaccgtctattcaggaattgattcggtatcttccatcgaatcggcaaattttgatgttctctgcaacattccctgtgactgtcaaggagttcaaggacaaatatctccctaaaccctatgtcattaaccttatggatgaacttacattgaagggaattacacagttttatgcttttgttgaagagaggcagaaagtccactgtcttaatactcttttttccaagctgcaaattaatcaatcgataatattctgtaactcggtaaatcgtgttgaactattggcaaagaagatcacagagcttggttattcttgcttctatatccatgctaaaatgttgcaagaccatcggaacagggttttccatgattttcgcaatggtgcatgcaggaacttggtttgtacagatctttttacaaggggaatagatatccaagctgttaatgttgttatcaattttgatttccccaagagcgcagaaacatatctccatagggttggtagatctggcagattcggccaccttggtttggctgtgaatttgatcacctatgaggaccgttttaacttgtatcgcattgaacaagagcttggaaccgagataaaaccaataccacctcagatagaccgagcaatatattgccaatagttatctgacagaacgatcttgtatgccaatctctggaagtaataagataacctgtgtaaatatcagctcatcaggtgtcatttcatgatctcacatggtgtatcttaatcaaagttgtgtaggggcactcagtagcaagtgactttgtaacaagctcatctaaatgctgtggcttagccgtgaagctcttgatcagacaatattgaatgttgctgataaggtctgaccccaggttgtttgccctaatctcttatgacctgttgtcatccgacattgtatcagctagcttgttttacaggactttttaaccctggtaccttcttctgtctgtgttgtggcctcgctgcacacggatggtttattccacctgagcgatgctgtcaccgtgtgtcggtagtgaatcagcatcatggtctcaatgtttcatggatactttcagcatttcactttccagtattttgtactattttcatgcgttttgattgaatgatcattttgtaatgtattgtttgactgggttggtgtactaggagtatttgtggatcggagatgttatgttctcttct

SEQ ID NO: 21354 - DNA, 1283 bp, Oryza sativa
  ref <308>: DATABASE ACCESSION NUMBER: AK071637
  ref <309>: DATABASE ENTRY DATE: 2001-12-06
ggcgtgaggtgctcctcctcggctcgttggtggttctcgccttgttgtcgctgttcccgtgctgctcctgtctctcgcagggagcggaggaggaggaggacgacggcgaggtgcgcttgatggggctcgccggagaggccgctggctcgcctggcagtggcggcgggttcagtgcaaatggtaaatttagctatggttatgcgagctctcctggaaaaagatcctccatggaggacttctatgacaccagaattgatggtgtcgatggagagaccgttggactgtttggtgtctttgatggtcatggtggagctcgagcagcagaattcgtcaagcagaacctcttcaccaatttaatcaagcacccaaagttattcagtgataccaagtctgcaattgctgaaacttacactagcacggactctgaacttctgaaagctgaaaccagccacaatcgagatgcagggtcgactgcctccactgcaattctcgtaggcgaccgtctgctcgttgcaaatgttggagattctagggctgtcatttgtagaggaggagatgctatagctgtgtcaagagaccacaagcctgatcagtcagacgagaggcagaggatagaggatgctggtggttttgtgatgtgggctggaacatggcgcgtgggtggtgttcttgctgtctctcgagcatttggtgacaaactcctgaagcaatatgtggttgctgatccagagatcaaggaggaggtggtcgacagctctctcgagttcctcatccttgctagtgatggcctctgggacgtggtgaccaacgaggaagctgtggccatggtgaagccaattctggattcagagcaggctgcaaagaagctcctccaggaggcctcacagaggggaagcgcagacaacatcacctgcctcgtcgtccgtttcttggagcaggagaatcacctgccagagagaccgacgaatgatcaagcctcctaacatatcaatcatagctctcttccatacacaccgttcttcattgctcttgcaagtttcttcgaccttatggttgtcttgtgccaagcagatgatgcatctgtcataagtgtcatctgtggatgctgctgtagctgaacattgtaacttgtcgggggatgtgttttttgccatctccttcgttgcttgcgttgccctgatcttgtttgagggcaacttgcaatcgcaggttaagtgttggtcctcaatcatatgatgtagctttctactaaacttgatgtaatgatatgtgtgccattctag

SEQ ID NO: 21355 - DNA, 1116 bp, Oryza sativa
  ref <308>: DATABASE ACCESSION NUMBER: AK071638
  ref <309>: DATABASE ENTRY DATE: 2001-12-06
gattccaagagagcaagccaagatcaagagatcgatcatatcgtattttgtagtaatttagcagctagctagtgcagctgcaagctattagcgactgcatgctttgatcgatccatctagctaattgttgaatccatctaagcttaatggctctgcagcagagcatggcgatgccgatgatggtagtgtctgaccttggcaccgctcctcggtcatcgccgatggttcagctgcagaggatgaagaagcatctggtggtggtggcggcgttcaagagcagaaccaaggcttcccccaaggtggacaagtcgaacaagaacaagtcgatcgtggaggacggcatcttcggcacctccggcggcatcgggttcaccaaggagaacgagctgttcgtggggagggtggccatgctggggttcgcggcgtccctcctcagcgaggcggtcaccggcaagggcatcctggcgcagctcaacctggagacgggcatccccatctacgaggccgagccgctgctcctcttcttcatcctcttcacgctgctgggcgccatcggcgcgctgggcgaccgggggcgcttcgtggacgacgccaccgggctggagcgcgccgtgatcccgccggggaaggggttccgcgcggcgctggggctcagcgagggtggcccgctgttcgggttcaccaaggcgaacgagctcttcgtgggtcgcctcgcgcagctggggatcgccttctccctcatcggcgagatcatcaccgggaagggcgcgctggcgcagctcaacatcgagaccggcgtccccatcaacgagatcgagccgctcctcctcttcaacatcctcttcttcttcttcgccgccatcaaccccggaaccggcaagttcgtcaccgacgacaacgacgaccaatgagcccagcccacccctcattttgcttttactccacttaattaaattagcttcttctgatagtagtaaggagacggttaagtggactagctagtcaatgtcaatcctctcctctgtactgtagtggagtagtatctacttatatgcatatactagcaaaaattcaggacacaacaatcaatcggtactcctgaatgcatgatggggg

SEQ ID NO: 21356 - DNA, 1520 bp, Oryza sativa
  ref <308>: DATABASE ACCESSION NUMBER: AK071639
  ref <309>: DATABASE ENTRY DATE: 2001-12-06
ggggtgcacatgacacgactgcttccgcgtttcttctcggcgacgcaccccacacacgcacacacacacctccattcgctccccgccacacaacacgagaaaccccccacccttcgctcgccgccgccgccgccgccttccgccgcctcgaaccggaccaaccaacgacggctcgcttccctccgaggcggtaggccacctcctcccggcggctcccccatctggccgcccggcgccgagctggggatccatccgcccgcgattcctctcgccggtttgctctccattgccagctgccggtggccatggatgacggggacctcgatttctccaacccggacacattcctctgcccggccgtcggtggtgctgaccccgacggcagctgctccatggacagctatttcgacgacatcctcaaggatacggagcaccatgcatgcacccacacccacacctgcaacccgcctgtgcatgacctctcacacacccacacctgcgtccatgtccacaccaagatcgtctccgccccatccgacactccgtcggatgctgccgagaccgccgagtccccgacggagaacaatgcctccaagaagcggccgtcgggtaaccgtgccgctgtgaggaagtacagggagaagaagaaagctcacactgcctcgctggaggaggaggttgttcatttgagggctctaaaccagcagctcatgaagaagctccagaaccatgccacgctcgaggcagaggtatccaggctgcggtgcctgctcgttgatattagaggaaggattgaaggggagattggggcttttccttatcagaggccagtgaagaacatcgatttggtttctagtgttgatcagggaagttatcttggtggtgcccaggttatgaactcctgtgactttcgatgtgccgaccagatgtattgcagtccagggatgcaggtgagaacaatgggcgaggatggcgctgtgagtggtcaggtgttggggcaaggtgcctgtgatattgccagtatccaatgccaaggtgcaaaatctggatctgcaaagctcccagtctgtggggctatgggtacgatgcctgtcggctgtatgccaaattctgaaaagaaatgaaggatccccatcgccaagacttcaagtcagggcattcaagaaacatcgcataaattgctagcgtctatctctaggaatgtgtgtgattctgtcgccgatgatgcttccacagtgcctgaggcgatttaagttcgttagctatgaagctatcagtatgtcctctagtttgcttagctttccctccgtttttttcttgatgttggaaatggacaatattgctgctagtgactcccaaatgctccctgataaaaaacttaaagattcagcatcattgttttatgccaggatacatgtccagatttggctaggcctcaagttttgatgtgaatctcttgtaaatacatcatgtatgaaatctttgtagtaacatggattcaatcattgtttggatgttcc

SEQ ID NO: 21357 - DNA, 1087 bp, Oryza sativa
  ref <308>: DATABASE ACCESSION NUMBER: AK071640
  ref <309>: DATABASE ENTRY DATE: 2001-12-06
gaaatcatttataacatgattttaattggtgtggaagcaaacaaagcatactgctagattatagtataaacttgtgaaagatatatttcctttgccttgtttatatcctaatagattaattgtgtttagagaaatacctgagctgaaaatgctatcgagattatggctaaaagaatttgattttggtagaatatataagagggaacaaaaaaatattcatttcacaaaagtcgtgtgtgtgcatgtatctgcgcataggcattttttttagcaaaaatactatatggtgattcttttacaaattgtcaatccattgttccatctgtgtaatgggactatctttttccctatggataatcatggcaaattcatagttgaagcgatgaaaacagatctacatgtaactagccatttgaaagtataacatatcaattttgctgaacgagttaaaaatgaacttttgttactggagtatccttggatttttgtgaagtaatcgacataaaagataattcctaccaaatttatttagcttttgcaactagccattaaaaaatgtgccaagaataaactgcaaaacacaatcctatgttgtgtcattttgagcatgtgcaaaccaacaattgtactcaccgatatcctttgttgataacattcactttccttagatggttggttgagattgtaccttcagcttcagtattgttcgtcttaaggaaactaccgactaaacggggaatcacacagcaccatccaacattaggtcaatctgggagtccccaatatgtcatttcaaattgttcagctactctatgtgagcagaaatgcaggttgtccgatacagatgaaccatgaaatcctattgattgaattgcacagttgcttgatttgctttgtatatgtactggttatgcattttgttctcatataagtaatgttgagtgccaaccccagtttgtagaaatacaaatataaaatgtatcccagtgatatttccactttgaatcgtttataatttggaccacatgattgttctatacaactttttagttgttatttgttgcatgcttacaatatctaatactgg

SEQ ID NO: 21358 - DNA, 1081 bp, Oryza sativa
  ref <308>: DATABASE ACCESSION NUMBER: AK071641
  ref <309>: DATABASE ENTRY DATE: 2001-12-06
gatgggcaaaaccgtccaaacccagccacgccgccgcgtgcgcctctcgtttttcctctcctcccacctccgtcttcctcctcctcaatccccaaatcgaagcactcctctcctctcctctcctcagatcggatcgcgagagccccaatcccaccaccgatcgatccattcctgctgctcgcggccaccggagaaggagagagagagagagctcgacctcgtcggcgggtgaaggatcgcagcagcagcagcggcggtagagcaggaggagaggcgaagatgtcgtcggtgttcagcggcgatgagaccgcccccttcttcggcttcctcggcgccgcctccgccctcgtcttctcatgcatgggggcggcgtacgggacggcgaagagcggcgtcggggtggcgtcgatgggggtgatgcgcccggagctcgtgatgaagtccatcgtgcccgtggtcatggctggtgtgctgggtatctacggcctcatcatcgcagtcatcatcagcacggggatcaaccccaaggccaagccctactacctcttcgacggctacgcgcacctctcatctggcctcgcctgtggtctcgccggtctcgctgccggaatggccattggcatcgttggtgacgccggagtcagggcgaacgcccagcaaccaaagctgttcgtgggtatgatcctcatcctcatttttgccgaagcgcttgctctctatgggctcatcgtcggcatcatcctgtcatcccgcgctggccaatctcgtgcggattaggcatgtttcaacacgcaaacccttagtgggttcttgtttcatattcctgaaactacaagctgagctctaggggtttattctgtcttagtttctgttcttctgttgggtcatgaacaaaaaaacatctgtatccaagggatgtttgcccttgtggtgccattctttttcgctatggtggtgctggcggcggtctgaatcttatttatgcacagtttttttgggtctggctagacagtgatgtaatctggtgaataagcaaataattcgtaatgcaatgggagcatgagactcttttgttcactcg

SEQ ID NO: 21359 - DNA, 786 bp, Oryza sativa
  ref <308>: DATABASE ACCESSION NUMBER: AK071642
  ref <309>: DATABASE ENTRY DATE: 2001-12-06
gctctctcactttctcttactcgctctcccccactgtctctctctttctttctctctcatccctgcccccttcccctctcgcctccctcaacggcggcagatctggcagaggcgatggcgtcagcgactcctgcgggccggatccgatggtcctataccccctccccctccccctccgcccctaaccttcttccgtggcagaactggtggcagcggtggtgtcggtggctcccgcgggcagatccaatggaggcgatggcagtggtgtttctgacaagcgggtccagcggtcctctaccccctctccgccccccccctacccccaagcttctccctcggtggcggcagtggcatcgaggctcccacgggcgcatcaggcataggcgacagtggtggcatttccaacaggcggatctagcggccctccaccccctccccttcctccgcccccaagattctcctgtgatggcggcggtggcatcgatgctcctgcgggcggatccgatggatgtggcagccggcggtggcatttctgacgagcggttccggtagtcctctacccctccccctccaccctaagcttctcctgtggcggatccggttgtggcggcggatcccgcgggtggatccggcagaggccaattgattgttgttgttgttgttgttgttgtgatgatgttgttcttgttgttgtgatgatgactatgatcgatagttcgttgtggattgattttgggggtgaagagggatggatgcgctaggtgcatcgagccctttttttttccc

SEQ ID NO: 21360 - DNA, 2008 bp, Oryza sativa
  ref <308>: DATABASE ACCESSION NUMBER: AK071643
  ref <309>: DATABASE ENTRY DATE: 2001-12-06
gtcccgtccccgtctccgggattttaatttcttggcacctcgcctcagcatattccatgtcccctctccatccgccccacgcgcccactttgaccgacccatcgatcgatcacgatatttagtagtagtagtagtattacaaatccagcaagcgatcccaatatcccattcccaaaaccccaatccatcctcggagcacgccaccttcacgaggaagagagaatcgaggaagcagagcgctcggaccagaggaggaggaggaggtgccagccatggtggaccggatcggcgccgcgtggtggtgcgcgtgcgccgtggggatgctggtggtgggggcgtgcctcgccggggagaccagcgagtaccggcgccagctcggctccgccgtcgacatgccgctcgacgccgacgtcttccgcgccccgcccggccgcaatgcgccccagcaggttcatatcacacaaggaaatcatgatggcactgccatgataatctcatgggtgacaacaattgagccaggctcaagcactgtgctctatgggacttcggaggataatcttaatttctctgcagatggaaaacacactcagtatacgttctacaactacacctcaggatacattcatcactgtacaataaaaaagttggagtttgacacaaaatactactatgctgttgggattggacaaaccgtgaggaagttttggttcagaacccctccaaaaagtggcccagatgttccatatacatttggtctcataggtgatcttggtcagagctacgactcgaatattacgctggcccattatgagtccaattcaaaggcgcaagcagtacttttcgttggggatctgtgttatgcagataactacccataccatgacaatgtgaggtgggatacatgggcaagatttgtagagaggaatgttgcctaccagccttggatctggacagctggaaatcatgagatagattttgccccagaacttggtgaaacgaagccattcaagccatacagctataggtaccccacaccttataaggcttccggtagcacggcacctttctggtattctgtcaaaagagcatctgcttatattattgtcttggcatcatattcatcatatggaaagtatactcctcagtacaagtggcttgaagctgagtttcccaaggttaacaggagtgaaacgccatggttgatagtgctattgcatgctccgtggtacaacagctataactatcactacatggaaggtgaaagcatgagagttatgtatgagccgtggttcgtcaagtacaaagttgacctcgtgtttgcaggacatgttcatgcctatgaacggacacacaggatatcaaatgtcgcgtacaacattgtgaatggccagtgcactccagtccatgatcagtctgctccagtctacataaccatcggagatggaggaaaccaggaaggactggccaccaacatgacggcgccgcagcctggctactcggccttcagggagtcgagcttcgggcacgccatcctggacatcaagaacaggacgcacgcgtactacacgtggcaccgcaaccaggacggcaacgctgtggcggctgactccatgtggttcaccaacagatactggcagccgacggatgaatctttggacgactcccagtgatctgagtcgttcgtacatggtttactcacacctgctcctcctccctagtttgtgttgtggttcttctacgtgaataagcactggctcgatttgaacacacaggacggactcacggacgcctccggttcaggcgtcgtgatctaggtggttctttctccgctccagctccctcgtggccgtgtgctgcttgtgtatagaaggagcgcagctcacgtgcagcgagaggaaaagaaagctgagaaattgcgagttgatacttgataggcttgtgtacgttcgtactcgtctagatgttgaataaacacattggtttcgtggcgttgcgacttgcatttggc

SEQ ID NO: 21361 - DNA, 1597 bp, Oryza sativa
  ref <308>: DATABASE ACCESSION NUMBER: AK071644
  ref <309>: DATABASE ENTRY DATE: 2001-12-06
gtgttcaaggtgaacaacaccggcggcagcctggcgtcgccggaccccgtcccgtacaagctgctcgcggagaaggagctcggctggggcgggccgccggagttctccaccgacaacccggccaacatggcgtcggtgatgggcggcacggcgggcggcgcggcggcggccgggatcgtggcggccatctgcgtggtggtgtacagcaacaagaggagcaagaagctgggcggcggcggcgccgactcgcacacctccgcgtggctgccgctgtaccactcccacaccagcggcaagtcgtcggggcacatcacggcgaacatcgccggcatgtgccgccacttctcgttcgcggagatcaaggcggcgaccaagaacttctccaacgacctggccatcggcgtgggcgggttcggcgtggtgtaccgcggcgtggtggacggcgacgtgaaggtggcggtgaagcggtccaacccgtcgtcggagcaaggcataaccgagttccagacggaggtggagatgctctccaagctccgccaccgccacctcgtctccctcatcggcttctgcgaggaggacggcgagatggtgctcgtctacgactacatggagcacggcaccctgcgcgagcacctctaccacaacggcggcaagcccacgctgtcgtggcgccaccgcctcgacatctgcatcggcgccgcccgcggcctccactacctccacaccggcgccaagtacaccatcatccaccgcgacgtcaagaccaccaacatcctcgtcgacgacaactgggtcgccaaggtctccgacttcggcctctccaagtccggccccaccacgctcaaccagtcgcacgtcagcaccgtcgtcaagggcagcttcggctacctcgacccggagtactaccgccggcagcagctcaccgacaagtccgacgtctactccttcggcgtcgtgctgttcgaggtgctcatggcgcgcccggcgctcgacccggcgctgccgcgcgaccaggtcagcctcgccgactacgcgctcgcctgcaagcgcggcggcgcgctgccggacgtcgtcgacccggcgatcagggaccagatcgcgcccgagtgcctcgccaagttcgccgacacggcggagaagtgcctctccgagaacggcaccgagcgccccaccatgggcgacgtgctctggaacctcgagagcgcgatgcacttccaggacgcgttcgacgccgccgccggccgccccgtccccgcgctcgacgccgccgccggcagcagcagccacctcgacgacgggagcacggccagcatcaacacgctggccacgtcgtccacgtcgcacccgcacgagccgtgcgtcgacgttgtcttggagcccgacgacgtcgtcgcggagcgcgccaccttctcgcagctcgtccagcccaccggccggtgacagtgacaccactacggcactaccacaagtgaaccatgcacatagatccaaagtttaattagttccgactttttttttatttctttcgaggaaattagttctaattaatgccaaagtttgattagttccgagtttttcttttgtgttaattaatgcc

SEQ ID NO: 21362 - DNA, 1276 bp, Oryza sativa
  ref <308>: DATABASE ACCESSION NUMBER: AK071645
  ref <309>: DATABASE ENTRY DATE: 2001-12-06
cctctttctctctcgtcttcttcgcctccctccctccgccgcgcctccccatcccctccgccgccgccgctctccgctcttccggtctcctcggcgatctgcgcggccaatcgcacaggcggggcgcgcgcgcggtgaaggatcgctccagtgaggtgagtgcaggggagctctgcatcagctgggccatggagaaggcggtagcggcggcttgtggatggaggaagggtttggaggagggagagccggagtgggaagcgatggagctggaggcggcggcgccggcgatctttccggcggacggtggcggcggcggcgtcaggaggagtccggcggcgtcgacgatcttcttgccagatcttctagacgggagctttctttctgacgatgatctaagccagatggaggatatatttcaaccagcacatgaggatgacatccaccatttgttacaagggccccaagatgaagcagacctggacaaatggttagcaggtcaatcttgttcacccgcagcggaaggctccataacagtccaaacacctacatatcccatactaaatcttatagatttcataccaaaggacggttgtaaacgtggcccacgaggtgctcgcaagagacagacatttccatcacgaggtgctcgcacgagacgggcttttccattgcaacaactatgctttggaaccactagagacaaaagatgtcgtctaagaaaaaataatgatcactggacaatcaaagaagtaaaaaatttggtacaaggtgtttccaagcatggggttggacgatggacagaattgaagagagattttttctccacatccattcgaacttctgtccatctgaaggataaatggaggaacctgttgaaagcatgtgggatcgatttcacctccacagcaaagggaaaagcacagaagacaatgctatggccccttgataaacgattgactgaacagattatacagttagcatataaacacccttacccaagacaaaagtactagaatagttactggttgttctagcagagaaagcaactggtagaagagtcagaaggtatcagagcatatagtagagttgattttagtcaggaccatcagtagatttatctcctccttaactagtagctactgaaatttaaacgtttttttgtcgttttggttacaatttcctctccacatttgggattttgtaattggattgtaaatactgtcttattgacaaattggagggggttcagtctccaggatcttacttggttttactg

SEQ ID NO: 21363 - DNA, 1561 bp, Oryza sativa
  ref <308>: DATABASE ACCESSION NUMBER: AK071646
  ref <309>: DATABASE ENTRY DATE: 2001-12-06
gagcatccatgtctcaggttttttttttctctgatgatttttccattcacatgagtatctgaagaaagcacagaatgactttgttcagtatcttacttctcagctgctcaatcatcagctgccacagctccactgttcttgcaagttgtattgggcaagagggagtacaacggaagcataggacaaggcgaattctcattcccagttacgtcacttcgtgagagcatggtgatgctgctgtacaatgcagatagatcattaatatcacaagcagaactgaagatgaaagcagttgttgagtcaggaactatggatgttgattttagtcttgacaatggaggaagcattattctaaggctgcagttcctactcagtgatgaagatcgcagacgggtccaagaaatgaggaactctgcagtgaaaagaaagcagcaagagctgctttctgatggttatgtactttctcaagacagcttgttgtctaaacaagtcgaaaatatctccaacatttcgagagaaggagatgaatcttcagttaggaagagcatgtcactggatgatttgcaggagaaggctgttttctctgcaattattgtagatccccagatgaaagacacaaaagaatcaccggagcaaagtggatcaaatagtgcagtgcagaaaatgataagtgcctttcaaagcagctctccacaggatctgacgcggatcaaatcagaaagctcactaaaagggctgtctgcttcttcagagaatttcacccagtcttcttcagacaagtcatctagttcactagcaacccaggatgtttcaggccacacagaggcaggtcttgtggctgggacatcaggcaaaatgcagcttcctcctggtgacaaaagcttcagtaacaaaagatcaaatgcaaccgagcaacaggccgttctgtcaaccacatctgaaggcagaatccgtaggctattcagagagaaggacctcgataattcagagatggtgatcacagtccaaaaccggagcaagaagcggtcgatgccgaagcgtcgtcgcgccgccattggcccttactctcttgaacacatgcatccccatgtctgcatcaccactgcaagcaggcagctgagagagcttgttgagcttgagccacccttggattcgtttgtgtttgtaggacaagttgatatcaagagaccaaatgtgaggggaggagctagcatgcaagatcagggcacaagcgacagtaaaacgaaaaatgagatggtttctgctcgaggtgatgatcatggttttccaatattggatgggcggttgattaatcagggagtgcgtgttgtcattgtgatcatagcttgcggagcaatatttctgaacaacagataagggtagcaggacatgtacatttagattgtgtgtgtgtgtttttctttttcaagtttcagtaagtaatgcaactgctatacacctccatccctaaaaaaattaacttccgagaatgaatctaaacaacaaagtgaacaaacgtgtgtccgagtttatcttagaagttgcctttttttttttaagg

SEQ ID NO: 21364 - DNA, 660 bp, Oryza sativa
  ref <308>: DATABASE ACCESSION NUMBER: AK071647
  ref <309>: DATABASE ENTRY DATE: 2001-12-06
gaatccaaccaaagcaagccaagaaaaaacaagaagcaaaaaaatcccaaagcaatctagctagctaaataacattagtttagtgcaagtgcaagaacagctagtagcttagcttagagagcaaattaagatgagctggtggcagagccagaagatcatccgcaagggaggagcaggaggaggaggcagtactgctgctccggccacggccgccgccgccggcggcatcggcggcggcggtgccggcgaggtggcggtgcagaaggtgtaccacaacctggcacccaagccgaccttcaggaagatcgacagcatcaaagaggacatcaacaagaaggctgacaggttcatcaagatgaccagggcaaggttgttcaaccagaccaagtccttccggcagccggccggctcgccgccggcgacggcggccggccgtgatgggaaactcttctgatcgatcgatccactcgccgtatatgccgccactgcaaataaggagcttaattatttaatatctacttaattatgtgatatatagccatgttatcatgatccaggtagaactgatgatgaactttatagatggcggtgcatgtattaattatttgtcctacttaggacgacgtgatgatgattatttatggactaaataatttcatt

SEQ ID NO: 21365 - DNA, 827 bp, Oryza sativa
  ref <308>: DATABASE ACCESSION NUMBER: AK071648
  ref <309>: DATABASE ENTRY DATE: 2001-12-06
ggcgcccttcctcccctcttcttctccttcgactttgttcgactcccctccttcccggcagaggagaggagaggagaggagaggactcatccatcatcatcaatcaacgccataacgagctcctcatctccttcccgaaaggcgctgagcaagatcgcttgcaatcggctgcagaaggagctcgccgagtggcaggtcagccctccctccgggttcaagtacagggtctccgataacctccaaaggtgggtaatcgaggtcaccggagcggcgggcacgctctacgccggcgagacataccagctgcaggtcgacttccctgagcattatcccatggaggcgcctcaggtcatttttctcaacccggcgccgatgcatccacacatttacagcaacgggcacatctgtttagatatactgtatgattcttggtcacctgcaatgactgtcagttcggtctgcatcagcattttgtcaatgttgtcaagttcaccagcaagcaacgccctcaagacaatgaccgctatgttaggaattgccgcaatgggaggtcgccgaaggagaccagatggtggttccatgatgacaaagtgtaagaggaactagttggcacttttgccattcagtaatcgtaataccttgaaatctcttgcaaggggaaaatgagatgaatgtaggcttactgttaagcatcactctattggaccaccaagcttaactgctgggttggtttgtacatgagctgcctgcacacatgtcaagtcatgaatataatattaccataaatgattatacagaataagcaagtgtaccatgctgattctctg

SEQ ID NO: 21366 - DNA, 1522 bp, Oryza sativa
  ref <308>: DATABASE ACCESSION NUMBER: AK071649
  ref <309>: DATABASE ENTRY DATE: 2001-12-06
gctctctccaccctcagccgccacactcccatccattctcctctcctttcctctcctctcctctccggcggtgggtatcggcgatgacagcgtgcggcggcgtcctccttcgccgcttaccacgccgcctctatctccgccgccaccacgctcgggagcggtggatctgctagatcccgggcctagggcggctagatcgagcggcggcaatccccgggcggctcgaggacggcgtgcggctgcatcgacgggcccaaccgctagccgattccaaaccacgttggccacagcatcctcgcgccgcccgctgaccacccccccttcctcgtgctcctccgcgcatagcagcagccgggtcagagagagtgccgacacggcgtggacgcgtccgcaaatgccagtgctggtcctcacgctgatagctagtaggcccattaggcttgtttagtgtaaatgagacccaaatttccccatctgagtcatctgaccatctcctccaacctccgccaatccccatccccaatccccatcggcggacgggggctgctgtggtgcgcgccgcgcgggagggcagggtgaggtgaggagggcgcggccaccaggcttccagagctgcggctgtggcatctgctccggcaaggcggcagcacgaccagccgccatggcccaaatgggcaggcgcgcagcgcaggaagagcagagacagaggcagggtgggatgaatggcacaacagcagtgcaggcgtgcagcacccagcgacgacagcaagcaagcgacaagccaacaagccaagcatccatcactccatcaacaggccacacctaaaattttttccgtcctccgccactggtgtggctgtgatgcatcaagcgccggtggttgatatggccgagacttctgtgccgaatcttggcatgaagcccaagatctctgaacggacaagcaacaccaaggccacaatgggcacaaggatgaatccttacggatgctgccgtcatgcacgttgtccacctgtgcgttgtcatgcggcagataaacgggctggagcagcaatacgtatgaacataagttgctgctcatacaatacatgtgaggattctaccattaaatgcacaatgacccaatttgaggatcagtttagcactataaaacctgatgggattcaagtcagatgccgtaaggattcatagatacattatgccactggggtacatgtaattcaagtacaataagaaactactcaattgtttggcagcaattttgcatcatcagatgctgaatagtgctgctgtgcttctggccgttgtgctgttgctgctgtgcttttggccattgcgctactgctgctgtgatgctattgcagatgtgctgctgttgctctcgcagtagcaggaatatgaaatttgagagtttggatatgtactgaattggtggatggatgtaatgatattgcatttcaagacttctggaatgtgaaatgcatgtgacattgcaatcatttgtggaatgttaattcatttg

SEQ ID NO: 21367 - DNA, 1543 bp, Oryza sativa
  ref <308>: DATABASE ACCESSION NUMBER: AK071650
  ref <309>: DATABASE ENTRY DATE: 2001-12-06
gagaggaggattccatcgggtttccctttcttcttgctcgcccacgcgcgtggcgccgccgccgcagagctcgattcagaccatggcgtcgccgtccatcccggcggctctccgccacccgcatgcccacgccgccggcctccgcctcctccgctcctcgggagacccctgcccgccctgcacccttccgtttaggttatgtggagtgccattaaaaaagggccatgtgtacgctggtgctgtatctgctaccaggagtcctggcttgggcaatgcagagaatctgcgtgagagtccaagcttgtcaaggagctggggtatgaatgggcagattggcgatgatcatgatattcttatagaatgtagggatgtgcacaaatccttcggtaacaagaaggtattgaatggcattagcttcaagattagacacggagaagccgttggaataattggtccttcgggaacaggaaagtcaactgttttgaaggttatggctgggctactggctccagacaagggcgatgttattatttgcggaagaaaaagacatgggctagttagtgatgaagacatatctggtgtccgaattggcttggtgtttcaaagtgcagctttgtttgattctctcacggttcgtgaaaatgttggattccttttatatgaaaattccagcctgcctgaggagagaatagctacactagtgacagaaacattggccgcagtaggcctaaaaggcgttgaagatcgaatgccatctgaattgtctggtggcatgaaaaagcgtgtagctctagctcgttcaataatatacgatgatacaaaggaaacaatagagccagaggttattttgtacgatgagcctactgctggacttgaccctattgcatccaccgttgttgaagaccttatacgttccgtacatgtaacagggaaagatgctcttggtaagcctggaaagatagcatcttatgtggttgtcactcatcagcatagcacaataaaacgagccgttgacaggttgttatttctccatgaggggaaggtagtgtgggaaggaatgacacaagaatttactacatcaacaaatcctattgtaaaacagtttgcatctggtagcttggatggaccgatacggtacttctgagaattataatccaagttttcttaatgctccctgccctaccaacctgcacattctgccatatctacagaaggcatcccagaacaagaggacgacatgtgacttgtatctggttaccttaggcaggtctggaggtacacagcaaagtttctgccttggcattattaagcaaccaatagttgcgttagcacacaggaatataacccttgagatttgttggaccttgttaagtgaaataaacaggaagaagagcttgtaaaatggaacagtttgttggttgagttgtgtaaatgtaaccttgattgtagcagctgcttgggtgttggtgtcatagatgagagattctatattcaattattgataaaggctctacaattttgcgagccaaaatcgattggttgt

SEQ ID NO: 21368 - DNA, 1093 bp, Oryza sativa
  ref <308>: DATABASE ACCESSION NUMBER: AK071651
  ref <309>: DATABASE ENTRY DATE: 2001-12-06
gttagatcgaattttctcaaaaagaaacctctcgttgtctcctccgctccttgcctccttgcgccgccgccaagacgagtggcggctgaacaagggagggccgggcggcgatctccatcgcagcggaggggaggggatcctgcgagaaatccatggcatggggaggtctcttcttgagcttcagccgtccctcacaggaccaacagaagtcatgcctttcagctgctggtggtttcaactatgatgcgcctctccatggtgcctcaagaccaaaatcagtagctaaattgactgcgggagatactgaagcaagtgacaaagcgcttgtcgagcgcggcttcttcgtgaaccgttcacgtgttctggttggctctggcactaccaccttcaaccatgccaaatccgcgcttctctcctggaagcatttggcactaggctgggcaaatgtggaacccgacacaccggtgaaggctggaacaaggttctgcatttgttacaaggagctgatcccttgggtcatgttgcccctccagattgcctatgtgaccgatggcaatggaggcaactcctcaggccatggaaaaggctgcgtttttgcttatggtagcggcactctacaaggccatctgctggcaggggaggagaggttctcggtgcagctggacgaagacgatcaggtgtggtacgaggtgatgtccttctcgaagccagcacacatcctgtccagcctctgctacccgtacgtgcagctgaggcagaagcatttcgcgcatcagtcagggcaggcactgctcaggcatgttgccagccgctccagggacacacggtgatcgacttcgtctgcagatttgatcttttcttcaggagtagtcttcgcatgttgtgagtgagcctgcttgtatgttcctgtatctatgtccgaatctgctcctgagagcattattagtttgtagtttgaatttttgagctcagggtaattatttagcatttgtgctttgttgttaagttttagatcaaattgaggtgttatggtgatgtaaattcagatttccatggtttgttactaaatcaaaaggaagaatgaaagataagc

SEQ ID NO: 21369 - DNA, 1217 bp, Oryza sativa
  ref <308>: DATABASE ACCESSION NUMBER: AK071652
  ref <309>: DATABASE ENTRY DATE: 2001-12-06
gaaagaaaaaaagagagaaaaaactcactgcatcgcctccgcctctcgccgccatcgccgcgatgaagctggacgtctccgccatggagaacaacttcgccgcccacgccgccggcggcgaggacgacggcggcctcttcggcgccggcgccgacctgccgccatggagctccccacctgccccgccgacttcgacgggttccagaaggagaccaaggagatgctgaagcacaagaagggaacgaccacgctcgcgttcatcttcgacaagggcgtcatcgtcgccgccgactcccgcgccagcatgggcggatacatatcttcgcaaactgtgaggaaaattattgaaataaatccgtacatgcttggaacaatggcaggaggtgctgctgattgtcaattttggcataggaacttgggcatcaagtgccgactccatgagctcgcgaacaagcggaggatctctattgctggtgcttcaaagcttttggccaacatcctgtactcctaccgtgggatgggactgtcaattggtacaatgattgctggatgggatgagaagggtcctggcttgtactatgttgatagtgagggcgcaaggctcatgggaagccgattctctgttggatcaggttctctgtatgcctatggtatcttggacgagggttaccgctatgtgatgccagttgaggaagctgctgagttagcaaggcgggctatttaccaagctacattccgtgatggggcaagtggtggttgtgttagcgtttaccatgttggcccgaacggctggacgaagctttctggagatgatgttggggagctgcactacaagtactacccggttgaggccactcctgtcgagcaggaaatggccgatgccccagctgcttaaacctccctctgcccaatctggcgcatggtatccagggctgtgaactgtagaagcgcccttgtctatgaacttgtttggacatgtttctctcgtcgatgttgagagatctcttttgagatcagctgatgtttctcattaactttacgctactgctaccgcaaatgtgattgtagactcgtatagatgctttttattcatgtttcctttacattggtagtgccccgactccgtatgccttgcctgtgctgcgttcacctatgtttctcgatatcacgccttttcgttgctgaatacacataataaatatcactaatttttatgt

SEQ ID NO: 21370 - DNA, 994 bp, Oryza sativa
  ref <308>: DATABASE ACCESSION NUMBER: AK071653
  ref <309>: DATABASE ENTRY DATE: 2001-12-06
ggcagagatggcgcacgccttcgccggcggcacctccgccatctgccgctgcccccacgaccccggccgagccgccctcgtatcccgccctcgccaccgcctccgtgtcctcgcgtcgtccctacccacgccggccatcgagggccagggcgtcgagttgtcggtgacgactcggcgggggcgggtgctgccggtgctcaaggactgctccctccgcgtccctccgggtcagctctggatgctcctcggccccaacggctgcggcaagtccacccttctcaaggttttggcaggatttttaaatccttcttctggtacagtgtatattaacaggccatgcagctatgtcttccaaaatcccgatcaccaggttgtgatgccgacagtggaatcagatgttgcatttggtcttggtaagctcaacctttcgttggatgaggttaggtcaagagtatcacaatcactggatgctgtgggaatgttaagctactctcaaaggccaatccaaactctgagtggcgggcagaagcagagagttgcaattgccggtgctttagctgaagcatccaaagtactactactggatgagctgaccacattcttggatgaatacgaccagatgggtgttatcaaggcggtaaggaaatctgtaggtgctggtggggaggtttcagcattgtgggtgacccatcgactggaagaactcagatatgctgatggtgctatttatatggaagatggccagacaattattcaaggtgatgtgtctacaatatccaaatatataaagaaaaagcaagcccgctacttcggtcactttgagctttgatacttggaatgaatatgaagctatggggaaatttgcctactcctgtacacatcatattgttgaaaatcagtttatttttttaggctatttccccgcaaatttcttacctcaattccaagctgtattctactctcttgctctttacttatagcaatgtcgatttgg

SEQ ID NO: 21371 - DNA, 1497 bp, Oryza sativa
  ref <308>: DATABASE ACCESSION NUMBER: AK071654
  ref <309>: DATABASE ENTRY DATE: 2001-12-06
gagaaggttctagacgggcgaggaggatgcgggtgctggaggacgacatgttcccgtcgacgccggggaaggtgaagatcgagagggcgacggcgatgaaccgccagctccaccgctgcttcgcgtcgaccagcaccatgttcctctgggcgctcttcctcgtcgccatgaccgcgtcgtacctcagcttccagtccttcgtcgacacctcgtccaagtacttcgccgcctcctggggcgggctgcactgggagcgccagatccgcgcgtccgccgcgccgaggcggccgcccgggtcggcggcgggcgcggggatgtcggtgctcgtgacgggcgccgccgggttcgtcggcacgcactgctccctcgcgctccgcaagcgcggcgacggcgtcgtcggcatcgacaacttcaactcctactacgacccctcgctcaagaaggcgcgcaggtcgctgctcgcctcgcacggggtgttcgtcatcgagggcgacatcaacgacggccgcctcctcgccaagctcttcgacgtcgtgcccttcacgcacgtgctccacctcgcggcgcaggcgggcgtgcgctacgccatggagaacccggcgtcctacgtgcactccaacatcgccggcctcgtcaccctcctcgaggcatgcaaggacgccgacccgcagccggccaccgtctgggcctcctcctcctccgtctacggcctcaacgacaaggtgcccttcacggagagcgaccgcactgaccagccggcgtcgctgtacgccgccaccaagaaggccggcgaggagatcacccacacgtacaaccacatctacggcctctccatcaccggactccgcttcttcaccgtgtacgggccatgggggcggccggacatggcctacttctccttcacccgcaacatcctgcaggggaagcccatcacggtgtaccgcggcaagaaccgcgtcgacctcgcccgcgacttcacctacatcgacgacatcgtcaagggctgcctcggctcgctcgacacggccgggaagagcaccggcaccgggggcaagaagcgcgggccggcgccctacaggatcttcaacctcggcaacacctcgccggtgacggtgcccaacctggtgtccatcctggagaagcacctccgcgtgaaggccaagaagaacgtggtcgagatgcccggcaatggcgacgtgccattcacgcacgccaacatctccctcgcgaggcagcagctcggctacaagccgaccaccaacctcgacgtcgggctcaagaagttcgtcaagtggtacctctcctactacggctacaccaggggatccaagaacttgtgactataatccgccctaattcttctgctaattcttttctttttctttcttctttttttcttcttattctctggccatccagtggtcgattccactccaggatcaaaacattaacattcttatttcgactttttttttgggggaaatattttaggatgtt

SEQ ID NO: 21372 - DNA, 1359 bp, Oryza sativa
  ref <308>: DATABASE ACCESSION NUMBER: AK071655
  ref <309>: DATABASE ENTRY DATE: 2001-12-06
gagcttctctctcttgctggctggctctctgcgcgtggtgtgtactcctgctgtccctgctgcggctacagctactgttgcagctcgggcacccagaaggccagaaacccagaacaagtctcacaccctcctcctcctctcgtccatactagcaccaccgctgctgctgttgctcctgctgctgtgctgccgccgcctgctcgtccaagaatcttccagctttccccaatactgagcagccaactcctgctaccgcttcttgatctgtgggattttcttcttgtttcgaatccaagatcacttccaatccatagttttggcttttggcttccctccagcatcagtgaaaattggttctttggaggggaagaaatggatagcggctggatatgcttcttgagccagattgctgatttgatgcaataagatttctatcttatttcttgctgcagtatcacaaatcaaactaggagaactgactgagaagtgaaatattctgcttccaagaatcaatcagataaactgattccaagaaaataacaagaagtaatcagataacagaagcagctgcagctgcagcagtagcatctttctgttcccagtaattgcccaatccaactccagctagatttaatcagatagagaagtaatctgctggattgaaatccatgggtaggggaagaggcagagggaggaagctcaccaatggcaggagccatgaggacaagggcagcagcggcgaggaggttgtgcctgcgaggaagaggaggggaaggccgcagaagcgcattgtcgacaaggtggtggatcaagcagaggccaagaatctaaccgagggcgacgacggtgatgctgactaccaacaaggcgaaggagaagacggcggtgcgaagccgaaggtgtcaagaacggagaagagctctgcagggaagggcaacaagaggaacaggctgcccaaggaggaagaaagctcaaaccttgaccttgaggagaacagctcaagcacccggtccagcaacgatgaatccaccaggtccaatggcttccggcagaatggcagccggcgtaagagcacgccgcggcgagccgcggaggcggggatatagcttggaaactttggaatagggtggggaggacagtttcatcagggattggttcttgggttatatcatcagttaggcaagctgctcttcagttttgtcatcttcagattcggcaagttttccttcaaaattttgtcatgttcatgtttgctaggcaccaacatgaatgtaatgtaaacatatactaatccgcgagacatcggagttttgcttctggtgatgaaaattgtatgaactagcatcggcttatggtact

SEQ ID NO: 21373 - DNA, 1389 bp, Oryza sativa
  ref <308>: DATABASE ACCESSION NUMBER: AK071656
  ref <309>: DATABASE ENTRY DATE: 2001-12-06
ggtgtgccgcggcgacggcggaggcgacgaggccgaagccgccggcggtctggccggcgatggaaggggggggggggacccgccggccgtaggcgcgatgggtcggccgcccagatcctctccaccgtgaagatctccccatcttatcctcggcgatctgcgtttcccttgctcggaaaggcgacccagaatcagtaactacgcataaggagaatacaagcaccacggctgatcacaaaagaagctggaccacctgcagatgaagctatattcagaagtgattcagtgaaatccgcagttctaagctcaccactagttgagtttagcacgatttattcagcaacaaataattttagcaacaagcttggtggaggcggatttggttttgtttacaagggggtactacctgatggccaggagattgctgtcaagaggctgtcaaacagatccagtcagggattggaagagttcaagaacgagatgaaagtaagaggctaatatttggatggaaattgcgatacaagattattcagggaattgggagaggattattgtaccttcatcaggattccaggctcaaaattattcacagggatctcaaagcgagcaatattctgcttgatgatgatttcaaccccaagatatctgactttggtatggctagaatatttggtgaacaccaacttcaagcccttacccaccgaattgttggaacctatggctacatctctccagagtacgcaatggagggcaaattctctgagaaatcagacatcttcagtttcggcgtgttgatcctagagattgtgagcggacgaaggaacagctcatttgttgatgaagaatggtcaatgaatctcttgggttacgcgtggacactgtggaaggaaggcagtgtctcggagctgatcgatccactcatgggcaccatatgctcttacgatgaagtatgcagatgcatccaggttggtcttctgtgcgtgcaggaattaccaggtgataggccaagcatgcccctggtgctcaggatgctcagtggggatgttacacttcctgctccgaagcaagctgcatttttcgtcggaagggttcctctggatgataacaatactggatcggggaatcagttgacgtatactcaattgcaaggcagatagctccttgtcagtgcctctgaatctcttgttcaacttgccaacctggattactgaagttggtgtctctcattttccctgtttgtttgttgttaacctagtaataaacctgttattatttttgtatataggtttgcttgtaatatgtggaactgtaagcgtatttgggaattggaatgccgtttgtttatacatctgggtatcagggtatgcaacaccaggaaatttatcctcc

SEQ ID NO: 21374 - DNA, 1505 bp, Oryza sativa
  ref <308>: DATABASE ACCESSION NUMBER: AK071657
  ref <309>: DATABASE ENTRY DATE: 2001-12-06
ggccttctccaaatccccttcgcattcgatcccctcccctcgccgccgtctcctccacctccgccgctcgccgcccgatcccctcccatcccctccgccccgccgccccgcacctagatatgccgtcgtcgtcgtcggcggcggcggcggcgtgcgggcccccggagttcacgccggggtggaagacggtgtcgacgtgcgccccggacgtcgtcggcgagggcgtccacgtgttcgacatcttcgggtacagcgaccacaaggggatgggcgcccacgagcccatcaggtcgggggccttctccgtcgccggcctcgactgggtcgcctgcctctacgccgacggctacggcgtcgccggcatcgacgacgtctccgcctacctcaggctcctcggcgacgcgcccaccccgcgcgtgtgggtctcctgcgaggtcaagctcgtcgaccagcgcaccggggtggcctccacgccgcagcccttcctcaggtacgccctggcgttcggcgacaagtgcaaggccctccactgtatgatgatccccaggggccagatcgaggtggagccctacctcgtggatgatcgcctcaccatggagttccatgtcgtcgtcaggagagacccccgggtgtcgaggaccgcccggttcccgcgcatcttggtgccgccgcccgacatcaagcggcagtttgccaacctgctgcagagcaaggagggcgcagatgtcaccttcgatgtcgcgggggagccgttctccgtgcacaagctcgtgctcgcgatgcggtcgccagtgttcaaggcggagctctgcgggctgctgagggagccgggaacacagcctattaccatcgttgatatgcagcccgccgtcttcagggccctgctgcaattcatctataccgatcagttccccgtgacgcgcggtttcgagagacgcgacaattgtgaaatgatccggcacctgctcgttgctgcggacagatacgccgtggataggctaaagctgctatgccaaggtatcctttgcaagaatcttaatgttcacaatgtcgcgactacgctggcactggctgatcagcatcaatgcgacaagctgaaggatgcttgcatcgaatttatgtcatgttcaaagaagatgaagggtgtagtggcgagcaaagggtatgaggatctccaaagaatggcaccttctgtcttggcggatgccgtggcgcagatgtcgaagctcaacaaaatgtcaaggggtagtgttccacaagatgagtctaagagctgttagcttaatttataagggatatgggtattctttcttctcttcctaaatcaggtaccgtagtcagtttactctttacattttgggagcacctttgtggtgcttatctgtttatatgatagataggtttattttatctcttcgcaagctttgtttccattaactgacatataacctgttgtccttccgcaaaatttattttgtgcgcccttgatcaaaatttggataccg

SEQ ID NO: 21375 - DNA, 703 bp, Oryza sativa
  ref <308>: DATABASE ACCESSION NUMBER: AK071658
  ref <309>: DATABASE ENTRY DATE: 2001-12-06
gtagtgtgaacgcggcaaggaggaagagaggacgagatgggcggcggcggcggcgacgagcgcgagaaggccaagggcggcggcggcggaggaggaggaggaggtggaggaggagagtacgggacgttccagggcccgcccagctacccgcccccgcgcccgccggtcgtcgggtacccgcagcccgcgccgccgccggggctctacggccagggcgatccatactaccgcccccgcggcgggtaccagggcattcccgctcgagattatgaagcaggtgctcgtggacatggtcatgaccgccttccttgctgtgggattggcattggctggtttttattcatagtcggtttcttcctcggtgctattccttggtatgtcggagcattcctactgtggtgttctagagtggactacagggagaaaccaggatatgtagcatgcgctatagcggctgtccttgccaccattgctataataatcggagctaccgctggagctgcttaattacattttacattgtgtcgttattgtacatactgtatatctcatggatgcacaaacatttagtatgtcgtctgcgatgtaccttattcagcttttcttttccgtttgattttttaatgtttaacaaggagaacggatgcccttgttcatggtcataaataaatcaggttgagacgatttcgccttttgaataccc

SEQ ID NO: 21376 - DNA, 2054 bp, Oryza sativa
  ref <308>: DATABASE ACCESSION NUMBER: AK071659
  ref <309>: DATABASE ENTRY DATE: 2001-12-06
gatttctctcgctctctcctcgtctttctccgtctctctctatcgccggccatatccaccactgctccaggctctttcccttactgctgcagttcggtgatgagcgtattggggcagcgccgcccctctgctgctccgctggccccttggagctcgagtccgcacggatcccttcgtctctccgcccccctcgcgcggatccgccgtcggcgcctggattccaccgtctctccacccttctctcgcgcagatccgccgtcggcggcaataggaggggctgatccggcgacctcttcccctctcgcacggatcccgtcgcgccggcgacgacgggaggggtggatccggtagcctcccctacggtgacgacgacgatgggtggacgctacctccatcgctccatctgccagcgacggacatccttgattcgccgtcaaccccagccactgccgcccaggtattctttttttttaagacaacatctgagaattccctctagtcacaacctgaaagtactctcttgtcaaaagtaagtgatttgtttaatcctttagttggtcagtcggctgaagagctggtctgtagcattttttggtccgttgatgctaatcgaatcatacaaatagcacttactcctggtagcgaggaactcaggatgttgtagcatggcaacatactaaatctggtatgctcactgttcgatcggtttatcatgcacaatgcaatcataagttctgcaatcaggataggcaatctgagaaggtagagcaaacatgatttagataaggtttattttgttatgcggcttacaaaaacatatttaattttgaattgattcttttattggtacatgcagtgataatatgaacttattccttttgatgatagtacctgttcatctaattaattttataccacacagtatcctgagggaaggcttcatatttgctaagtgagttgcgtttttttatgtgtgctattgaattgaagtgagcaaatattgctgtcgcacatacaggtctgttgttcttccatccttcttagtgatttttacctccagatgtttatatatagatagaatagacaattctaaggtacctctttagagataacattctcttttgccttattttactatcgtttgtgtctgccttcaaaataaatgttctgaatattcagatagtttaaatggggtatctaaatgatttatatgacttaggaaattagagctgttacaaacaaatttcttgattttttttcccatcaccatagtgcattaattgtctagttttttggccttctcagatgaaattgatcttgcattcttacattggtaaagaaatattttctttgttggtttaaactcggcttgcttttgcatgagcgaatgtactattttggtagatacatcacatgcataattaaagacagtataacgtaccatgaacagtgagtgcatcagcaagttattatgagccaatgcatgttatgacttagtgataacattaaaaaagtaggcaagcatgcatggagtagaattttttgagttatataaatctaatgaaattgtaattgcattcaggttgagtacaatgataacctggaatcgacattgattggaggtggcttggcaccctagaggaaaaaccttgtgatttgtattttttttgtgtgcttctattatttctatatgtatgtcttgcctgagaaatctgtaaaatcgtgatcgggtgagcgctaaaaatagtggaagaaagaagaaaaggaaaacggaatagcaagagcaggactcctggtcgcagttggggcaaaccggagtaggagtgggggtgcacctgggcttgtgggcttgtggtgcacctggacttgtggctctatgggcttgtggcttggacctggacttgtgggtttgtggaacacctggacttgtggctctatgggcttgtggcttggacctggacttgtgggtttgtggacacctggacttgtggaggtgcacctggacttgtggctctatgggcttgtggcttggacctggacttgtgggtttgtgg

SEQ ID NO: 21377 - DNA, 1401 bp, Oryza sativa
  ref <308>: DATABASE ACCESSION NUMBER: AK071660
  ref <309>: DATABASE ENTRY DATE: 2001-12-06
ggccgccctgacggcccggttcacggcggccaccgcggtccgcagccaccgcggccagccactggacgacgacgcgtccgccatctgcacggggccgagcaagagccacaccagcgccatcagcgacatcagcatggtcgcggacaggctcctcgcccacttcagctgctcccgccgccgcttcatgcccatggcaacgccgccacggtgggcgtgaggcgacgacgggtggtcggccggcgccggcgcgcgcctcgggcagcagccgccggcgagcgctttcaccagcagccaggcgagctcgagcagcaccgtggagacgtcgaagaaggcgaacacgacgaggccgaacgccacgagcgccctcgtcatgcgcgtgtcggacgggacgccggcgtcgcggaacgcgcgctgcacgtacaggaacatggacccgatgcccgacgcctgctggaatgccttggcgaccagcgcgctgacgatgttgcgccggaccggctccgtcggcctcgccagcagctccagccagagcgcgcgctcctccctccaccgggttcgccacgccggcgttgccaccgtgtcgtcgcagccgacgtcgtgcggctcgccgagctccgtttttgtctcgagcagacggagctcggcatcctccagtgacaacgtcctggagaggacgcgacgtgcgtggtccttggtcaagagccactgtggcaactccggcatgaggaggacggcgaagccgagcaacgccgggatggccgtgccggtggctacggtcagccgccaggcgacgcgcacggggaggttcaagaatctcggggagaagcagaggccgccgaggatgcaaccgaggcacacgaagccgtcagggtgcgaggtgaggccgcggtgcagcgacgacgggctgagctcgccggcgtaggccgggacgctcatgagcgccaggcccatgccgacgccgttgacgaagacgccggcctcgaacgccgcgaagctggtggcgagcccgcgggcaagcgcgcccgcacaccatgacgaggtctgcatcgatcaccaatgcgctcgcaagatcacgccgtgcttgatggacagatcgatgcatctgcgcgcgcgcatggatgggatcgctggttcttaccgtagcccaggaggagaggcgtcgccgacgagagcacggcggtgacaaagccatatttgttcttaggacgcctcatctccggcaagaaaagaacaccgtctctattcactaatcctaccaacaaatttcgagtggtgaatgctgatgaaattctctgcaaatctgataaaaagaatactgatgcagatgagaggaagcgatttgagtggatctgtaaatcataagagcacgaacggtctcaagacgaagatggctctgaatcg

SEQ ID NO: 21378 - DNA, 840 bp, Oryza sativa
  ref <308>: DATABASE ACCESSION NUMBER: AK071661
  ref <309>: DATABASE ENTRY DATE: 2001-12-06
ggacgggagaccgaggcgagagggaagagcacatggcgagcgggcgaggaggagggggtggggtggcgtcgccgacgccggcgaaggtggagggcggcggaggaggaggaggaggggggccggggatgccgatggcggagctggagcaggtgttccggcggtacgacgcgaacggcgacgggaagatctcggcggaggagctggcgtccgtgctgcgggcactgggggcgcccctcggtcccggcgaggtgcggcgcatgatggacgagatggactccgaccgcgacggcttcgtcgacctctccgagttcgccgccttccactgcggccccacgccggcgcacggcggcaagggcggcgacgccaaggaccaggaggccgcgtcggaggcggagctgagggaggcgttccggatgtacgacgccgacagcaacgggaagatctcggcgcgggagctccaccgcgtgctccgccagctcggcgacaagtgctccgtcgccgactgctcccggatgatccggtccgtcgacgccgacggcgatggctgcgtcaacttcgacgagttcaagaagatgatgggcggcggcggcggccggcggtaggctggaggggactgactccgtatggttgcccggtcaaagttttatctgttcttgcatggtttccgtaattagaagcttataaatcaagcctaatatttagcatgtgaacaactttttaagtagattttaaaaaagccccccactgatttgatgggtagtgatgtaatcatgcaaaggtagtggagtgacatgctgtattactgtttctgatatatactgtacaacttgactaatgttc

SEQ ID NO: 21379 - DNA, 715 bp, Oryza sativa
  ref <308>: DATABASE ACCESSION NUMBER: AK071662
  ref <309>: DATABASE ENTRY DATE: 2001-12-06
gatcgcatccatctctccagaggcctccatccaaagccgcgcaaaacgccaccacccacaccacgctgcactcgcgacgcgagggaccccgccggcggcggcgcgaggaggagaaggagaaggagagagagagagagaggatgatcctggtggcgatcgtggcggagctgctggaggagtacacggcggcggtggcgcgcgccatggagctcctgctgtcgcgggcgccgccccgcatcttcccgcgccgcgtccgcttcctcgtcctccggagcctccccttcgcctcgccgccgccgtccccgctctctcccccgccacccttcaccgtcgccgccggcacccgctgatcgatcgatcgatcggtccatgacggctccacgtacgtacggcaaccagcaaagacagtacgctggctgctgaagtagtctcgccttcgaatcatgaattaacctgctcgcgcgtgtgcatagttcaactcgtgatgtttgtagcagcgtgctagattactagctagttgttgtgttcttgcagcttagtaattaattaatcatttgcttagcttctgatcctgaaaaagcttgcatgtagttgtagcccagcgactgagttacggtcacgggctcacggccagttgactcggagcgagaagatgtgtgtaatctgtgtgaggttttgaattacttgaagaaaatttggagatcttgtttgtttt

SEQ ID NO: 21380 - DNA, 1557 bp, Oryza sativa
  ref <308>: DATABASE ACCESSION NUMBER: AK071663
  ref <309>: DATABASE ENTRY DATE: 2001-12-06
gctcccccccatcaccaccactcctccgccgcgtcgccgtcgccgtcaccgacaagcctcgcctctcctcgccggttcgccgtcgcggccgcctcctttgtccgctccagcgccctcctcggcccggatcggcccttccccagatggagagggcacttgattccttgacgtacaaaggctccattccagacgctatccttcagtcaagaagggataacaaactctttgtagtgtacatatcaggtgaagatgagacttcgagtagtttggaacagtcgacacttgttaatgaaagtgtggctgaagtgataggcaactgttgcgtattcctgcatctaaaacaaggcaacgtcgatgcatcccaattttcagctatatatccacagaaggctatcccaagtatatctgtcattggacagaatggtgttatgctatggtgtcatgagggatacatcagctcgaaagatctgaaagaaaatattgagaaagcttgggctacccttcacctgcagggtacagcagcagcctttctgactgcatcacttgcttcaagaatgactgaacctgtgaataccaccccgaccactctacctactcaaggaggctcatctgctgcagagaatccctctacttcatcaaatcaatctacaggaacttctggagccagtgggtttgctaatcctactgattcggtggcacagccacctagaagcacaagccgtgatgaaactcccagcataagtgaaaaagaatcctcaaatttggattcaagtccaggtaatagaactgttcaagaaaggccagattcagatagtgcgcaagttaaaggttctttgcctgatcatccaaggagctcaaatatagaaggttgtgcaaatccagttcaatcaggcaatacagcatcactaaaacagaaaaataaagtggatgatggtttcaccaaagtttcctcagagtcagttcctaccagagtagctagtagaggtaaatcgtcaaaggtagctgtggatcaagacaaggcaacaaccactagcacccctattgaacctgcccctgtgaggtcaaatgatattcagctggtcgttcgcattcctgatggacctagtctgcagattaaactgacaaaagatgataacttaaggaaggtgaagaattttgtggatgaaaaccgtgctaatggggctggatcttacgatcttgctatgctttatccaagaaaagttttcactgaacaagacatggaagccacgttgcatgaactgggtattgaaacccggcaggctctcactattgttccacatcataaaaccattcgagcagcaaagcgccaatcatcatcatcaccccatgaaggggataacaatatggatgcagacagctcaggtggttcgggatatttcggttatctgagaactgccctatcgtttgtgaatccactgtcctacttgagagcaaatgctgctccatcaaaccctgatcagttggcaaatcaggggtcgccacagtacagaccgagcactggaccctggaatcgtcctggaggggacactgcttcgg

SEQ ID NO: 21381 - DNA, 2056 bp, Oryza sativa
  ref <308>: DATABASE ACCESSION NUMBER: AK071664
  ref <309>: DATABASE ENTRY DATE: 2001-12-06
gattgatcgaagaggattaagcttagcacatatagttgcatatacatgggcagcgcgggaggcggcggctgggacgacgacgacgacggcgacgagcagtgcgccacgccgccgccgccgcggtcgttctcgccgatgatgatgacggaggcaggcatgaagctggtgacgccgccatggcggcggtggcggcggtggcggggcggctgcgccgagagcgggagggctgtgcgggcggcgtgcgtggcggcggccgtggtgctcgccgtcgtcgtgctctcctactacgccagatggggcggcgaccaggacgagatgccgacttccttgttcaccacacgaggttcagagggcgcaacttcggcgaacctcaccgacgatcagctcctcggcggcctcctcaccgccgcattcagcccgcagtcatgccggagccggtacgagttcgccggctaccacaagaggaagccgccgcacaagccttccccctacctcgtcgccaagctccgcagccacgaagcgctccagaagcgctgcggccccggcacggcgccgtacgacaaggcgctccggcagctcaagtccggcgatggcgccgccgccgctgatggcgacgacgactgccgctacctcgtctccatcagctacaaccgcgggctaggcaaccgcatcatcgccatcgtctccgccttcctctacgccgtcctcaccgagcgcgcgctcctcgtcgcgccgtacaacggcgacgtcgccgccctcttctgcgagcccttcccggggacgacgtggctgctccccgacggcggtcggcggttcccgctcctgcacctccgggacctcgacggtaagtccaaggagagcctgggagccttgctgaagagcaacggcatcgtctccgtcgccgccggcgtgaacggcagcacgtcgtcgtcgtggtcgggccggccgccgccgccgtacgtgtacctccacctcgacggcggcgccgactaccacgacaagctgttctactgcgacgagcagcagcgcctcctccgcggcgtgccgtggctgctgatgaagacggacagctacctcgtcccggggctcttcctcgtgccgtcgctccgtggcgagctcgagcggatgttcccggagaaggacgccgtgttccaccacctcagccgctacctcctccacccggccaacgccgtctggcacgccatcacggcctaccaccgcgaccacctcgccggcgccggccacctcgtcggcatacagatccgcgtgtaccacgaggagacgccgccggtgtcgcaggtggtgctcgaccaggtcctctcctgcgcacgcagggagaacctcctcccggccgcagggaacacgtcgtcgtcggaccaggccgtgctcgtgacgtcgctgagctcgtggtactacgagaagatccgcgacgagctcggtggcggcggcggtggcgtgcaccagccgagccacgaggggttgcagcggatgggcgacacggcgcacgacatgagggcgctgagcgagatgtacctgctcagcacctgcgacgcgctgctcaccaccggcttctccaccttcggctacgtcgcgcaggggctcgcggggttgcggccgtggatcatgccgcggcggccgtggtgggagaaggaggcggccacggcggtgccggacccgccgtgcgcgcgggtggcgacgccggagccgtgcttccactcgccgtcgtactacgagtgcgcggcgaggcggaactacgacgacattggcaaggtggtgccgtacgtgcggcgctgcgaggacgtcagctggggcatccagctcgtcaatggaagcagccagagccagtggtagtgtaaaactgtagatcactgaattgtatagagtagaacatgtgttcagatgttccacaaaaatacaaaaaggcgcatgcattgtacaccacaaataatcaaataatctaggcagatgtaatgatataatggcaagaaataatcttagaagttagaacactgtgccattatacttatagcaatctatgacaggatgtgacattacg

SEQ ID NO: 21382 - DNA, 940 bp, Oryza sativa
  ref <308>: DATABASE ACCESSION NUMBER: AK071665
  ref <309>: DATABASE ENTRY DATE: 2001-12-06
gaatagtggtaatacagaaccatcatcatatgttactctgttctccaatacacctggaaagttgacaaaggaattagtagaccttagagatgaagaattttcttgtgggaggaatagggctattgattttgttacatttaccatgaaatatggctgtttgagttacgaagggaccaatactggatggagcaaatcagaagtgccagtgctcagtttgaaaagtgattctgttaccaatgatgctcgacaaacaataatatcagttgatactaagtcatctacgcgttggtcactggcaatcaataaacaagaaattgatgacttcacagttcatgtggattcggagaacttggttccactgggtaataagagcgagatcgatgggtggcatacaatccagtttgctggtggtaaggactcaccaacaaaatttcagctaacccttttctgggcaagtaattccaaggatgcattcccaaagcaagtcgaatcagaagatcattctttcttactaaaactaagaacggatgtgaatagagttacaccgaaggttggcagggttctcgagaagcttccaggatggtgtgcaccctttggcaagtctacttctccttatacattggctttcttgaccgctcttcctgtcaatatttagccatacttattctttaccagacttagggtattcgtagtgtttactttttctaatttagatatgcatatccgatcacaccaccacatagtttacacttatagccaacaaatgtacacgaaaattgccagcaacttccgtttaacagaatcatgtgataggggcctcaaacatacaggatagccacgggttcaaatatgtttcttacgaacgagcagtttcatagtttcatgtgaaaatgctgagatgtaataatggctgtaataaagactgatgctttgattcctc

SEQ ID NO: 21383 - DNA, 1657 bp, Oryza sativa
  ref <308>: DATABASE ACCESSION NUMBER: AK071666
  ref <309>: DATABASE ENTRY DATE: 2001-12-06
gagaaggttgtcaatgttcggctctccgccgcacagcccaagaatgtgccgacgcatgattcagagtcaaagtttatcaagtataagccatcgcagcaatcggcagccttcaattcaggtgccaaggagaggattattaggatgtcagagatggctcaggatcctcttgagccaccgaaattcaagcataagcgagtgccccgcgcttctggatcaccgcctgtcccagtgatgcactcgccaccacggccagtgacagtgaaggaccagcaagattggaagattccaccatgcatttcaaattggaaaaatccaaagggttacaccataccactcgacaagaggttggcagctgatggaagggggctgcaggaggttcaaattaatggtaactttgcaaagctctctgaagcactgtatgtggcggagcagaaggccagggaggcagtacagatgcgatccaaggtgcagagggagctgcagctgaaggagaaggagaggaaggagcaagagctaagggcacttgcacagaaggcgcgcatggagaggactggtgccccacctgcacctacaggggttcctgctggtggtggtagaggtgctgttgatgacagggaggaagatatggatttggagcagcctcgtgagcaacgaagggagagtagagaagaaagggaagcaaggattgagcgtgacaggattcgtgaggagaggagacgtgagagggagagagagaggaggctggaggccagggatgctgcaatgggcaagaagagtaagctcactagagacagggatcgtgatgtcagtgagaagattgccctgggcatggcaagcactggcggtgctaaaggtggggaagtcatgtatgaccagaggttgttcaaccaggataaaggaatggactctgggtttgctacagatgatcagtataacatctactccaagggtctcttcacagcgcagccaacgctatccacactttacaggcctaagaaggacggtgattctgatgtgtatggcgatgcagatgaacaactggagaaggttatgaagacagataggttcaaaccagacaaaggattttctggtgcttcagagaggtctggaaagagagacagacctgtggagtttgataaacaggaggagaatgatcccttcggtcttgatcagttcttgactgaagtgaagaaggggaagaaagctgttgagaagattggaagcggaggagccatgagggcaagtggtggatcctcaatgagagatgattacgagggtggaggatctgggaggtcccgcattaactttgaaagaggtcgttgaggtattagatctgcatgttttgttcagaagtttctccatgcattccaaatgttatctggagggtattctgttgagaatatcaacttcttgatgagaggacttgatgtctgagttgtcttaatgcaacgtctacttccaaggggcatcttaaggagtgtacctgtttagatcctgtgattatgcttgttgtttatctatttgtggatggatctgtaagcttaacttatcatcattccatatcccttatattttgtggtgctttatgaagtctcgatgtgtctggctgaccttacattttctggtactgtaccaagtctttaagatgtatctgccg

SEQ ID NO: 21384 - DNA, 1659 bp, Oryza sativa
  ref <308>: DATABASE ACCESSION NUMBER: AK071667
  ref <309>: DATABASE ENTRY DATE: 2001-12-06
ggcttcacctcatcgccattgccatccaaagcaaagaagagagccaccctgcagacacagtacgcacacgcagagagagagagagagagagagagagcaagggatgaggcttctcggagctcatcgtgctgctctgctggtgctcgcgtgcgtcgtcgtcgtcgtcatccatggcctaggagaggcggaggccttgggaggagggggcggcttcgtgagggcgcaggggacacggttcgtgctcgacggcaacccgtactacgccaacgggttcaacgcctactggctcatgttgctggccgccgacccgtcgcagaggggcaaggtcagcgccgcgctcggcgaggccgccgggcacggcctcaccgtcgccaggacgtgggcgttcagcgacggcggcggcggcaacgcgctgcagttgtcccccggcaactacaacgagaacaccttcaagggtttggattttgtgctgtctgaggctaggaagtatgggatcaaggtgatactgagccttgtggacaactacgactcttttggcgggaggaagcagtatgtgaactgggcaagagcgcaggggcagggcattgggtccgacgatgagttcttcaccaaccctgttgttaagggcttctacaagaaccacgtgaagacggtgttgacgaggaagaacacgatcacgggggtggcgtacagggacgacccgaccatcctggcgtgggagctgatgaacgagccgaggtgccagtccgacctgtccggccgcaccgtccagtcgtggatcaccgagatggcggcgcacgtcaagtccatcgaccgcaaccacatgctggaggtcggcctcgagggcttctacggcgcctcctcgccgtcccgcatcgccgccgtcaacccctccggctaccagctcggcaccgacttcatcgccaacaaccaggtccccggcatcgacttcgccaccgtccactcctaccccgaccaatggttgtcgggcaaggacgaccaggcgcagctggggttcatggggaggtggctggacgcgcacatcgcggacgcgctctacggcacggtgtacgccaagatctacgagtcggcgcggaggggcggcgccacggtggggggcctcttctggcagctcctggtgcccggcatggactcgtaccgcgacggctacgaggtcgtcttcggtgagacgccgtccaccacgggcgtcatcaccacgaacagccggcggctgcgcttcctcagcaaggcgttcgcgcgggccaggcaggcccagccggcgagggggaagggccgacacaacggcgggaaatagagattgaccgctgattaggcccagaaagtggtagtaaaagaaagaaaggcttggtttgatttgtgtgttttacttcatgtgtgggaggtacgtgagtgtgagttgatggctcctcgagatgatttaagattcatccgggagagaaggattagtatttgtcatccttcttggtgccttgggaggacgcgtgtttttaggtgttcttaattatgtggaccacgaagtagccactctgtggtgaagttttatggtacctggctatggaagaagccagccagtgattacaaattacttacgtacttcacactagtataatactcctatatgaatgatgttttgctggc

SEQ ID NO: 21385 - DNA, 1346 bp, Oryza sativa
  ref <308>: DATABASE ACCESSION NUMBER: AK071668
  ref <309>: DATABASE ENTRY DATE: 2001-12-06
gacgcgcgggcgaccgggggcgaaccctagcccccggccgccgccacccacccctcctctcaccgcctcgccgccgccggaaaccacgcagacgttgggatggcggcggcggggccaaaacccccgacggcggctcgtctccggcgcaaggaggtggcacagcgcgccgcgaaggcctcgcggcgtgtggctgcggatccgccgccgccggatctggcccttccgtggctggatccggcccgtcatcaccggaactgaccggtgagctgacggagcgggcgacggcggcaggtggcgtgaggacggcggcgtttggcgggggagacagccgacgggagacgcgggcgacgccgcggctggaacttgctgacaggaggtggtacggctccggccgctgcgggtacctccccctccgccacccaccacacgtcgccccccggcagattcaccgcctgcctgctcgccgtcgccgccatcaccaccatcttcgccctcgccctcaccctccaccgccctgacctctccgccgcctcgccacggtgagcgcccgcccccccttgctccctccaccaattgctcacgggtgcggttcgcgatcaacgcggaggacagcctcaacaacaggttcaggcccatccaggggctcaccaccgacgccgtcttctccgttgacgacgacctcatcgtgccgtgctccacgctgcggtttgccttcgccgtgtggcagagtgcgctctctgccatggtgggcttcgtgccccggatgcactggcttactgacccgtgtttttctatttggattccatgaagggctatactactgcacatgtcacacttgatgccagcacaaacggataaggaatcagagttgtacattttattttctagcagttatccatgggatggcagctgggaggcatctgaccctggctgtgttagcagaacaatatgatcattagccattgagatgatgtagcaggcagtcatatgagatttttttggacctcaatgttagcatggcccatttcctgattaattggactggttgatctgcaaaggttggtcttgttagctgaagtgacaccatatgcagcttattaccttgataaaaatgggagcaatgctctcatgcgtttttgagggaaaaaaagaggaagcagtgtcaacggaaactgatccttactgcagaggtgcatcaatactgaaatgagtcttgtgctacagttaattgtagtaaatcactacagcagtagcaatggtgtttccagtgtagtgcagacaacttctgttactgtagaatttcaactggaaagtacacctctgatctgatgttcagaattgatcct

SEQ ID NO: 21386 - DNA, 1589 bp, Oryza sativa
  ref <308>: DATABASE ACCESSION NUMBER: AK071669
  ref <309>: DATABASE ENTRY DATE: 2001-12-06
ggtccgtgggtctcgactccatcggtcttgcgcgctatctccgaggctccggcgacgcggctgggccttgtgcagcgacggccggctgctccgacactgcagtggaattgctccgagagcagagctctccaggtctccatggatctggacaccacacgaaagcggccccgtgaaagtggcgtcgccgtcgatcggctcagcgcgttgccggactgcctcctccatgtcatcatgtccttcatgaaggccaggcaggtggtgcagacgtgcatgctgtccaagaggtgggagcacctctggcgcaccgtgccgtgcctcgatgtagatcatcgggagttccaaagcacaggtgaagctgcacagggcgacaatgaggtgtggcagaattttgaggattttgcggacaacctgatgcttcatcaccagattgcacacctggatacgttccagctgcatgttaataatgtgtatcgttggggtcaacatgcatctaggtggattcgtcgcagcatcaagtataacaccaaggttcctggcattcctcgcccgggattgagctgcagttcttggagcctcaaaagactacatctttctaacatttgtgtggatgatctgttcgcaaagcacattagctcaatgtgctgctctctggaggatttgaatctcaaaggatgcagatttgcattcaatgagatcacgtcccactcactgaagagcttggtgatcgacagctgcgacagcaagctttgtccttccaaactggttgtcacggctcctgccattgcctccctgtgccttattgtgaaattgtggtttttccccggcggtctcattgtaaatgaaatgccattcctttcgaaagcatccattcttgtttcagccacctacgacggaaagaacttccaacacaatcaaagcaagtttcttggtagcctctgtaatgtgacaactttagagctgtcaggttttcagacaatgattatacctgaggaaccggttgagttaccagaattcaagaacctcaagatcttatcccttgacaagtgtgatcttagtgacaacttccagttattgaagcactttctgcagaactcgcctaatttggagaagctcacgttgcggctttgcgagctgccaaaggattctaagaaaaggaaagggaaggccaaggcgaagaaaacacgtttggtggatatccggtgtgagaacctaaagcttactgaaatcatctacgatgctgatgatgtcctccaactggtcgggcttttgctgaacgattcagcaaatcttcctaagaacaacataaaactcagcaaagttgatcgttagtatggttagttcaggccctcttttgtgatgaccgattcttaggcctctcctgaattcacatgtcttgtctgtcttccgatgcactgtcagttgtgtagttgaaatgcacctatcttttgacttgtctaatcggtttaagactgctctgttctgttagctattgcatgtgttcttgcgcgctgtgatgctaggttaatggagtgatagcgattgatacttatggctatgaacagaccaatttcttactatagagcatgttc

SEQ ID NO: 21387 - DNA, 1778 bp, Oryza sativa
  ref <308>: DATABASE ACCESSION NUMBER: AK071670
  ref <309>: DATABASE ENTRY DATE: 2001-12-06
gacccgtcattggcgtgaggggaagggagagagcgggaggggggatttttatttaggattttcttttatctgtatttttttttattaagagaaagccttcccgactccgtctcctcctcccctcgtcgtcgtcgtcgtcgtcgtctcgccttcgccgccgaggcggaacaattccgcggggagttcgctgattaatccggccgaatcctgaaattccccttgagcaatcgggataaggcgtaggaatcttgcgcgggaagggctaatcgaatcggttgggctgtacggagatggatgagaaggtgaagatggagagcaagctgtcctccgcggcggcgttcgtggagggaggtgtgcaggacgcctgcgacgacgcctgcagcatctgcctcgaggccttctgcgacaacgacccctccacggtgacgagttgcaagcatgagtaccatctgcagtgcattcttgaatggtgccagagaagctctcagtgtcccatgtgttggcagcctatcagcatgaaggatcctatgagccaagaactacttgaggctgttgagcaagagaggaacattcgagctaaccgtttgaacactgccgctgtttttcaccatccagtattgggtgattttgaggtccctgtaggagctgatgatgctgaacttgaggagcgcattatacaacacttggctgctgctgctgcaatgcgtaggtcacacagacatggtagaagagatggacatcgtagccgatctggatctcatagccgcccacaaatcgtggtgttttcaaggaatgaggctattcctggtggctccctgcatgcaagttcaggccaagatgaagaccatgaacaatcttctgacttaggttctgctcatccttttgctgctcttgctgctgtagaccaaggacatatgagtggtggttcgcagctatacgtgggtcattctgaccagggtgcttcaaatccatctctgcatgatgagagagcaatgagcaggacatctgaaaatcaatctgcacctgtcaatcaagatacagcaggaccatctgatttgcagtcattctctgacacgctgagatctcgcctacagtcagcttcgatgaagtataaagattctataacaaagagtacgcgtggatggaaggaaagatggttttctcggagtaacactatatcaggtcttggcactgaagtaaggagggaggtcaacgctgggattgctgcggtatctcgcatgatggaacggctagaaacaaaggacgatactggaccatctgctgttcctgcagctagtgcttgctctccttcagacgcaaataatcaaaggacggtatcccccaaccatgctgctgttgtaaatgaaacttcttccacgacttgtgcgtcaggatctggctctcaatgagcccactccatgttcgttgaagaattggatacactgtgaagacaggtccagagagaaacgccgtttgttcggagccacctgagatccagcgatgcttcatgatctttggtaggtctgtgtgcttcaggaagttcgctgaagcatttgcatccagatcgcgggacataagacttgtgcttgcggatgaacctttacatttttttaccttgtgtaatatatatgcaaggttgttatgaaatcataatcgctgtaaattgcaacataaagaatgtcggttgtgaaattcttgttgatatccctataaatgtagtgcaccaagggcgtcatgagtcatcagttcgtcgcttgacttgtgagtactcaatcttc

SEQ ID NO: 21388 - DNA, 2038 bp, Oryza sativa
  ref <308>: DATABASE ACCESSION NUMBER: AK071671
  ref <309>: DATABASE ENTRY DATE: 2001-12-06
gtacccaaaaatttatttcaaataaaaccaaaaaatgcccaaaacggcaactccgatgcttctccagcccatctccggcgccggcgccggcgctcgccggagctccgccgagggactctcccctcctcctaccgctcgcctccgccgccgcgtcctctgcgcgatccgcgccgacgcgccgcccccgatccacctctccgcggcggccccctcgcggccggcgaagccgcccgtctgcaccgccgacgagctccaccacgcgcccgtctccggcgccgggtggcgtctcgcgctctggcggtacaggccgccgcctcatgcgccggcgaggaaccacccgctgatgcttctgtcgggagtcgggacgaacgccatcgggttcgatctctcccccggggcctcattcgcccgtcacatgtctaaccagggatttgatacatggattgtcgaagtgagaggttctggtctgagcatacgtgatcatgataattctgcttcatctccatcaggcgctttcgatgatatatctaatggcacattggctcttgataaatcaagcacattggaggttgcttcagttcaaagttctggtttctctggtattgattatgatgaccttggaatagttgcgttggatgacccacctttactgatggagatgactagtttctttgatcgaatttcaaaacttctggaagaggctagtttaaataaaaattttcatgagatcacagataagatttcggttctatctgaaatggtagaaagctctgccgttattggtccaatgagagaagaaagtctgcgtcttctgaagaactttcaagagcagattgactcatgggaacactttgtggcaactcagatgaatctaaattctgaatataattgggacttcgaccattacttggaggaggatatacctactgcggtggaatatattagacaacatagtagagtaaaagatgggaagctgcttgccattggacactcaatgggaggaattttgttatatgcaatgctgtcaaaatatggtttcgaaggagttccatcaaacttagcggctattgttactttggcttcctctgttgactacacgacatccaattcatcactgaagatgttactgccacttgttcatcctgcgcaagcccttaatgtccctgctgttccattgggtacattattagcggcagcatatccctgggcatctggtccaccttatcttttttcctggcttaatcatcaaatatcagcacaggatatgatgcacccggagttgttgtccaagcttgtttttaacaacttctgtacagtgcctgcaaaggttgtccttcaacttacaacagcttttcgggaaggggggctatgcaatagaactgaaactttctcatacaaagatcatttgcgatattgtcagacccctgtcctagcactagctggagataaagatctcatctgtcctcctgaagccgtttatgaaactgtcaagctcatacctcagcacatggtgaaatatggggtttttggaaagccagaaggccctcattatgcacactatgacttagttggaggtcgactggcaacggatgaagtttacccatgcatcatagagttcctttctcaccatgatcagtagtttatgtaacagtgaagctcctgaaatttcaatacgatgcggagtcaatgatacaatatatgttcacctcagatggtttttgagttgagctgaacaaactttccaaggttggccatgtgacatggccagctgcgcaaaatataggtaaacccacagaactcgtaggatgtatccttgtaaacaggtgtaccatgcgtcagtgcaccacttgttatacaaaacctataaatataggtatattacatgtgcccctagaaatataacaaattcaaaagaaattgtatgctgaactcattctttgaccttgtttccttagttgatgttgatccttcaaatacttggcttctgttgttgtaacaaaatgaaatggactgatatgtactgggatatactgttggc

SEQ ID NO: 21389 - DNA, 1288 bp, Oryza sativa
  ref <308>: DATABASE ACCESSION NUMBER: AK071672
  ref <309>: DATABASE ENTRY DATE: 2001-12-06
ggccgaccacctgctccgccacctctcctcctagggttccggcgagcgacctccaccccggccatgccgccgccgcccccgccgcgcgagctcctggccgtcgtcgaggcggcgctgctcgggccatccccgccgtcgccggcgcagcgcgtggagctcctccacgccgtccgcgatgccgcccccgcattccgcgcgctcctctcctacccggggccgaaggcgtcggatcggactcaggtggaggccaaggaagtgcggctcccggacatgcctcccataacgctcgatgacaccgacgtgcagacggccctgaaattgagtgatgaactcaatcttaatgagattgagtgtgttcgattgctagttgacgccaacagggagtgggttctatatggccgagagccactggaaatatataggctcgcagctggcctttggtacatggagagaagggatcttataacctctttgtacattctgttacggtctgttgtacttgaccaagggcttgatgctgatctgatgtatgaaatacaaaaccaaatggaggctctatttattgagggtctcgggcagcgtataattacactagtaaaggaacttaatcgtgaagaatcaactggtgttggccaaccaagctctgagcattatgtgcttgatttcagaggggctcttgtggagaggcgtgccattgtttctcgcgagagattaagtttgagccactgccttgctctttctgcacttattaaattgatgagtcccagggaggttaaggatgtattttcattgttaaaagactgtgcagctgaagttaatgaaaattctagcgtggagcttcagatcacctatggcgttcttttttctcttgtagtaacttttgtttctgatgccttaagtacttcccatgagaaaccatctttgtcatcttccgattcttcgttcaggcgtgattttcatgagctggtgatgaggtcagataacaatttgactattgaaggatttgttggtgttgtgcgacttgcatgggcagttcatttgatgttaactcaagatcgaagcagtgcaagagatactctcactagttcttcgagagatgtgacagatatatgggcatgtctggagataatctgtcgccagaatagttttcaatttttgcaggaacgtattatgcaaacagctgcctacaagaatgacgatgaggacattgtttacatgtacactggctacatgcacaagttgatgatgtgctttctttcccatccaacttctagagacaagataaagg

SEQ ID NO: 21390 - DNA, 1218 bp, Oryza sativa
  ref <308>: DATABASE ACCESSION NUMBER: AK071673
  ref <309>: DATABASE ENTRY DATE: 2001-12-06
gactcccccacgccaccgctcgccgccgccgccggctcagcttctcctcctcctccgccgccgccgccgccgtcctcgggtgaagcagcgcagttcggaggagggaggcggagggggtttgttcgccaacctagctcgctcgctcagctgccgagctcttcttcgctggtctttgagagatgaaattttagtgatatcagctgctagaggatagactgaagtaactttcaacaattatagaatgggtggttgctgttgttcatcgacaagatctgcatccgtcggagcaccagtttatatctatcatcaacaaaatccggcctctacaattgttgcaatagacaaaaatctggatacatccactcctgacacttaccgagcaccacctacacctttgccttatgatgttggtctagtgttgaaagataaccctgatttggagaagacaggcatcaagaggaaaattcatgaacataaggagtccttaatgatggatgataatgagtcattgcaaaaatgtgtctctgaagataagcctgatgaggaggatgtttgcccaatctgtcttgaagaatatgatgaagaaaatccccgctctatgactaaatgtgagcatcattttcatctttgctgcatacttgagtggatggagcggagtgaaacttgcccagtttgtgaccagataaccatgataaatgcgatgtatgaatagccttggtggccctggtggatcctctcttgaagctcatgcttattcagtcggtttggcagaagtcatttgatggggaagcacaatgagcaactgctctgctctcgacattggtttggtcttttttggtggaaggagtgaaattaaggagacaaatgacatgaaatgttctggccaacactgttttgtacctttgttgccaatctttggctaatttatagcaagtagcaacaggaggattaggaaaatgcttggatgcgatatacataccggtcacatgatcattcagtcattcggttcaaagtccaaacattaaaaatcagctctttttttgtttaaacttaggacgaatgttacttcacttctaatccagttagtgtctgtgtatatcatacataacataggtgaaaaagaaaaattggtcgtagtctctcagtctaggcttcatttgtataatacttctagttggacaagctcctgaatacatcccttcctatttcctatttcct

SEQ ID NO: 21391 - DNA, 2059 bp, Oryza sativa
  ref <308>: DATABASE ACCESSION NUMBER: AK071674
  ref <309>: DATABASE ENTRY DATE: 2001-12-06
ggtgtagtactacgcctacgcgccccctcccatggcgccgcctccgccgctcgccgcgctccgccccgcgccattccctctccctcgcctcctcccctgccccgcctccgccgccgcccgccgcggcgccgtcgccttctcgctgcagaccaacgtgcggctcctcaagcccaaccgccgctcccggcgatcccggtacccctactacgaccacgacgaggacgaggacgacgatgaggcggagttcgagtttgaggaaggggaggaggaggaggaagacggctacgagaccgatgatgatctatcaggtttggagtatcctggtgtactttattcaaacaatcctcgtgctccaatcaagaaaccaggccgggaaaaaccagcgctgaaacaaaactgggaaggaagacaacctaaaacacgagacagatgtgacacttcaaaaaaagtcgatgctctgcatgccaagagtaaagctagcagatcaactggtcttgtggacatagataatgaagtagagttgaaaaatgaaagtatctctagaagcttgtttcagaaacttcaagaagaatatgactttgatgataaatggttaccactaatcgattacttgtgcacatttggactgaaggaatctcattttacaaacatgtatgagagacacatggcctgctttcaaatcagtcaagcttctgcagaagaaaggttggagttcctgctaagtgttggtgttaaaagcaaggatatgaagaggatgcttgttagacaaccacaaattttggaatacactctcagcaacctgaagtctcatgttgcatttctggtgggcataggtgttcctagtgcacggataggtcaaattatttctgctgctccatcatttttctcttacagtgttgagcagtctctgaagccaaccataaggtatctgattgaggaagtgggcattgaggagagtgatgtgggcaaagtagtgcaactaagcccacagattctggtccagcgaatcgatagtgcatggaaatctcgatttctttttctatcaaaagaattaggggctccaaaagataacattgttaaaatggtcacaaaacacccacagctgcttcattacagtattgaggatggaatattgcctcgaatcaatttccttagaagcattggcatgagagatactgatgttctcaaggtattgacgagtctgactcaggtgttgtctttgtccttggaggaaaatctcaaaccaaagtatctttacttggtcaatgaccttaaaaacgatgttcaatccttgacaaagtatcctatgtacttgagcttgtcccttgaccagagaatccgtccccgtcaccgttttcttgtttcattgaagaaagctcctaagggtccattccctcttagctcctttgtgcctacagatgagcgattttgcaagaggtgggctgggactagcttagaaaagtatcatacatttcgtcagagcatgctgctcaaaggtttttcagagaagactggaaggaaaacattaacatcgaggcggtagatacttcatgattgagaagtaggttgtttttgaacctatgccacgctgaaaaggcctgggttgctgtgctggtattcaatcatcagcattcggcacacatatatcaatatcacagatacatcactaactacagtttagacttccttttttttttactcctattacaacaaggtgtaaattcttcatctgattcctccagtcgaaaaacaaatggatgttccaggagtcaatctaaggatgaaaagggatgcaccagaatggttgatgtggcattttgttgtctactgccacggtgacatcaccttgaccattagctaatgttaaatatgtctagcacaacaaactaaccatctattagggatgtattaggcagcatcctacgttgccgtaagtctgtagcgtcgttaagcacgatattttattttccacggttgtaaatgatagaaattctatcaccagttcgatctgtactttgtgcgcttttctggtttgttatgttggaaaattattcctgtt

SEQ ID NO: 21392 - DNA, 859 bp, Oryza sativa
  ref <308>: DATABASE ACCESSION NUMBER: AK071675
  ref <309>: DATABASE ENTRY DATE: 2001-12-06
gaggtgtactttttccttctgtctccaccctcatccagcgatccaaagcccaacacagcaatcgagggtttcggcctcgtcgtccccgccgccggcgacaagcgacggcgagcgagccagcgaccttctccctcgcgcgccgcgccgcttctccctcggcgcgccgtgccgccggtgacgtctccgtgatccaggtatgaagagggcggcgccgtgggaggagccgctggaagtctcctccgacgactccctgagctcggattccgacgatgaagccgggaaggggaaaggggacaacgccttcgggctgcccaattccaccaaagctgccgcaccagacggtgcactgatcaggaaggctgaaatgtatcaagagtatatgaagcatattccagttcctgctcaccgtggatctgtaatcccatgcacaacatggctgggactcggcaggtcggtgaagcagttatataagcagcctttacattaccttaccaatgtcctcttgaaacagtgggatcagcagagagttgggagtgatgatgagcaccggcctctggatgctatcatccatcctgtgaaagctgaggcccttatttggatcactgaagaagtccataggttgaccacctctagtcaacatttagccagtctttgggcatcagctccaatgtatcatgcctacatagatccagtgttccctcccataaagttgcagtagagcgtttttgagaaaaaaaaaattaaattgtagtagaagacgttggtttgggttgtctgttttgttgtctttttaattgctgtaatcagtaagcttgcacggtttggttttggtaaatcctaacaaagccttatggattcc

SEQ ID NO: 21393 - DNA, 1384 bp, Oryza sativa
  ref <308>: DATABASE ACCESSION NUMBER: AK071676
  ref <309>: DATABASE ENTRY DATE: 2001-12-06
gagagcatccatccttcgttcgctcatcgcgtctcgactccactactgtggttgcatatactactacacttgcagttgcatccagagcccgccccgcgtctctactcgctccgccgcgccgtcgtctctcccgacttcggcgacaagcgagcgacgcaggccaccgcgcgcggttcgttttcgcgagggaggccgccgccgaccagccgccatggtctcgccggacaccatccgcacggccatcggcgtcgtaggcaatggaaccgccctcgtgctcttcctctccccagtgccgacgttcatacggatctggaagaaggggtcggtggagcagtactcggcggtgccgtacgtggcgacgctgctcaactgcatgatgtgggtgctgtacggcctccccgcggtgcacccgcacagcatgctggtcatcaccatcaacggcaccggcatggccatcgagctcacctacatcgccctcttcctcgccttctccctcggcgccgtccgccgccgcgtcctcctcctcctcgccgccgaggtcgccttcgtcgccgccgtcgccgccctcgtcctcaacctcgcccacacccacgagcgacgctccatgatcgtcggtatcctctgcgtcctcttcggcaccggcatgtacgccgcccccctctccgtcatgaaaatggtgatccagactaagagcgtggagtacatgccccttttcttgtccctggcgtcactggtcaacggcatctgctggactgcctacgccctcatccgcttcgacctctacatcacgatccccaacgggctgggagtgatgttcgcggtggcgcagctgatcctgtacgccatctactacaagtcgacgcagcagatcatcgaggcgcgcaagcgcaaggaggccgaccatgtcgccatgaccgatgtcgtcgtcgactccgccaagaacaacccctcctccggcgccgccgccgccgccgccaacggccgctactagctcacgccgccctctttacttcaccagctagccagtcactcaggaggcatggccaccgatgaggccttcatgacttactagcaaagtggagtactacctttagctaagccgtcccaaagggatattactacatgtctcaaattaattagctaatctaatcaccatcaccctgcctaatccgctgctgttaattagtatggcagagagcaaaagaagaacaaattgagctgcacttcttatatgtactctcaagtgcagtgctactattgtcagtcccattgggggtaatttactgtcttatttacaggaggagggcctggctgctcttgttaaaaacagctagccctgccttttcttttttcaatatcatcatcatgccgtgcttttcgatct

SEQ ID NO: 21394 - DNA, 1271 bp, Oryza sativa
  ref <308>: DATABASE ACCESSION NUMBER: AK071677
  ref <309>: DATABASE ENTRY DATE: 2001-12-06
tgaggaaacaaaccggcgatccatccatccatggccgccgcctgcgcgtgggacgccctcccggagcacctccaggagcggatcctctctctcctcccgctcaccgcgctgctccccgtcgccgccgcctcccgcgcgctccgccgcctcctccgctcccgggccttccacgccctcctcaccccgcaccgcctcgacgccttcttcctcctctccccgcgcctcgccttccacccgctctcccgccgcctcctccccgccccgcccgccgcctcccctcccgtcgtctcctccccctcccacctcgtcaccgccgcctcgctcctccgcctcccgcccctccccgccacctcctacctcctcgccgtcgtcctccccatcccggcctcctcctcctcctcctcctcatgctcccgcgagtttaccctcgtcgcggtcaccgcgggcgcccgtgtccgctcctacaccctcgactctgccgatccctccccgcggtgggaccctcgaggggatctccctctcccgttcgcgctcctcggcaacgcggctggcgaccgccgccagctcttcgttctcggccgcggccccgacgcgattctcgtctttgatctcgcgacggggcagtggacggtgctgcccgctgcgatgccactcggcctcacgacggcacacctgttcgtcttcggtgggcggctgttcttggtaggcggggtggagaggtttggggtggtggaacgtgtgctggtgtggaggctggagggctccgaggcggccgcggagtggacggaggtgggagcgatgccggaggaggtgttcgatgagcttgtggctggtcggcatggcagcttctggcattttcaggctgcagacagaatggggatcgtttgcctgtacaatgctgtagatgggaggctggtgatgtttgatgcggtggatggtgggtggactaggctgtcacgagtgtctggtttggacgttgaggagagccgccggtggtttgggcatgtcgtggagccgcgcgtggaactcctgctgggatagtgcagctgaggctgacgaggttgttttcttgacttgtatgtttctgtgagataccaaacgacttctccatctttgccttaatcttgacccaaatgtctgtgtaaataggcataactagatcctctagttgtttgtcatataaaagaaagcaatatttatgtagtataactgcatgatgcttcggttcaagtcatcccaggttgtaacatttataacatctatcaatgatt

SEQ ID NO: 21395 - DNA, 1216 bp, Oryza sativa
  ref <308>: DATABASE ACCESSION NUMBER: AK071678
  ref <309>: DATABASE ENTRY DATE: 2001-12-06
gagataaggcgcgcgccacgtccaccacacacaatggggacgttacccgtcgcccacaggttctcgctcgcctcggccttcctgccgcgccaccgccggccatcgccgtccgcccccaaccggcgccggcggcatggaacggtggtggcgtacatggagccgaaccccaactcgccgtcctccatcgcgggccgcctcatcggggctctccccgtggtgggcctcgtggcgcgcatcctgagcgacgagggtggcgtcggcggcgacatgatcgacttcgccgagttccgccgccgcgtcagcaagaagtgcaccgtcatggactcccaggccttctacgatttcaacgaacgccgcggcaaggcaggagatcccttctacgttctgctgtgctgctggctggccgccgttggtggcgggctgctgaaaacggaggagatcttggaaggcgtcgcgcggctccgcctctccaacgacatcgagttcgaggaggagacgttcctcgacatgatgaagacggcaaaggagaaaagagcaaagctgaaggctccggcgccacagataccaatggaagcgcgggcggagaaggccctggaggccatctacgtgtgctgcttcgggcaggacatggtggaagacgtggacgtgaagctgctgtgcaaaatgctgaacgccgtcttcccctccgtcgggaggcaggcggtcgagaggatagtgacctccatggcgaagcaggtggctgccggcgagaggaagggccccggcgtcaagaccgtgtccaaggaagcagcgcagcggcaactcaaggacctggaatttctcaagcagaacaagttggattcggcatgagcattgtgcagaacacattgggaaattttgtcagatagacgtcgtttttaggccaagaaacagaaattgcatggcttacttggccgtgtttgtcatagaccgagttttctcctaagatgtgctaggaaggtcagctatcgtagggaaatagaaatcagcatagattgcaagtttgcgacacagttgacgcaggccaaacaatggtctcggttcattagaattgcaatgtgagtgagctcagaaccttgtaagatgaagttgtacgttgtgacatgctcagaaaatgtctactgctacagtactttttaatgctacatgtgtttactaagaataaaaatgtaacagacgtggcatcgtttaagatggc

SEQ ID NO: 21396 - DNA, 2045 bp, Oryza sativa
  ref <308>: DATABASE ACCESSION NUMBER: AK071679
  ref <309>: DATABASE ENTRY DATE: 2001-12-06
gacagcccgtacattattccccagcccgcacgcgcgtacgccaacggcccagcgactgaacggcccagtggatgtccccatcttagcagagaaagtcattgtgtgtgtgactgtaactacctactgctggaaggacagacgtaactaaccaccgtttcccctgcttttttagcggctccgaacgatccaaatttcagaagcagcttcaccacacgaagcaggaatcaccaaatccagagcagcaaaagagacaaacggaaccaaaaaaaaacagggttggatcgatcagtggtcacacggtggcatcatggtggtggggaggccgtcgtcatcatcggtggctcgtgcggtcgtgctcctcgcggcggccatgctgctgtccacgctgagcccgtgctgctgcgcgtcggcgggcggcggcggcggcgcgcggcggcgtgagaagcagcagcagctgcacccggtgatcctgatccccggcgccggcgggaaccagctggaggcgcggctgacggaggagtacgccccgtcgagcctcgcgtgccgcgtgtggcccgtggtgcgcggccgcggcgggtggttccgcctctggttcgacccgtccgtcgtcgtggcgccgctcaccaggtgcttcgccgaccggatgaccctcttctacgactccgtcgccgacgactaccgcaacgctcccggcgtcgagaccagggtctccgacttcggctccacctccaccctccgctacctcgaccccaacctcaagttgctaacggggtacatgaacgtgttggcgagcacgctggagaaggcagggtacgaggaagggttcgacctgttcggcgcgccgtacgacttccggtacgggctggccgggccggggcacccgtcgcgtgtgggcagcgcgtacctggagcggctgaggaagctggtggagtcggcgtgcgcggccaacggcgggaggccggcgatcctcgtggcgcacagcctgggcgggctgtacgcgctgcagatggtggcgcggagcccccccgcgtggcgcgccgcgaacgtgaagcggctggtgacgctgtcagcgccgtggggcgggtcggtgcaggagatgctcaccttcgcgtcgggcaacaccctcggcgtgccgttcgtcgacgcgtcgctcatccgcgacgagcagcgcaccgccgagagcaacctgtggctgctgccggcgccgcgggtgttcgggaacaccacgctggtggtgtcgcggcaccacaaccggtcctactccgccaagaacatgacgcagttcctccgggacatcgggttcgccgaaggggtggagccgtaccgggagcggatacggccgctcgtcgaggtgctgccggagcccggggtgccggtgacgtgcctcgtcggcacgggcgtcgacaccgtggagagcctcgtgtacggggagggcgggttcgaggccgggccggagaaggtggtgtacggcgacggcgacgggacggtcaacctcgacagcctcgtcgggccgatcaaggcgtggtccgactcgccggagcaggtggtggaggtggtcgagctgcccgaggtgtcgcactccggcatcctcaaggacaagagcgcgctcgaccagatcttgaggatcatcgacgccatcaatctgaacgccacgacctcaagctcctccatcaatcgatcgtctcaggatgttttgtacaattagattatattgctcgcttcaagatttgcttcttttaatcgttgagaatttgcaagggggtactccctcctccgtttcacaatgtaagtcattctatcattttctatatttatattgatgttaatgaatctagacatatatctatttagattcgttaacattaatatgaatgtggaaaatgctagaatgacttacattgtgaaacggataaagtagttagctacctatagtggccggtcaagtgcatgttttttgcacgttaacaagccaattaaggcaacaataagagcaattaaaatgtgttcctttcgtaatagtactatcagtatcatattagcctatg

SEQ ID NO: 21397 - DNA, 1361 bp, Oryza sativa
  ref <308>: DATABASE ACCESSION NUMBER: AK071680
  ref <309>: DATABASE ENTRY DATE: 2001-12-06
gagccttccgctgctgctggacgagtggatgacgagcactaggcccatcttgttgtttatcctttttctgaacctcacaatgagcgatgctactgaaattcagctgcagattacaggtgtccgaggccaagaagacgtggtagcagagtctgacaagagcacgtctcgagcagatggaactgcggcggcggcggcggcggcggcgccgctgccgcctgtgtccagccagcggctgcggtggtgggcggtggtccttgccaacatcgtgttcgtcctcggcgggcagagcgtggccacgctcctcggccggatttactacgaccagggcggcggcagcttgtggctggcgacggtggtgcagtcctgcggcgcgccgctcgccgtcccactgctgctctacttccggcggccagaggcctccccggtggcacgtccgccgctgctcaagatcgctgccatctacgccggccttggcgtcctcctcgccggcgacaacctgatgtactcctacgcgctcctctacctgccgctgtcgacgtactccctcgtctgcgccacccagctctgcttcaacgccgtcttctcctacttcctcaacaaggagaggttcaccgcgctcgtgctcaactccgtcgtgctgctcaccttctccgccgcgctcgtcggcgtgagccactcctcggaggagaccaacagcagcgtcccggagggcaagttcgcgctggggttcgtcctggcgctgtcggcgtcggcggcgttcgccctgatcctgtccctgatgcagctcacgttcgacacggtgctcaggagcaacgcggcacacgccgtgctggagctgcagctctggagcaacgccgccgcgtcgtgcgtgtcggtggccgggctgttcatctccggcgagtggagctccctgacggcggagatggacgggtacaagaagggcgaggtggcctacgggatgacgctggcgtggacggccatctcgtggcagctcgccacgatgggcatggtggggctcgtcgcgacggtgtcgtcgctgttcacgaacgtgatcagcacggtggggatgccgctgtcgccgatcatggcggtgatcttcctcggcgaccggatggacggtgccaaagtgatagccatgctcattggcatctggggattcttgtcctacgtttaccagcactacctcgatgacgccaagagcaagaacacagctgggtcagctgacgtcacacaaacttcagaagcaaaactctgaagcctgatacgcctgatagtgatacccagagtgaattttactgtacttgatctcttttttttcacggaatcaattggaaatttggaatactggtcttatcttccct

SEQ ID NO: 21398 - DNA, 1796 bp, Oryza sativa
  ref <308>: DATABASE ACCESSION NUMBER: AK071681
  ref <309>: DATABASE ENTRY DATE: 2001-12-06
gacgcgacgcgactctctcgaacgaacccggaggagtcccgtaccccagcggcagcgaggggggaggcggaggcgagcaccggcggcgatgggggatggggaggggagcaccggcggcggcgggggcggcggagatccgcagaggctgaagcggatcggggccgcggcgtacgactacgagaacgactcgcggtgggcggggtactggtccaacgtcctcgtgccgcctcacctcgcctcccgccccgacgtcgtcgaccacttcaagcgcaagttctaccagcggtacatcgatcctgatttgattgttgagccaatgtcttccacaagttcaagtcaatccaccaaaccagcagcaaggtcttcagcaacaccatccaatgagaatgtcagagctcgtgactcaggatcaagtgcaagatcaactgctgcctcccaaccatcacaaacggaaaggactgcaaattctttatggttggatgggcggactatacatttctctatcaatgcctgggtactggtagttgctagtcttggaatattgccaattctaccaaaacatattgcaagcaaagcctatagactctcattactaggaacaatatgctcctcagcatattctctttatgtcacctatgggaaaccaagagcatggaacatggctgcaattcagccttggttgcaatctataattgtagccaaggactttgttcatttgatgttctcccttatgatgttcacatctaatgtgcactataaaattgctcttcttcctgtgctttgctgggcacttgatcatgttgctagattcctaaggcgtaactttgcacgctcctctttgtacaggaagtatttggaggagccttgtctgtgggtagaaacaaacaacacaacactcagcctcctttgttcaaatgctgaaattactctgggtttccttatgatcgtatctcttttctcgtggagacgcaacataattcagactttcatgtacttccatctattgaagctgatgtaccatgcacccgtaacatctggctatcaccagagcgcatgggcgagaataggccgggccgtaaatccctacatccatcgctacgcaccgttcctcaacacacccatttcagctgttcaaagatggtggttgaggtagaaagcatgatgaatctttgcatagccctcctacagaaagaaaaggtccagagcttttccgttacaatttcgttagaagatactcagcacgtcacttgcattctattgttatgcacagccgtattcttcacttgcgtagcgttctattgttatgcacagctgtattctcatttcagccatagtgccagataagtttctgcaagctatatatagctcttgaatgcattaacggaattactgaggacagacgttataatcaataacagaacggtaaacaacaaaagcggcattttccttgatccatttttgaattttcgattaattatatcatcggtgacgtggagctcttcaacagttgcacttgtgatttctcattatcctgcaactatggtagtacttgttataaactgttatcttagctgctttccagctgggcatcttttgtaagcacgaaaatgggacttgggaattgagagcattggtggtacttatttgatggcattcgtttagacacagtaattttattttaggatatatgctcccctgctcctttgccatgctgcaactcaaaatgtgtagcaatgtaaagcaagcttagacttcccacattaatgaacaatctgagaggtctttacctgtgtgcc

SEQ ID NO: 21399 - DNA, 1954 bp, Oryza sativa
  ref <308>: DATABASE ACCESSION NUMBER: AK071682
  ref <309>: DATABASE ENTRY DATE: 2001-12-06
gcgtcgatctccctcacgaagcaaccccagccttctttacctttcccgggccgtgtcgcccacgcgattcccttccctccaatcgaatcacgtcgccgtcctcctccgcctccgccgccgccaacctcgtcggcgccgccctcggatccacgccgcgcgatgcagcacggagactacgcctcctcggcccccccggctgcgggccactactacccgcaccagttcgcgccgaatccgcctccgcacccggcctcctccgccgccgacgccgcgccgccgacgatcccggcgagctacgcctccgcgccgccctactcggtgggagggtactccgatcagccgccgtcggccccgtcctacgcgccgccgccccagtacgccgggtacgcgccgccctacaacaatcccaaccccgcgccctacccaccggagtcgtccccggcgccggcgccgtactacagctacccgccgacggcggcgggggtggccacgcagcatgctccggcggcggagcccagccccgcgccgctgccctacgacgccccgtactacggaggctaccagccgcctcctaccgcggggtacggcgacgatgattacctgaacgagggcgcctacgcgtatagcggcgacggcggctccgagccgtacggggcgcgcggcacggcgccgacgcggtcgggtgccgcgatgtttgatgactacggccggtcgattgggccctcgtcgggaggggcggaccagtggcccaccggtggcggcggcggtgtgggtgggagctttgggaaaattgcgagggctgttccaaaagcagagtctcatgaggatgctaacggtggtgcgcagaagtttcgggttaaactgctgcctgagggtgccgggagccctaccgatgtgctttgtcagattggtctggatggaattcgcatgcttgatcccagcacaagcaggacactaaggatttatccccttgatacactgacaagatgggatgttttagattcaaccgtatttgcattttgggcgaagactccagttgattttgaagcaaagcgaataaggttgaagtcaaacagctatacctccaatactttgcttgacactgtgactgcagcaacagtgcagtttaaggagattggtggagatgcaagaggcagaggaactgtagacagtagcaaacccatgtcacaatcaaatgagaagaagaaaggttttgattggatgtttgcaaaacctgttgacgtagtgaaagaccattgggttccagatgaggctgcgaagaagtgctactcatgtgctgttgattttagtccttttaaccgcaggcatcattgtaggaactgtggtgaaatattctgtgacaaatgcagtcaaggaagaactgctctgactgctgaagataatgccccgcttgtccgagtttgtgatagatgcatggcagaagtctctcaaaggcttagcatagcacaggaagctgccaacaggtctgccacagtgcaaagtcatgaagatcttgcaagaaaacttaaggaggaaatggagagaaatcgcaagtcctcgggttctgcatctggaggttcatctgggaccagaatgagggaagttgcatgtcctacttgcactgtccatcttcaggttcaggttccaacctctggctcagaaacagtggaatgtggggtatgccagcatgctttccgtgtcagcgccaattgataaaccgggagacagagcatgtctatagcaattattctgtttataactcacttattttgctgttccatacataataagcgtgtgtgcagcctgtagatatttcctggttgtgttggtgaccatgacaggatatactaggtttttcttgtacatgggttaatcctaaaatatatgctctaatactgctgaaattgaaacatgcttggatgtctctggagaatatcaaagaaacattcgtttc

SEQ ID NO: 21400 - DNA, 1601 bp, Oryza sativa
  ref <308>: DATABASE ACCESSION NUMBER: AK071683
  ref <309>: DATABASE ENTRY DATE: 2001-12-06
gcaagctgcatgctagctagctaattaagctccccagctcgattcctagctatctaattagctagcgagggatcgatcgagagcttctccttccgggcttccggccagccggcggggaatagctagaatcagaatggcggcggaggcggatgcacggaaggtgtgcgggttgccggagcgggtgcagctccatggggcgatgctggcgctgcagttcggctacgcggggttccatgtggtgtctcggtttgccctcaacatgggcatcagcaagctcgtcttccccgtctaccgcaacatcatcgccctcatcctcctcgtccccttcgcctatttcctcgagaagaaggatcggccgcagctgacgctgagcttcgtggtgcagttcttcctgctggcgctgtgcggcatcaccgccaaccagggcttctacctcctcggactcgacaacacctccccgaccttcgcctccgccatccagaactccgtcccggccatcaccttcgccatggccgccgcgctccgcatcgagcgcgtccgcctcgaccgccgcgacggcgtcgccaaggtgctcggcacgctggcctgcgtcgccggcgcctccgtcatcacgctctacaagggccctaccatcttcggtcccaagctgcagctgcaggcggtggcggaggtgccgttgagggcggcgatcgctggagaggggaagaactggacgctgggctgcgtgtacttgatcgggcactgcctgtcgtggtcgggatggctggtgctgcaggcgccggtgctgaaggagtacccggcgaggctgtcggtgacgtcatacacctgcttcttcggcgtcatccagttcctcatcatcgccgccttcatggagagggacgccgacgcctgggccttccactccggctccgagctcttcaccatcctttacgccggattcatcgcgtcgggggtggcgttcgcggtgcagatatggtgcatcgacagggggggcccggtgttcgtggcggtgtatcagcccgtccagaccctggtggtggccatcatggcctccctcaccctcggcgagagcttctacctcggcggcatcatcggcgccgtcttcatcatcgccggcctctacctcgtcctctggggcaagagccacgagcgtgctcgcctcgccaaggacgccgccgccattgccaccgaccgcgacgccgccccttgccggatcatcgccgccggcaagcagtcctcctccgtcacccagcccctcctgctgcctacctcctcctcctccgacaacgccgtctgaccgatcgatcggtctctttattaattacatgcgtgcatgcttcgagccatttgatcgatcgattagctgctagtactacagacttagcttgttgagaaccaaatgatgttgatgatttgcctttgcctatgatatcgatcgacattaaactagctagtagcttgcttgttttgctaggatttgttttgtttggatcatgcttgtgctttcttaatttgtaacgtcgcgagagattaattgctcaatgatgcttgtgctacattttgtataattaatgtacctacatgtgtgcttcattgtacct

SEQ ID NO: 21401 - DNA, 1256 bp, Oryza sativa
  ref <308>: DATABASE ACCESSION NUMBER: AK071684
  ref <309>: DATABASE ENTRY DATE: 2001-12-06
ggtctctcttccccttccacgccacctctccccttcccacagtcccacgtcgtcgccggcgacacgcagacgaacgcgcccggcaaaccatggcggcgcgatccggaccaccagccgcggccgtcgaccccgaggccgtgctctcccacagcttccccgaggtctccttcgcctacgacgagagggatgtggcgctgtacgcgctcggagtcggggcgtgcggcgcggacgccatcgacgagaaggagctgcacctggtgtaccacagggacggccagccacacatcaaggctcttcctacttttgcttctttatttcctttcaagaacagcaatgggcttggaattgttgatgtgcctggccttaactttgacgcaagccttctattgcatggtcaacattacatagagatatacaagccaattcattcgcgtgccaatgttgtaaacaagaccaagatagctggcttgcatgacaaagggaaagcaactattcttgagattgagactacaacccatgtcaaagattctggtgaagttttatgtatgaacaggagtactatctacctgcgtggtgctggaggcttttctgatccttcacgaccatactcctatgctagttatcccactaaccaggtttctcgcatttctattccaaattcagcgccttctgcagtatatgaagaccagacacaacaatcccaggcactattgtacaggttatctggggactataatcctttgcattcagaccctatggttgcgcaggttgcagggttcactcgtccaatactgcatggtctcagttcccttggattcgcgatccgcgctgtcatcaaatctttctgcaatggagatccaacagcagtgaaaagcatctttggccgttttcttctgcatgtctatcctggagaaactttagtcactgaaatgtggctccaaggccagagggtgctttatcaaacaaaggtcaaggaacgcaaccgcgccgtgctttctggatatgtgttgctcaaacacatcccctcatcattgtaagtgctgtatcatattcttgactggatattttataaattggtgcctgcctgcttgtattagtttggtagtgtgtagtggtcagaaaagctaaagctttccggggacataaaatcaggtaaatgaagagcttcagctaccgcaagtggtgggttgccattgtaatgataacaagtgctctgcacctatcttcaaatgatacattgcctaatttctcttctg

SEQ ID NO: 21402 - DNA, 1571 bp, Oryza sativa
  ref <308>: DATABASE ACCESSION NUMBER: AK071685
  ref <309>: DATABASE ENTRY DATE: 2001-12-06
ggctgctgctgcattcttcttgatctgatcgtcggacatggcgtcgcccatgctctccgccgccaccgtgccactccagggaggcggcttgtcggagttctccggcctgaggagctcgtcgtcgctgccgctgcggcggaatgccacctccgacgacttcatgaacgcggtctccttcaggacccacgcggttggcacgagcggcggggcgcggcgggcgccgacggaggcgaagctgaaggtggcgatcaacgggttcggccgcatcgggcgcaacttcctgcggtgctggcacgggcgcggcgacagctcgcccctcgacgtcatcgccatcaacgacaccggaggcgtgaagcaggcgtcgcacctcctcaagtacgactccacgctcggcatcttcgacgccgacgtcaagcccgtgggcgacaacgccatctccgtcgacggcaaggtgatcaaggtcgtctccgaccgcaacccgtccaacctgccgtggggcgagctcggcatcgacctcgtcatcgagggcaccggtgtgttcgtcgaccgcgacggcgcgggcaagcacatccaggccggcgccaagaaggtgctcatcaccgcccccggcaagggtgacatccccacctacgtcgtcggcgtcaatgccgaccagtacagccccgacgagcccatcatcagcaacgcctcctgcaccaccaactgcctcgcccccttcgtgaagatcctcgaccagaagttcggcatcatcaaggggacgatgaccaccacccactcctacaccggcgaccagaggctgctcgacgcgagccaccgtgacctccggcgcgcgcgtgcggcggcgctgaacatcgtgccgacgtccaccggcgcggccaaggccgtggcgctggtgctcccgaacctcaaggggaagctcaacgggatcgcgctccgggtgccgacgccgaacgtgtccgtggtcgacctcgtggtgcaggtgtccaagaagaccctcgccgaggaggtgaaccaggcgttccgcgacagcgccgccaacgagctcaagggcatcctcgaggtctgcgacgtgccgctcgtgtccgtcgacttcaggtgctccgacgtgtcgtgcaccatcgacgcgtcgctcagcatggtcatgggcgacgacatggtgaaggtcatcgcctggtacgacaacgagtggggatactcgcagagggtcgtcgacctcgccgacatcgtcgccaaccagtggaagtgagaacgtagaagctgctgctgctgctgcctttgtaactccacctcgctccaaaaattttccccagacttcttccttcttcctctcgatcctttgtaatgagaatttcgaagtttcgagcgcccaacacagtttcttgtttctttctttgcttttcttccccacctcatctgacttttcactgtccggcacggattattatcgacttccggcaattggaaatcgcaatgctgtgtaatgttcatgtgtaataccgtatatactaccggacaccggttgccaggttctggtatagaatttcagcatgttgcttgggaccatttttgct

SEQ ID NO: 21403 - DNA, 1466 bp, Oryza sativa
  ref <308>: DATABASE ACCESSION NUMBER: AK071686
  ref <309>: DATABASE ENTRY DATE: 2001-12-06
gggccgcaatcacacgcacaccctttacccgccggaacgcgcgcacttgccttgcccccccgccaaacgccagcgacaacagctatagcagcagccgcgagccgcgaggccttctcctcccgggacgccgcgcgaatgccctcccctcgctgccggggggaagaggagcggtagcagcaggcgagggcgccgcggcggcggcggggatggcggggcggccggggtacgtgacggtgccgatactgtccgtgctcgccgcgatcgggtacgtgtactacacggcggtgttcctggcgatcccggcgtggctggggctcgccacggcggccggggtggccaacgcggtggccttcaccgcgctggccgccgcctgcgtcgcgacctacgccgtcgccgtctcccgcgacccgggccgcgtgccgccggccttcttgcccgacgtcgaggacgccgagagccccatccacgagatcaagcgcaagggtggcgatttgagatattgtcagaaatgttcccattataagcctccccgtgctcatcattgtcgtgtctgcaagagatgtgttctaagaatggaccatcactgtatatggattaacaattgtgttggacatgaaaactacaagattttcctagtctttgtgctgtatgctgtagtagcaagcttatattcactggttctggttataggaggtgctgtgcacagtttgcctaagaatgaacaattaggcagtgattcttctagaacatcaattatcatttgcggggtatttttgtgtccactagctttggcattgtccattcttttgggttggcatgtgtatctcatctttcataataaaactactattgagtaccatgaaggagttagggcaatgtggttggcagaaaaggctggaaatctataccaccatccctatgaccttggtgtctatgagaatcttgtttcagtgctagggcctaatgcgttgtgctggctctgcccaatatcaaggaatacaggcaatggtattcgtttccgtacatcatatgatataccactatctacaccaccaatttgacatcaggtagcattacattcatgttagatttctggtaatttgctaaaaaaacttggttgcctatccaagtgtgaaatgtgctattctcgcaatagcatttgataacccttcataaaggaatagcgtttgtcaatgtcttgaaactcttgcatcaagagtttgtacttgatgtgatcaaatgtgtaaatgacactccacgtgtaagatacaggaagaggagctggatattcctccaggctccaaggatctatatggattttggagctagaaatgttaacttggttttctttttgctttgcaattttcgacatacttgatgagaagagtcgccagcgcctctactgatctagagtggttgtattcatacacagaagtccaaatacatgagtgcctcttgtaaagttc

SEQ ID NO: 21404 - DNA, 1683 bp, Oryza sativa
  ref <308>: DATABASE ACCESSION NUMBER: AK071687
  ref <309>: DATABASE ENTRY DATE: 2001-12-06
gccaaccacttcccctatctataaatagagaggagaagggagagtgagtgtgagttggtcatggcggcgatgggcagcaaggatggcggcggcggcggtggcgggatggcggcgcaggctgggaggctcggggtggtcgcctccgtggcgttcaacctcgccgcgctcgcgttctacctccgccggagatacttcggcggtgacgacgccgccgcggtgaggaagaaggcggaggcggaggtcgcgccgtcctccgggaagccgccggtgaccaaggactcaatcatcaacctcgaccacggcgacccgacgatgtacgaggcgttctggcgcggcggcgccggggagagggcgacgatcgtgatcccggggtggcagacgatgagctacttctccgacgtgggcagcctgtgctggttcctggagcccgggttggagcgggaggtgcgccgcctccaccgcctcgtcggcaacgccgtcgccgacggctaccacgtgctcgtcggcaccggatccacccagctcttccaggccgcgctctacgccctctcgccgccgggcccctccgcccccatgaacgtcgtctcccccgcaccatactactcctcgtacccggcggtgacggatttcctcaagtcggggctgtacaggtgggccggcgacgccaagatgttcgacggcgacacctacgtcgagctcgtctgctcgccgagcaacccggacggcggcatccgcgaggccgtgctcaagtccggcgacggcgtcgccgtccacgacctcgcctactactggccgcagtacacccccatcaccagcgccgccgcccatgacatcatgctcttcaccgtctccaagtgcaccggccacgccggcacccgcctcgggtgggcgctggtgaaggacagggcggtggcgcagaagatgagcaagttcatcgagctcaacaccatcggcgtctccaaggactcgcagctccgcgccgccaagatcctcaaggccatcaccgacggctacgatcgcgcgcccgccgccggcgacgacgacgacgactcgagccgactgttccacttcgcccgccgcaagatggtctctcgctgggccaagctccgcgccgccgtcgccgcctccggcatcttcaccctccccgacgagctccccggccactgcaccttcgccaacgagaccgtctccgcctaccccccgttcgcgtggctgcgctgcgggaaggaaggggtggacgacctggaggggtacctgcgcgagcgcaagatcatcagccgcggcggcggcaagttcggcgccgacgggagggtggtcaggatcagcatgctcgacaccgacgaggcgttcgccatcttcgtcgaccgcctcgccgccatgaactgatcggtcgatcgagcgagcgagctcgccccagctagggcttgatcttgaatcttgatcgatgtcgacgatgagatggtcagttaagttgcgaggattaagatcaagcttaattagttatcgtcgtcgtctttggttgcttcatcaagttcggttctagatatcgatctggggtgcatgcatggtaatgtgctttggttaatattagtccaaaactctatataattttggatcgactcttaaaatttcgatgttgtgttgtgagactttaatttgtgagtttgtggctggttggatacc

SEQ ID NO: 21405 - DNA, 1334 bp, Oryza sativa
  ref <308>: DATABASE ACCESSION NUMBER: AK071688
  ref <309>: DATABASE ENTRY DATE: 2001-12-06
gactctagagagcagcagggagagcgagatggggttggggttgggaggcggcggcggcatggcgatgatcaaccggaaccacgtcgtgtcgttcctcgccggcgccgcgctgccgacgttgctgctcttcttcctcgcgtccgacagggtgagcgagaagctggcgatcgtgtcgagctgggggagtggtggatcatcgtcggcggcggcggcggatcatgatctcagaggcgccggtggcgacgctgctcctcctcctgctcaacaggagaaattcccgggcttgccggagttgctgccgaaggtggcgatggaggacaggacggtgatcatcacgtcggtgaacgaggcgtgggcggcgccggggtccctcctcgacctctaccgcgacagcttcaagaacggcgaggggatcgcccacctcctcgaccatgtcctcgtcgtcgccgtcgaccccgccggcttccgccgctgcaaggccgtccacccccactgctacctcctccacgtcaagtccatcaacctcacctccgccacccgcttcatgtccagggagtacctcgagctcgtctggaccaagctctccctccagcagcgcgtcctcgagctcggctacaacttcctcttcacggactgtgacatggtgttgttccgtgacccgttccggcacatcgcggtgtacgccgacatgagcacgtcgtcggacgactactccgcggcgcgggcgccgctggacaacccgctcaacacggggctctactacgtgaaggcgacgagccagagcgtggagatgctccgctactggcaggcggcgcggccgcggttccccggcgcgcacgaccaggcggtgttcggccacatcaagcacgagctcgtcgccaagctgcgggccaggatcgagccgctcgacacgctctacttcggcggcttctgcgagtaccacgacgacctcgcccgcgccgtcaccatgcacgccgactgctgcgtcggcctcgacaccaaggtgcacgacctcaccgacatcgccgccgactggaagaactacacgggcatgtcgccggaggagaggaagaaggggggtttcaagtggacgtaccccacccggtgccggaattcgattggatggcgtaaacctgttcatccctaaattgtcaagagaattaatggttgaagctaatttgatgtcactgaaattgcagcattctgttgttgtatgaactatatgtcaatcgacaatgaaccttaattatcaattgaattaacactaggacaatgtaagaactgagctattctggaataaatctgaataaatgagaggttgttcagatgaaggg

SEQ ID NO: 21406 - DNA, 1585 bp, Oryza sativa
  ref <308>: DATABASE ACCESSION NUMBER: AK071689
  ref <309>: DATABASE ENTRY DATE: 2001-12-06
gatcgatctgaacatccagtagtgtagctagtacagtactgatctcctcctatacatggcaaaggagaaagctccttgctgcagtacaaacaacagcagcaaagcaccggcgacggcgaggccgacgaccaaggggtcaacaacagcgtccggcaatggcaggccaccgccgacgacgctgcacgacgtccccgacaagctcctggagctcatcctccaaaacctcgattcgtctctctcgctcgtccgcgccgcggcgacatgccagcggtggcgccgagtcatcacccaacagagcttcgtcctcgactacgacataccaccgcatcagatcgtgggccactaccaccaccgtctccatccaccatccttcactactcccaaacccagaggctgctgcagcagcgtcgcgttcgtccccacctcgccggagtttctcaccaccggccgccgccgccgccgcttctccctcgacttcctccccggtggcggctcgcggtgggagatcgtcgatagccgtggcagcctcctcctcctcgccaagaaaaagaaatccaactggatgcgccgctgcttccccgacctcgtcgtctgcgagccggtcacacggcggcacaaggtgatccctcgcatggaggtgatgaagtgccaccactgcgtcggcgtgttcctcctcgacttcgaccgcaacggcagcttctccatgtccaatttcaaggtgacatgcgtggtgtaccagccatacttcggtgtgtccggagatgttggcacgattactgtttgcgagtacatggaggacatgtgggattggacccggcacatgaagcccgacgaagatgatgaggtacccaagcttttcgagtggtacgtcgtcgtcacgcatctcagaaccagacccggtatccatctccatgatagggattcccttcgttttcttggccatgctgggggctcgatattctgggcgatcaaggaagacgaagggtcactgctaattctcgatgagaatgggattgatccccacattttacgcacgccagcgggtgtgcgagggtcagagctgcgagctatcgtcgacggcaatggcgaccgtcacaacgtgcgcgtcgtcgtcttagagggagagactctccgtgttgtgacatggttgtgcgacactgatgagttggttcttgagaagagcctccatttggtggaggctactcgtaggctacaaggctacaaggagagctgtttttgcggcggagtggacatcgtcacggtgagcacgtcgtgtgctgttgtgacgccggtggaggagaagacgacatggatggtctccatcgaccttgagaccatggaggtgacggaatgcaagtacgcaagtgttgcgtatccgtgtgagcttccgtggccacctaccttaagcgcttgcaccgtgaattgtagaagatttggatatatatggtcgttgccctaacatctgtgtctattgattggaataataccctttaatcttgtaagatgatataaacatggcccttgcttttcttgaatgtgtagattggatttagtgttgtatgttcatgaagagagctatatgatg

SEQ ID NO: 21407 - DNA, 1299 bp, Oryza sativa
  ref <308>: DATABASE ACCESSION NUMBER: AK099188
  ref <309>: DATABASE ENTRY DATE: 2002-08-28
gcctcgcttctcccgccatcttctcctcctccacggccatggccgccgtcgcgttccgctcgctgctacaccccgccgccgcggccctcaccgagcgtgtgccactgcctcccgctcacctacggctccagggccttcaccgccaccgcgtcggcgtcctcaacctcttcgtcgcctccggtcatcgccgccgcattctgcttcccctcgccgccgccggtggagagttctcttcggaagaggaggagtacgccaacgaggaggaagaagagggggaggagtacgtggaggaggaagaggaagatggggaggaggaggaggcggcgacggtggcggcgcctcgcggatactacccgccgagaagccggccggcgctcgggcaagagcccggccgcctcttcgtcggcaacctcccctacaccatgacctccggcgagatctcccagaccttctccgaggccggcagggtcgacaacgtccagataatctatgacaaggtcaccgaccggagccgcggcttcgccttcgtcaccatggccaccgccgaggaggctgccaccgccatccagatgttcaatggggccctgcttggagggaggactgcaagggtgaactacccggaggtgccgcggggaggggagagggcggtgggatcggcggcggccacaagggagaacaggcgcgatgacggcacattcaagatctatgccgggaacctggggtggggtgtgcgtgccgatgctctgagggcggcgttcgaggggcagcccggcttgcttgatgctagggtcatcttcgagcgcgactccggtcggtccaggggtttcggattcgtctccttcaggactgcagaggatgcacaggctgcattggaggcattggatggagtggaactggaaggaaggccactgaggctcagtatggcggaacagaacccaacagctggttctcctagcacagtgcagtcacaggaggaagaaactgcttcagaatcatctgatgcagagacagagcagagcattacctcagaaccttctgaagctgaaacggaagagagcaacttgcagacagctgccagttattagtatctaattgatggttgcactgatttacttattctgccattcggcattccaatctaaattgtacttgtccaattgaaaattttgacacaagagatgctaaaatgggatatgagccatagccaatagaatattattagacatagaggtgctccgagtttcagttattgctgtaatatattgtgcagaaatctaaagtgcaactgttttgcttcct

SEQ ID NO: 21408 - DNA, 1060 bp, Oryza sativa
  ref <308>: DATABASE ACCESSION NUMBER: AK099189
  ref <309>: DATABASE ENTRY DATE: 2002-08-28
gtgaaaccaaaccctgtataggctcgtataggccaaggcagaagcttcccaaaccctcgctctgcccgtcgatctccgtcgccttctgatccccgcgcgcgcggctgcctatatataagttgcggtgatcggcgggcggctgcaccggcatggggctggagatcatgacggacgaggctgctgctgcgccttcgcccgctgcggcggcggcgcgtgtcgagatttacccgctctgccgctactacttcggcgccagggatgttgccgctggtggcgcgggtgcggggttggagaccgccgccgaccgcgccctccgcctcaaggccaacttcgcggcgcacgggctccggaccagcgtccatggcgtcctgctggttgagctctttgatcatccgcacgtgctgctcctgcaagtcaggaactcctccttcctcctccccggtggccgcttgagaccaggggaacaagatgtccaagggctcaagcgcaaactttcaaccaagttatcggtagctggacatcaggatgacgaagacggcgacggggacgacgaatggcagattggagagtgcattgggatgtggtggagatctgagtttgatgctgctccatttccatatctacttccaaatgcccgtgcaccaaaggaatgcataaaactgttcttgattaaactgccggtgtctcgccaatttgtcgtgccaaggaacatgaagctgttagctgtgcctctatcccagattcatgacaatgctcaggtatatggctcaatcatagctggaattccaaacttgttatcgaagttctccatgaacatcatcagtgactgagatgcatgccacatgccgttaagagctgtcacggctttacatgagactagcatattcgatctagtagtagaacatgttgtgtataaactgtacctggtagaaatataaactttggaattcacgagctggtgctgtcctgtatgttgtgcaatcttttttttttcttttactgtatagaggtaatgtattgtatttgtatatgttatcaacaccaggtgtggtgttatttt

SEQ ID NO: 21409 - DNA, 1741 bp, Oryza sativa
  ref <308>: DATABASE ACCESSION NUMBER: AK071690
  ref <309>: DATABASE ENTRY DATE: 2001-12-06
ttgggctttgcccgtaataaacccattcaacacccaaacgccaccgagagtcgccggcggcggccgcatccggccatccaccgccgatcgccgccgcccttctctcccgttccttcttcctctccgctctctcgatggctggtcctcctccgcaccagccgtcctcctccggagatgtcgaggtcgccgtagagagcggctccggggcctcgtcctcaaggaacaaactgctgagtatggtgaaaaaaacattcagatttgatcggctggacagttattgatgctgaagctgatgcatcagacgtggaaatggatgataaattctggcatgaaatacttgatcttttcttcgtgcatggtagggtttcaaaggggagggaagaggatgaccttgtcttctttgttaataatatgaaattgaacgggtacaggtccagtgataacatggaaaatccacctcccttttttgtgcgaagatgggctcctaagcttgaaaagatcaccaatataaatttagctgatgtcaattgggaacgttcattctatttgaatttaattgctcacacgtcatactctgttacagttgcaatatgcagtatcatggatctttgcaaccgtgcagagaaaagcaaaccattatcaccagtttataaggtcacaaaaactgtgtatgcatccccgagccgcgtaaattttcatcttgatcgaaggaaggcagtagaaacggtacctgcataccccaatatttgtttctcaattgatgacttcgatgatacctttgatgcagttcaggttttatcagaccctgaacattgctactgtgttattctcaatgcacatgatggggcagcatttcctgaaaacactgaatcgaaaaatcctagctcaaatgtgctatctggggtaaacactgggagcaaacaagaaaaaccaccaaagagaactctcttttcaggctacgtcagctaccaaaacgttcgagaagcttatgatgctggcagatcaaaatttgagagcttattctcactcgggcatgaccgcactaaacttgataaactttatatgaggggccctgaaggacgtggagaagttgaagtagctgtttctggaatagcagatcagagccatgagagatcaaagaaagatccaggaaatagctttcgggcccttgtccatagtgcagcatctactgcatcaaaactagcaaagcatgcctacgaggctgcatctaccaacaaacgctttgatgatgagcttctgcctctaaaatgttgcttgatgtcagtatctcttccttgggactacattgcacatgacctgctgcacaaggaaacacctccgttggacctatgatccgcaacagtttcaaaccaatacgaattttgggaagaacagcatggttgagaagtggtactcatctactgggacatctcatggtcaacaatgagaatttgtttcaggatccttactgggctagccattggggcgagttgaaaggaagaggattgcttgtgttatgaatgttgagactgcgattccagttatgcaacacaaggaatgatcttacgtacatgattttggaaaagtttgtggttagcaagtcttgtgtgctcgatattgtgtaagatatgtgatgtacatgtgtactttaaatagactttgtatagtttttatgcgccgttgtacaatgttgaaagaagacgtgcaaagaaagcatattttaacttctttatcacgaggt

SEQ ID NO: 21410 - DNA, 1353 bp, Oryza sativa
  ref <308>: DATABASE ACCESSION NUMBER: AK071691
  ref <309>: DATABASE ENTRY DATE: 2001-12-06
ggacggcgccggggtggtatgccctttccctggactagctgcggcacacgccattctggtctgcgactctcctcctctgaagtcactttgatccccttcacaagcctgagcaacccatgtgaaggacgacgcctccggctacatcgcctccaagccgtcgactgcggccggtatactggaggtgatgaggagaccagaggataggtttgtggtgatttcttcccaggtgaaaaagaagaatcccctttatatatactccattaggtttggtttgcttccattactggcgcaccgagacatgatattttgattttctcaagcacctacttttggttcgactggatgaggcaattagccaaacaatagcagtggtagggatgcaagccatgatagccatggaggcaagcctatacctctctgtctcttttatatcattatatatttgtctgatagagtgtacgttagattcatctacaactcgcacatagggggaatcatttgatctccgtgttgataattttgttttatttgactctattgttgagatgtattaggccatggtaggattattgtatataaaatatgtagtaatccatggtcaactctaggtccgcaacttatttttatgcgtgacaaacacaggaatttctctggcttttctgatccgaatatcttaaggatatcaaggcatgaaactttatctcgataaatttcttggttggtgtgtatgttagtaatcatcgtactttacatgtgaaagtaccaacattcaggttcgttcaaaataagaaaatgctaatttcaccatgaatcagaaaattaatgtttggtatttgtttgttaatggctatgtaggtttagtggactaatggtatttctattagaattattcagaagagtaaatttcttggtggtaaattcaggctaattgcaatgtactgctttctaacctctaataataatttttcccagttccgcctcaactgttgcatatttacttacttagcttcttatcctgaatggatgttttggtttttagggagcagcatttgatcctcctacaattggatcttcaaaaacaattgttaggagagtacatacccagacctttctcagctttgtaatggtctaaatactaaatttgttgttttttggttcctctgtttcatattgcaggctatttcattgctgcagcccactactcttctagctctgccgacaaccacacctacaagagctacaactgaagcatcacatagggcagatgaggcatcacatgtctggcttggattcaatttgatgttgcactttgtataactatatgcagtttcagtttcatcttctgtttctacc

SEQ ID NO: 21411 - DNA, 903 bp, Oryza sativa
  ref <308>: DATABASE ACCESSION NUMBER: AK071692
  ref <309>: DATABASE ENTRY DATE: 2001-12-06
gtgttcgccgacgagccgaccgttgcgtccgcgtgttgcgactccgccgagccctagtttccgccgccgccgccgccgcgccctcgccgccacccccaccgatctcgatccccccaccccgcgggcaaatcgccgccgaatccggcctcggatccgcggaatccgggccgggtcagccatgatcttggagcagttcgacgagtcggcggcggagaaagcggatgcggcgatggtggtggcgccgccgtccaacttcgggatggtggacacgggggtgtaccggtcggggttcccggaccctgccagcttcggtttcctcaggggcctcggcctccgatctgtcgtgtatctgtgccctgaaccttacatggagacgaatgccgagttcttgaaggcggaggggatccgcctcttccaatttgggattgaggggaacaagatgtaaggaatcacccagttctaatccattgcaaaagaggaaagcaccgtactggatgtcttgtgggctgcttcagaaagctgcagaattggtgtctctcatcagtctttgaagagtaccatcggtatgctgctggaaagtcacggttgtcagatctgaagtttatcgaatcatttgatgtcaactgcatgacggattgcctgctcaggctcatctaccactaccatggttgccttcagaaaagcaagcgcctggcatacagcgagagataaactactgtggaaactatctcctgtgtcatgagtatatccctggagaagaattggtcggactatttttcctttttggaggggaattggtcggagttgtaacacaaagactcgagttaccgggcatctgttgattctttttttatatcttcatgccttggttctttttataatatatatatatattctttgagc

SEQ ID NO: 21412 - DNA, 1804 bp, Oryza sativa
  ref <308>: DATABASE ACCESSION NUMBER: AK071693
  ref <309>: DATABASE ENTRY DATE: 2001-12-06
gcttgagacttcgaggagatgatgtccgtgcatatggaacagataaggagcattctctcagagtcccagaagatcctttttataaacagatggctgctgagttcacgaaaaatcaaattgcagtggacatattttctttcagtgataaatactgtgatatagcttctttaggttctctggcgaaatacactggtggtcaggtgtaccattatccatccttccaggcagttactcatggggataaactcaaacatgagcttagcagagaccttacacgggaaactgcatgggaatctgttatgcgtatcagatgtggaaaaggggtgcgcttcacaacttatcatggccatttcatgctaaggtccaccgacttattagcacttccagctgttgactctgataaagcatttgcaatgcaactttctttagaggagaccctaatgaccacacagactgtatatttccaagtggcattgctatatacatcctcttctggtgaaaggcgtatcagggtgcatacagcagctgcacctgtggtcacagatcttggtgaaatgtatcgtcaagcagatactggtgccattgtgtcattgttgagtagaatcgctgttgaaaattcactgtctgataagctggacagtgttcggcaacaattacaattaaagcttgtgagaagtttgaaggaataccggaacctatatgttgtacagcaccggataggagggagacttatatatccagaatctttaagattcttgccgttgtacattctgtccatatgcaagtctcttgctcttcgtggtggttacgcagatgtttctcttgatgaacgttgtgctgctggtttcagcatgatgatactgcctgcaaaaaagctgctcaattttatttatccttcattgtacagggttgatgaagtattgtcaatggaaccagataggatcggtggatccttgaagcggttgccactaaccatgcagtgcttagacactggtggtctttaccttcttgatgatgggtttaccttcctagtatggttaggtaggatgctcccacctgaacttgtgaacaacattcttggagtcagcttggcaaacttccccgatctatcaaaggttcaattgagagaatgtgataacgagtactccagaaatttcatgaaaatactagggaccctaagggagagggatccttcttaccaccagctctgccgcgtcgtacgtcagggtgaacagccaagagaaggctttttgcttctatctaacttggtcgaggatcagatgtctgggactagcagttacatggactggatactccaaatccaccgccaaacgcagagctagtcacgatgaatcaagggaatcgccgttccaaatttttggcttattgtaaactgctgcagattcagccgctgccagttcctaatctctcgaaacagttggaactaattcgcaagtcagatgtccagaatgtcttccccttagcagcagcacgctggcaagcaaaagttttattgttaatattcgtccctgtgattattttcctcgtgagtgaaaatacagatgttgtatgagaataattagggcaacagtgaccattggtaaggtatacaacttggtgttcttggaaatgtgctgtacgttttttttttccatttttgtttttattattgttcagatttctagtttgtgccgtgtcggtctcctggtatttttagttctccaaagtttgtcgtgtaaaactcatttttgactgatgatctagctgcatgtaatggggggagggctcccatttaactggtgtt

SEQ ID NO: 21413 - DNA, 1140 bp, Oryza sativa
  ref <308>: DATABASE ACCESSION NUMBER: AK071694
  ref <309>: DATABASE ENTRY DATE: 2001-12-06
gagcctcgtcagcgctccacaaagcaacccggctgcggcggcggcgccacccacctgcttcattgctcactccggcggcgatggccgacgacgtcgcgccgcgcaccgcctccgcctacctcgacccctcctactgggacgagcggttcgggaaggaggagcactatgagtggttcaaggatttctcccacttccgccacctcctcgccccgctcctctccccttccatctcggttcttgaggttgggtgtggcaactcgcggctcggggaggagctgctgcgggagggcgtcgccggcggcatcacctgcgttgacctctcgcccgtcgccgtccagcggatgcgtgaccgcctcgcggagcagggcaccgagggtgtggaggttgtggtggcggacatgcttgatctgccgttcgatcgtgagagcttcgatctcgtgattgagaaaggcaccatggacgtattatttgtggacagtggtgatccttggaacccaaatcctacaacagtggataatgtgatgaaaatgcttgaaggtatccacaaggttttgaagcctgaaggcatatttgtatcaattacctttggacagccacatttccgtcgtcgattttttgaagcacctgggtttacatggtctgttgagtggagcacctttggtgatggcttccattatttcttctatattcttaaaaagggcaagaggttgttggattccaacggtaaccaacatacacagcctgctgctccaagcattaatatgttccatgaagagcttgagagtgaggactacatattccgaacaaatgttgatgagttgtaactggcaatttaacaagtgcatcatcggcttgggtgggagttttgatgaagctactacacatcaagagagacgtcccgtccagcatcaacttggtagatgaatgatcttggacagatgcatggaaagatcttgcttggtgctgtaccattgccctggctagggatttctgtgccagctgaattgactagaaaacaggtacctttatcattgttcccagatttttagtaaaccttccaaagaagttcccttttgtttccaaacaatgcacttctttgctactccctccgtttcatattataattcgtttgactttttt

SEQ ID NO: 21414 - DNA, 1191 bp, Oryza sativa
  ref <308>: DATABASE ACCESSION NUMBER: AK071695
  ref <309>: DATABASE ENTRY DATE: 2001-12-06
ggcctcaactcaagcaaaagcctccccctccaattcaatttcctctctctccatctctctcctccaatcgctgcctcgctcacgcacgcgcgctctacctacctgagggcgaggctggtgccgatggcaatggaggctgcggcggagaggagcgccggagcaggggcggcggcgacggcggcgccggagagcggtggcggtggtgcaggggagaggcggtcgcggttcaggcggatctgcgtgtactgcggcagcgccaaggggaggaaggccagctaccaggacgccgccgtcgagctcggcaaggaactggtcgagaggggcatagacctggtctacggcggtggctccatcggcctcatgggcctcgtctcccacgctgttcacgacggtggtcgccatgtcattggggtcatcccgaaatccttgatgcccagagaggtcactggtgagcctgttggtgaagttagagcggtctctggcatgcacgagaggaaggctgaaatggcccggtttgctgatgcgttcattgcactgcctggcggctacgggactcttgaggagttgcttgaggtcatcacctgggcccaactaggaatccacaagaagccggttggccttctgaatgtcgacgggttttatgatccttttctatccttcattgacatggctgtcagcgaaggattcatagcggaggatgcgcggcgcattatcatctcggctccaactgccagggagctagttctgaagcttgaggagtatgttcccgagtacgaggtcggcttggtttgggacgatcagatgccgcacagcttcgcgcctgacctcgagaccaggatcacctcatcctgatctctcggctctggccctattcttacccaagcttctaaccggcggacgacgataccttcttctcgtgccgaagccgaatatgatcctggaggaagtttgtttttctcagccaggggaaagtaacatccactaaccgaaaagatttagccaaaggcggcccctagctcgggtctgccgatttgttgttttggcaaaatatgtcaattgggacagtatttagcattagcagtgcctcctcaatgctgttcttttggcccccctccctcctcactagctagaagaaggaatatatgtatatgcaagtaatattagtagcatctgtctatcttgatcttctcc

SEQ ID NO: 21415 - DNA, 2699 bp, Oryza sativa
  ref <308>: DATABASE ACCESSION NUMBER: AK071696
  ref <309>: DATABASE ENTRY DATE: 2001-12-06
gaggatgcgaagactttgctcctccacgcacgcagacttcgctacttcgcttctcctcctccccatgtgtactgaagccacatcctcgccggagctctgtcgccgctccgccgcatcctcgccggagacgccgccgccggatcctgcttcttctccaccgccgcggcaacctcaaccccatccgccgccgcctccttcttccccaccgccgcggccggcctcttccccatcggccacagccggagccgacgtcctccccatccgccgctaccgcagtccctgtcgccatcgtcgacgttgtctctgctgcctcgctccgctgcccatctcctgtcatgcagctgtacttggccaatgtgcctataccctaggtgctgaacaataggagggaatctgaacatcgttgagacgtacaggtaatcagactctatcttgcagcttcgattcatcatttaattatacaatttgatggtctttctttgttgactgccaaacaattccccttcagctcactgccatcctcctctccatctgctgtgtggtttgtgtaaagcatcaccattctatacatcactgtgcttattatgagcttggctatgcaatatatggattggccattcaaatatcaatgtttttgttcttggatttgcaatgcttacgaaattactctctgaaattgtgcttgcaatgggccttgtatttcttttcccacgatgtgggtagtatggatttttttttctgtttgtcctccatatatgtcagctctaaaaatggacagtatgaacttaatttagtagttcaggccatagaatatactaacagactgcctatgttttgatttccatttgtcttaacgtttttagtttcagcagtgcaaggttataattgcttcatggttctcctctctttgtttttagcaaaattaatatgaactgcacatacatcactgtgctaatattccgtacagattcaggcgtgatgctatactgttgtgcaggaagaagcttcacaatttcacacaagggatttagttggtagcagctcacacactcccttcgagcaaatattgttttcaagtacttatctcatttaacttaataagttgcttgattattgggagcaactcacacactcccttcgagtaaatattgttttcagttacaatactatcgatgattcttttattctacaagaaatgtgaattatggaccattatactaccttggtaaatatttttgttccagtttgaagctgaaaaaattgtttccggttgttcttattaacgtggttcaaattgattcttagaaaatgaaaagtcctcagtaggtcttgttattctgtaacatgtaggtcctaattgatgcttacgaaatgtggatttgggattttgttatagcgagcggactgtcatcaatattaacgagaacctgttgcatattaaaactgcttttatatgctcatggtgtgttcttcaaggttgtacatccttgcgatggacggcgttcctaaactaactgtgaaggaattaaaaagtcagcaagcctgagagcggtacacggcactcagcgttgaggagaaggctgcgctggttcaaaggaaccgtgaaaacagggagaggaagaattctgcatctatatcgggcacagttttgaatcagagtttgcatgaaggaagccaaactgtaaattgtcagccatcatttcagccagtgccatcctccacacctatgtcttcctccacacctggaaagcatcgtttctggccaacggatcactggagcgccgcggacacaaggcactgtttactcccaatccgtcccccctataaagctagcctcaatcccactacttcggtacagtacatcgccactgcatttcttctcatctttcctcttccatagatcattagtaaggtctctcttctgagaatcagctatgacttttgctgaagttttcagtctgcctaatggcgcaattgttggtatggtatattgaaccacaagtgtattttgtgtttgttcttttcttgctgaaactaactctgaaacatgtttacatttgtacagatgttgccctgtagaccattatgcaaattttccaaacagtgttagaaaggtcacattgatggattccaaaggtgagaaactccatgttcaaagaaccagtcctgcatgatgccattaagattggtgtgaactttaggaaccaagagctactgcaaccggcagaacaaaataatgctccaagaaaaccagaagtggtgatagttgaagataatgaagtggtgattgagccattgccaaaaaagaagtgcactggcaacaagggataaactatccctctaggagttgaagtcattgacattacctctgcatattggcttatgcatatctctgcacattggctgaagatcatatttattttttagcaaattcttgtatctaatatgaaaatcagaatgcatatatgcatgcactttatgaaaattgtgcagattgtgcataagtcagcggggaatcgttagagcttcaagtgtgattgaagcagatcctctttcttatgatctatttcctatttacctattcttctttcagattattaggttataatatattgggtttaatttatatattgaacataacgtgccttgcacgtgtatgattactagtattagtacaacatgaacggtttcctttatgc

SEQ ID NO: 21416 - DNA, 1582 bp, Oryza sativa
  ref <308>: DATABASE ACCESSION NUMBER: AK071697
  ref <309>: DATABASE ENTRY DATE: 2001-12-06
gggtagctcagctgattcgatcgatcagccatggcgggggagaggaggtggagcacggcggcggcggcggctggatggctgcgagtggccgccgttgtggtggccgccgcctctgccgcctcgtcggcggccggcgagggggtcggccggcagacggtcccggcgatgtacgtgttcggcgactcgctggtggacgtcggcaacaacgacttcctgccgccgccggcgccgaggccgccggagccaccctgcggcatcgacctcccgcccgaggccgccgccgccgacggcggcggcggtggccgcttcaccaacggcttcaacctcgccgacgtcatcgcgcagcatgtggggttcaagaagagcccgccggcgtacctctccctgacgacgccgggaagagacggcgaactccggcgaggcctcgtcggcgccaactacgcctccagcggatccggcatcctcgacttcattgggaacggcacaatcagccttggagagcaggtcaagctcttcaccaaaacaaaggaggcaatgatcaccgccggcgaggtcgacggtgagaacatcgacaacttgctctcccagtccttgttcattacctgcaccggcggcaacgactacaatgccttcactgatggcatcgtccccgtcagcgacgcgccggccttcatcgcccacatggttgccacttacatcaagcatatcaagacactgtacaatctaggggctcggaggctggggatacttgacgtgctacctctagggtgtctaccgatctccagggtccccattgaaaatggttcatgcagtggcactgacaactggcaggcacggctcttcaaccgtctcctccgacgagagatgaccgccgccgccacagcctccatgccggacttggtgtactccatcggcagcatttactacaccttctacgacatgataaagaatccatcttcggctggggtgagggaggtggcgagggcgtgctgcggagacggcaagctgaacgcggaggccgactgctcggcgaccacccacctgtgcccggaccgggacaactacatcttctgggacaaggtgcacggcacccaggccgcctaccacaactgcgtccacgccttcttccacggctcgccgcgctacgccgagcccatcagcttcacccagctggtcgcctcgccggccgtcgatctggggcggccgtccccgggcacaaaccggacggccaggatttgatcacccaatggactcatattggtataagcattgttcattggtaaacaatgaaaatcgctgggtttcctttggttttgggagtcaggagatggagatgttgaattggggttgatgatggtatatatgtgcataattgaagtgtggtgatacctcacggtacatcctaaggaccacagattctcagataagacattgtacaagtttttgtgtttttttcctgaataattcctcctatgctatagagcacttgttgtcatgccttgaaattaagcagtgtctagttgatcactgcaggaagaaagaaatgcttgactagagaagaagaaaaaaaacatattgacct

SEQ ID NO: 21417 - DNA, 2336 bp, Oryza sativa
  ref <308>: DATABASE ACCESSION NUMBER: AK071698
  ref <309>: DATABASE ENTRY DATE: 2001-12-06
gatgcactcaagtttcaacctcccttctccaacttgcaatgtcttcatctcacacggtgacagtctccatggatgttgaagccggacagaaaaacaaagataagaaggggatcagccaagatctgatcctggcttacaagactcttggtgttgttttcggtggccttgttacctcaccactctacgtctacccatccatgaatttgacgaatcctactgaagaagactacctgggaatatacagcatcatgttctggaccctcactctcattggcgtagtcaagtacatatgcatcgctctcaacgctgacgaccacggcgaaggtggcacatttgccatgtattctctgctctgtcagcacgcaaacattgggatccttccatccaagaagatctacactgaagaagagaacctgatctcgaatcagcctgtcgtagctggaaggcctggaagactgagaaggttcatcgaaagcagcataatcgccaggaggctgctgctgctcacagccatcctaggcatgtgcatgctcatcggcgatggcatcctcactcctgcaatctcagtcttgtcagcgattgatggactcagaggcccgttcccatccgtcagtaaacctgctgtggagggcctgtcggccgcgattctcgttgggctgttcttgctgcagaagtacggcacgtcgaaggtgagcttcatgttctcgccgatcatggcggcgtggacgttcgccaccccggtcatcggcgtgtacagcatctggcgctactaccctggcatcttcaaagccatgtcgccgcattacatcgtcagattcttcatgacgaaccagaccagaggctggcagctactcggcggcaccgtcctctgcatcacaggtgccgaggcgatgttcgcggatcttggtcacttcagcaagaggtccatccagatcgcgttcatgtcgagcatatacccttcgctggtgctgacgtacgccgggcagacggcgtacctgatcaacaacgtcgacgacttcagcgacgggttctacaagttcgtgccgcggccggtgtactggccgatgttcatcatcgcgacgctggcggcgatcgtggcgagccagtcgctgatctcggccaccttctccgtcatcaagcagtcggtggtgctggactacttcccgcgggtgaaggtggtgcacacgtccaaggacaaggaaggggaggtgtactcgccggagaccaactacatgctgatgctgctgtgcgtgggcgtcatcctcggcttcggcgacggcaaggacatcggcaacgcgttcggggtggtggtgatcctcgtgatgctcatcaccaccatcctgctcacgctggtgatgctcatcatctggggcacccacgtcgtgctggtggcgctctacttagtgccgttcctgctcctcgaggccacatacgtgagcgccgtgtgcaccaagatcctccgcggagggtgggtgccgttcgcggtgtcggtggcgctggcggcggtcatgttcgggtggtactacggccggcagcggaagacggagtacgaggcggcgaacaaggtgacgctggagcggctcggcgagctgctgtccggccccggcttgcgccgcgtcccgggcctctgcttcttctacagcaacaggcaggacggcgggtggctcaccccggtgctcgcgcactacatcaggaacatgcggtcgctgcacgaggtgaccgtgttcctcacgctccggtacctgctggtggcgaaggtggacggcaaggacagggtgcaggccgtgcgccggctggggccagcgggggtgtacggctgcacgatccagtacgggtacgccgacgcgatcgacttcgaggaggacgacatcgccgggcaggtggtgggggcgctgcgggagcgggtcgtcgacggggaggaggagggggagcgggtggaggcggcgagggcggccggggtggtgcacgtgagggggaagatgaggttccacgtcgggaaggacacgaggctgttcgaccgggtgctgctcgggttctacgagttgctgcacggcgcgtgccgctccgcgctgccggcgctcgggatcccgctgcagcagcgcgtcgagatcggcatgctctacaaggcctaacggcgccgaacgccacgcacgcgccccacgaatccgtacgtacgtacgtggccattaattaccattagcagtataacccctattattagtgtggatattatgggtaccccatacccatacggcatggttatccgaccagtcataggggataacttatatctatagaatatgtaatagatcatgactcgggtattacgtttcctc

SEQ ID NO: 21418 - DNA, 1369 bp, Oryza sativa
  ref <308>: DATABASE ACCESSION NUMBER: AK071699
  ref <309>: DATABASE ENTRY DATE: 2001-12-06
gtgtagatcccaatcccatccacatcccctttgctcgactacaaagtcacaccgctttgcattttcctctctctctcggcccttcgcctcctccaccgagtcagatctcgagcgccgcagaggagagcagcaatgaggccgtcgctgatgagatccgcctcgcaggtcctccgccgccgccgcggctactcctccgcctccggccagccggagcggaaggtcgccatcctcggcgcggccggcggcatcgggcagccgctctccctcctcatgaagctgaacccgctcgtctcctccctctccctctacgatatcgccggcacccccggcgtcgccgccgacgtctcccacatcaacgccccggcccaggtggaggggttcatgggggatgaccagctcggggaggcgttggaggggtcggacatcgtgatcatcccggccggcgtgccgaggaagcccggcatgaccagggacgacctcttcaacatcaacgccggcatcgttaagaacctctgcaccgccattgccaagtactgcccgaatgctcttgtcaacatgatcagcaacccagtgaattcaacggtcccaattgctgccgaggttttcaagaaggctgggacttacgatgagaagaagttgtttggtgtgactactcttgatgttgttcgtgctaagactttctatgctggaaaggccaatgtaccagttactgatgtgaatgtcccagttgttggtggtcatgcgggtatcaccatcctgccactgttctcacaggcaactcctgcaactaatgcgttgtctgatgaagacatcaaggctcttaccaagagaacacaggatggtgggactgaagttgttgaagcaaaggctggaaagggctctgcaaccttgtccatggcgtatgctggtgctgttttcgcaaatgcttgcttaaagggtctgaatggagtgccggacgttgttgaatgctcttttgtgcaatcaactgtaacagagctgccattctttgcctccaaggtgaagcttgggaagaatggagttgaggaagttcttgggttgggccagctgtcagactttgagaaggaaggactggagaatcttaagggcgagctcaaggcttcaattgagaagggtatcaaatttgcaaatgcgtagttaggccattttgcagactagcaactcatacctgtagatgaggcttctcttgatttgatttatgcttttttctaccccttgtgttgggataccgaggatttgagctttacaataagaatccggcggcctaatgccaaacagaacaaaacttgtacgagaggaactatttgtgtcaagttttgagttgttacattggacaaacattggattatgc

SEQ ID NO: 21419 - DNA, 1734 bp, Oryza sativa
  ref <308>: DATABASE ACCESSION NUMBER: AK071700
  ref <309>: DATABASE ENTRY DATE: 2001-12-06
gggatcctgcatgcgcacgccgggcgcttccctctcggatcggccaatcggacgcacagagcacttgcagaagcaaggtggaagctgtgttaagattgttttctaggtccggtgaattctgagagagatgaaggtgcggagctgtactgtgagaggaagaaaagagtgaagtggcatcagctgtggccatcaagtgccaaggatatgaaggttgttccagtgccgcgtgcaagaacagctccaagaaggcacatatggataccagtgattctaattcttgttgccgtcaccgtgctatggatttacttataccctccacaggattatacctatcctgttagggattggtatcctgttagggactggtttcctgcagaacctgcccgggaactgaccgatgaggagactgccgctcgagttgtctttagacaaatcctctcaacgcctccattcccatccaggaaccccaaaatcgctttcatgttcttgactcctggcaagttgccatttgagaaattatgggagttattttttaagggccatgaagggaggtacactatatatgttcatgcttcacgtgagaaacccgaacatgtcagtcctgtatttgttggccgagacatacacagtgataaggtaggatggggcatgatttctatggttgatgcagagaggaggttgctggcaaaggccctagaagatacggacaaccaactatttgttttgctttctgacagttgtgttcccctacacaattttgactatgtgtacgacttcttgatgggatcaagacacagttttcttgactgctttgatgatcctgggccacatggagtatttagatactcgaagcatatgttgccagaagttcgagagattgattttagaaagggctcgcagtggttcgcaatcaagaggcaacatgcaatggtggtggttgcggatagtctgtattacacaaaattcaggcgtttctgcaagccaggaatggaagagggtcgcaattgttatgcagatgagcattacttgccaacactattccttatgatggaccctgctggaattgctaattggtctgtgacttatgttgattggtctgagggaaagtggcatcccaggtctttccgagctaaggatgtaacttatgaactcctcaagaatatgacatcggttgacatcagctaccacataacaagtgatgaaaagaaagagctcttgcagaggccttgcttgtggaatggactaaagagaccatgctacttgtttgcaaggaagttctacccagaaactttgaacaatctcatgtacttattctctaactacaccattttctaagctctaacgggaaaatcctcacatattggaagcacttggtgcttcaaaattcttttgtacatcgcgggagaagcaaatttatttacactaattgggtatagaaataggggaagtattggattctactgcagcaatattagggtattgtggccatgggtatagtttaggattatattatttaaatttcttagtttttcagggttctttgtcttcctacaaacgttgttcattctggcaaattttgccactatcagttttctcttatagcccagttatagaattttgccacttatccatgcacaaaaaatgtgtgtaaatggaattctatgtattctctattcatcctgtatgcttgtattctacagagggataacaaaaaagttttgcaaagcagaattc

SEQ ID NO: 21420 - DNA, 1288 bp, Oryza sativa
  ref <308>: DATABASE ACCESSION NUMBER: AK071701
  ref <309>: DATABASE ENTRY DATE: 2001-12-06
tggcttcctcccccctttctcccgcccctctccaccaaaccctaaggccgtctccctccctccgcctccccgttcgccatctccccgtggcgtcctccgcggctccttcgggcgcggcggcgtcggcgacggagtgccctcgctttctagagcggtgcggcctcaacgccgacgagttcgacgacgatgccgaggcggaacccacggttggcttgttcggtagatcgattaggggtctcgcggaggttaatttcactgctgttgctggtggtttgagtgtatttttgtttgtttgttttcagggagagaggaggggaaggccatcgtcatggctggatctggtctctccttgctcagcggtagcggcaacgtcctcccctttgtcctggcctccccatcctcctcccaaaaaatcccccactgctggcttcatcgatgacggcgatgatgtacagtagctcccgtgtcacccactccgctagatatggaggcacctcgtcctcttcttcgtctcagcgccagacagtcccctcgtcctcggcaccgtcatcgacaccaaaggaacaatgatgaggcctctgggtggagacgaggatctcggtggtgatgcggccggaggcaatacaacattcgcactgttaacatgacattgaagtgtggttgattaggcgaagaaagatatattttggttggaggattgcagggatgtaagcggtttgaataacatttgggactaacctgacaaagaggttccagtgtttcctctgcgaaagttgttgcgaaaagcagctggacaagacaattatgagattccatttacatggtttttcttcatggtcatgaagcaacttgctcgttggacctgttgcatagcttacatggctcctcccattatgtcttgcttccaataaagacttcatttctttgattgttgggggtgcgcttcagacatgtggtcatgctgccggcaaccgcattggctcctattcagctaagacgcggttcttgatttgttggcgaaaacccaaattctggggaatcattgagctgacctggagttcttgttcagtgttttgctgaatctggatatggcgagcttttagcaggaaacaaacgccaggaatgatcaagggccttttgctgatcacgttgggcatcagaaccacatggaaaacctcacagatcatccagaaaaaactctcagaatgcaaaggatctaggattttctccattgagtttgttgccctgattgcattttgcccctttagttcagagttgttcattctct

SEQ ID NO: 21421 - DNA, 954 bp, Oryza sativa
  ref <308>: DATABASE ACCESSION NUMBER: AK071702
  ref <309>: DATABASE ENTRY DATE: 2001-12-06
gccccaaccgcacgcacccgagccccactgcaatcccacctccccaactccgccgcacgcatccccgcacccgccaccatggctcgccggagcggcctaatgctactactcctcgccgccgccgctgtcgcctccgcggccgtgccgccgtcgtgcgagcgcatcgagtgcccgtcgtacgaggtggtggacagcgccaacgggttcgagatccggcggtacagcgacgccatgtgggcttccaccgcccccatcgaggacatctccttcgtcgccgccacccgcaccggcttcctccagttgttcaactacatccaggggaagaacgcgtacaacgagacgatcgagatgacggcgccggtgctgacgcaggtggcgccgagcgacgggccgttctgcgtctcctccttcgtggtcagcttctacgtgccggcgaagaaccagccggacccgccgccggcggaggggctgcacgtgcagaggtgggccggggccaggtacgccgctgtgcgccgcttcggcggcttcgtggccgactccgacgtcggcgagcaggccgcgctgctcgacgccagcctgcaggggaccaggtgggccgccgccgtgtccgacgggcgcagggccgacccgacgtcgtcgtacacggtggcgcagtacaactcgccgttcgagttcagcggcagggtcaacgagatatggatgctcttcgacgcgaaggatgcatccgacatgtaacgcgatgagcgcgcggcaattccaaatcttcaaatgttcaccggagtagtagactcgatcgcacagctagtgtaatcttcaagctcctggtcggaagaataatggcatcttaaagccctaaactgctcgagtgaactgtttttttgcactgtaaagtatgtagttgagttgtgactcgtgcgtatcgagattaacaacaataaaagttctgtttagtct

SEQ ID NO: 21422 - DNA, 1561 bp, Oryza sativa
  ref <308>: DATABASE ACCESSION NUMBER: AK071703
  ref <309>: DATABASE ENTRY DATE: 2001-12-06
ggctcctccgcctccgcctctcatatttttcccatttttcacctgccttaattcgccctcctcccataaccgtagtagtaatcgtactcctccattctcgccggaatccagagcgaagctgtaggaaattgttgggaggaggagcaatgccttactgcgaggtggacaggtaccagaacggcgacgagtgggacggcgtccgcctcttctaccgccgcttcggccgcggcgccaccaaggtgctcctcgtcatcggattggcggggacgcacgactcgtggggcccgcagatcaaggggctgaccgggtcgctggagccggccgccgacgacgaggagtccggcgacgccgcggcggcggagggggacgacggcgatggcatcgaggtctgctgcttcgacaaccgcggcgtcggccggagctccgtgctcccgcacaaatcctactactcgacggtgatcatggcgagggacgctctggccttgatggaccatctggggtggaagaaagctcatgtattcggccattccatgggcgcgatgatatcctgcaagctggcagccatggcgccgcacaggatttgctcgttggcgttgcttaatgttactggaggtggcttccagtgcttcccgaagttagatgggcagatgctctcgcttgcattccgtttcttaagggcaagaactccagaagaaagagctctggtagatttggaaacccattatacaaaggaatatcttgatgagaaagttggatcatgcacgaggagaacaatcctctatcaagaatatgtgaagggcatatcatcgacagggatgcagtctaactgtgggtttgaaggtcaagttaatgcatgctggactcacaatatgacaactaaagaactagatacaattcggtctgccggttttctagtttcagttattcatgggaggtctgacattattgcgcaattatgtcatgcgagacgacttgcagaaaggcttattcctgttgctagaatggtcgaacttcatggtgcgcatctagtaagccatgaaagaccagaggaggtcaacaatgcactaatggaattaataaaagccacaaaatctatgatgaaacctgaggaatggtcatcccagccagagaattcatcaggagtgatactgatggggtttgagcatatgaggaacattgtaaaagtaatgaagccagtaagggtcgcagcaatcgaatcataagaaacaaaactcatgtaaattactctcagagccgtcgaggagacctggtattttcatgtctcctcagtactgtggagatgatggttttagaatagcatctccgaagacttcctgagaaaacttctgctctaagcagaataagtgaacaatacggaagaaaattgatgaggtatttggtgcgcgccttggacagaagcgtcccagggcagaaatgcacaaactgatgtacccgtatgagtgtaaatgttgttaccgtatcacggccttatgctgtcgccattcttttgtatcagcatgaaatgtgattattcccatcaataataaacctggttccctgc

SEQ ID NO: 21423 - DNA, 1375 bp, Oryza sativa
  ref <308>: DATABASE ACCESSION NUMBER: AK071704
  ref <309>: DATABASE ENTRY DATE: 2001-12-06
gagccaaacaccaacaaggatagaggggagaggctagcttcctggaaatggagcagatgaacactgctgctgcaaagtccatcaggtgcagagcggcggtgagcagggtggccgggcagccgctggagatggaggaggtggaggtggcgccgccgcgggcgcacgaggtccggatcaagatcctctgcacatccatctgccacacggacatcaccttctggcgtatggaaggcaatcatccgtctatctttggccatgaagcagtcggtgtggtggagagcgtgggggagcacgtgcaggaggtggcggtgggtgacatggtggtgccggtgttcgccgcgcagtgcagtgagtgccctgactgcctctccgaccgcagcaacctctgctccaaactgcccaacgtcgccggcctcatgcctcgcgaccgcacgacgcgcttctcctccgtctccaccggcgagcccatccgccacttcctctccgtctccagcttcgccgagtacaccgtcgttgacatcacccacattgtcaagctcgatgttggattcccaccggcgatggcatgcctcctcagttgtggcatttccaccggtgttggtgcggcatggaaggtggcagcagtggagcccggctcgagtgtcgccgtgttcggcctgggtgccgttgggttagcggttgctcaaggggcgaggatgcgtggggctaagaggattattggggtggacctgaacccggacaaattcgacgttggtaagaggctgggcatgaccgacttcatcaacccgaacgataccggcgggaagaccgtgagcgaggtcatcaaggagatgaccgggggcggcggcgccgactactgcttcgagtgcatcggctcgacttcggtcatggcggaagccttccaaagcactcgaaatgggtgggggaagacgatcctgctcggcgtctccggcaacaaggcgccgatcagcatcccgtcgcacgagatcctccggggaagatcggtcatcgggtcgctcttcggcggcatcaagcccaagaacgacatcccgatgctggctcagaagtacctggacaaggagctggagctggaggagttcatcacgcacgagatggggttcgaggagatcaacagggcgttcgagctgctcacgcaggggaagagcatccgctgcatcatctggatggacggcgccaaggtgatcgacaacggcgagtgatcgcggcatcgtcgtcctgtcgctaataaccgattaaccgctgataccctgggaaacagttgagcctcgctgttaactcaaactgtccgtcgtgtctttctgaaggctttgtctgttctctgttctgcataaaaaatgcggttgacagcgagttg

SEQ ID NO: 21424 - DNA, 1191 bp, Oryza sativa
  ref <308>: DATABASE ACCESSION NUMBER: AK071705
  ref <309>: DATABASE ENTRY DATE: 2001-12-06
gattcagaaaaaaacactattagtaagtgggaaactagaggccgaccggaggtttctttctatcgttgggagcctctctgccttccgacctccatcgaattgggtgcagaccagcagcagccaataattaaggtcgtcggccgtatatatgatgatggagaatagcagggagcagcagccggagtcgtcgccggcgaacaacaatagcaagaagaagaagaagaagaagacggcgtcgcggttccggcgtgtgtgcgtgttctgcggcagcagccccgggaagaaggcgtcgtaccaggtggccgccgtgcagctggggcagcagctggtggagcgcggcatcgacctggtgtacggcggcggcagcgttgggctgatggggctggtgtcccgcgccgtccacggaggcggcgggcacgtggtgggcgtggtgcccaatggcgtgctgccacgcgagctgatcggcgagacgctgggggaggtgagggcggtgggaagcatgcaccagcggaaggcggagatggcgcgggagtcggacgccttcatcgccctccccggcggctacggcacgctggaggagctcctcgaggtcatcacctgggctcagctccgcatccaccacaagcccgtcggcctcctcaacgtcgacggctactacgactccctgctcgccttcatcgacaaggccgtccacgaaggcttcgtctcgccgcccgcccgccgcatcatcgtcgccgcacccaccgcctccgacctgctctgcaagctcgaggaatacgtgccgccgccgcacgacgccaccgccctgaagctcacctgggagatgtccaccgtatcggagcagcacgccggaagcatctactcccccaagcccgacatggcacgctagctagctagctagctactcgatccacttcattattacttatcttgtttcttctcatataatcttgctgctaattatttcttccatatattaattccctatatatatgtatatatactcgatcgtactatattgtatacatcatcaattacttgtaacttcaattaatcctagctacatcgaagaggcaggcggccctagttagttttcctgtactagaagctagttaattttcctctatggagtgttattatgagttgattgagttgggagtattaatttgttctctcatcatttactagtac

SEQ ID NO: 21425 - DNA, 1687 bp, Oryza sativa
  ref <308>: DATABASE ACCESSION NUMBER: AK071706
  ref <309>: DATABASE ENTRY DATE: 2001-12-06
gagtctctcactctcgttctatctctcagtctttccccgtctctctccatccccttctctagttttgcccaccagatcaaccatggagccatcgtcgagttgccggggggcggtggatcgggtacttcgccatgtcccccgacgagatgacgcggcggctcgggttttgcgaggtggtcgtcttgttccggggcaccgtcacgccggcgagtagatggctaacctcatgagctcgctgtagtcggcatgcctcaactcgtgcgatctgcaccctaacgttaaggtggattcttggttcctcagcttgtacacctccgccgctagcgcctctcgcgcggatccgctgtcggcggcgacgggaggggtggatccggcgacctcttcccctcctgcatggatcccgtcgtctctccgctcccctcttgtgcggatctgccgtccgcggcgatgggtgggtcgatccggcgacctccgtcgtctctccaccctccgttcgtgctgatccgccgcgggtgatgatgggagggacggaggtggggtggcagactggcagatggggcgacgacctcgacgatggcgacacatgtggtttgggcgccatcgcaatcttttcgcccaggttagataacatgtcagttttgctagctattcggccagccagagaggagggttcaagcttgcggacgaaggtgcaccgaggagagcgcagtcgagtggtggtaccgagcgcccgagcggtggtactgaagatttcaggcggagccggaggcggcaaggtggggctgccggtgttggacggcgcactcgctttcccgcaggccacaacggcgtcccagttcctatctgccggtgattttgttcatttaaatgagccgtaggagggtgatttcatagtgatctactccgatatcaagtccaacaaatatgtaatgttcccacaaaaaaaaacaaaaaaaatgtaatgttcatcctgctgtcccctattcctgtttgttgttcttgcatgctctgaactaaactcagttagctgtgattttgagtgtcaccacacaatcatggttaaaatcccagcacaactttatcttgatctggatgcagcaaggtaagtcatcatgataaataagttgtatttcttgccatattttatatttgtttaggtgtgttgccaggttttcaaggagacagaagatgagatttgttgactttgatgggttggagttatggaatcgagatggttgccaaaaaaatattcaggtgaatttttttttgttcaaaataagtttggttgcatggctaaattggaacctactgtatttgctatgccccctttaatgctttggaatttttaagagctctatattattgtctgttgattctgcatggaccataggtgtttatttcacttgtgttctattgctgcattaagtaatacttttgcgcaccgagttcagagaaagataggggaaatagaaataataaactctgaaaccggtttcctttaaagtagcatatttagtcaatattattgttttgatttttttaaaccatgttggcatatgaatgtgatgaataaccacctacagtagcatatgcagaacaagctactgtaactcaaggcattaagggtattaagtattgccagtggttgaataagaccattagattgaatatatttatgtctctactg

SEQ ID NO: 21426 - DNA, 1530 bp, Oryza sativa
  ref <308>: DATABASE ACCESSION NUMBER: AK071707
  ref <309>: DATABASE ENTRY DATE: 2001-12-06
tggcggtcgcggcggccaccatggcggcggcggcggcggactggacgagtctccccgacgacatcctattcttggtgatgcggaagctggggatccccgacctcctcaacgccggcgccgtctgctcgtcgtggcgctccacctacacctccctccgcctccccatcaccgacaagtcaccatgcctcctctactcctgtgacgccgacgccgatgacgatgacgtcgccacggtctacagccccagcagcggcgccaccttcaagctccgcctaccgtctcccgcgttccgccgccgctacatggtcggctccgaccacggctgggtcgccaccgccgacgagctctccaacctgcaggtgatcaacccgctatcaggcgtccagatcgatctcccgcccgtcacggagctctaccacgtcgagagcttcaccgatgatcgaggccgcctcatgtacagcaatcaggacaattggatgcgccgccatgatcctcagtggctacccgtgccgtatcatccacagagattacgccttttcttgtactaccgggtcaccctctcctgcagcccatccgccggaagcgagtgcatcgtcctcctcctgcacaggccggacggggagctctccttcgcccgcgtcggcgaccggagctggacacggctcaccggcatcgagaatctcccggaaacgggctacagatatgcattctacaacaagaatgacaggttgttctacctgttaaactgtctgggctcgatccatacgctaaatctgaatggaccttcttctccggtcgcaagcctgattttcaaagaaatcgcgctctgggataatcctaacaaatcgatcgccgtgacgccccgcggcgatatggtgcaggtctggaggtgtagggatccgcgttgggttgatacgcccgtacgcttccctccggaggattgtgatgatgtttatgatccatgtcaggagctgtacacggatgaaatactgctgttcaaggtcgatatcgatggtcggaaacttgtcaagatggattcactggaagattatgttcttttcatgggtttcaattccagtgtttgcctttcagctaaggattttccaaacttgaaggcaggttgtgcgtatcttgcggatgatgcttacgaagaaatatgtgtaaataaacatacttggcgggagctgggcatttggaacttcaagagtgagactcttgaaagctttggtgatccaccttatgtccttccttggcttaactggccacctccaatttggattactccctccatttattaatgagagagagttgagtaacagtgggagctcctatttggatacatttgatatgccctcgatcgactagtgggctagagctcaagagcttcaatttggataaattcaacctgtagtaatttgtcctgttgggacaaattctttctctactatagttaggtgctcttgtttgaataatacttttgtttgtactcctgtttaagtgacatcttaagttactttccttgaaggcttc

SEQ ID NO: 21427 - DNA, 1796 bp, Oryza sativa
  ref <308>: DATABASE ACCESSION NUMBER: AK071708
  ref <309>: DATABASE ENTRY DATE: 2001-12-06
gtgtctccggtccagagcgggaggcggccggcaatccgcgacctccacctcctcctcctcctcctctcgtcaccaccaccacggcgaccccgtcctcctcgcccctctaaaagcctctcccttcctttctctctccccttctcgtgggatcttgtattcttgcgtcgtcttgggactcttgtggtggtcaagaacgaggacgagagaggtcggagagcgaggcggcggctgtgccgttgcgcgtgcggtgcgggtgaggtagctagcgagcgagaggggagatggaggcggtggcggttgcgggcggtggcgcggggctgacaaggtggcaggcggcggcgctgtcggcggtggcggggtgggtgtgggcggcctcctccttcgacctcacgcggcggtcgcgcgcgctggtgcagccgtgggtcacccgccgcgtgctcgccgagacgccgtccatcgtcagattccagaaggtgcatcacaagttgctggacagtttcttctctgtgctgtcatgcgttgtctctgtccctttctacaccggattcctccctctcctcttctggagcggacactccaagctggctaggcagatgacgctgctcatggcattctgcgattaccttggcaattctgtgaaggacgcggtgtcggcccctcggccaagctctcctccggtgagaagagtgacagctactgaagacgagaaggaaaatgccatggaatatggattgccttcatcgcacgctcttaataccgtttgtttgatgggatatctgctgcattatgtcctaacatatggatcacacgacaatgttatggttgtcacgggcttatctctagctttcttgcttgttatgttagttggcattggacggatatatttgggcatgcacagcttgattgatgttattgctggcatctgttttggcgttgtaatcctggcattctggttggctgtccataatcatgtcgatgcttttgttgtctccggtcaaaatgttacaaccttctgggcgagcctttctctgttgctgtgcttcgcatatccaaaaccagaattcccaactcctagctttgaataccacacagcattcaatggggtggcttttggaattgtctatggaatccaacaaacctacttccatttccacaatcctgatgtccccctcattttcagcccacaattaccgcttattgtatttgtcgggagggttctcgtggggatcccaaccatcctagttgtgaaattctgcagtaaagctctctcgaaatggcttctaccggtgatgtgcaacaccctgggcattcctattgtatcaacctgctatgttccagcgctgaaggcttccgaaaagtgcaaggtcaagtccgacgcgaagcagggcggttatctccagaaggtgttctccctctttccacagaaggcgtacgatgtggacaccggcataaggttcgttcagtacgccagccttgcatggtcagtggtcgacctggtgccggccatattcactcatttaagtttgtagtgaacactgcaagatgcattctacttggagacttgcaaaatcccaaatgggctattcctactcatgagagagagataatcttatgggactgtaaatccgatgatctccactttatttttatttttgcgtggtgtgtgtagaggtgttttgtccatagtagcaaccaggaagtattaacatgctgtgaaattttgtttcatgatgaagacagcgaccaccacgaactctgaaacttaactgcaaagaaatgccattccttttcttgcg

SEQ ID NO: 21428 - DNA, 985 bp, Oryza sativa
  ref <308>: DATABASE ACCESSION NUMBER: AK071709
  ref <309>: DATABASE ENTRY DATE: 2001-12-06
ggctatcgcgttgagtcgagtctgagccaccgccggaggagaggaggggggccgagcggcggaggcgcgcaagggtttgggagccgccgccggcgaccttggccggagcgcaaaagactgaggaggcgtggtcggggcttgcctgctgccggcggccggcgaccggcgaccaacggccaggacagcttgtgcttatactgtcctgatggaaaccgacagaagccagcctgctccaattgacccaagaagagctcgctttccttgttgtatagtatggacaccattaccgttaatctcatggttgatcccctttatcggtcacattggcatctgcagagaagatggtgtaattttggattttgctgggcccaattttgtatcagttgataacttcgcgtttggagcagttgcacgatatattcaagtaaacagtgatgagtgctataagcttcttgaacctgaaggagcatcaacatgggatgacgcgctgaggaaaggcgtgcaggagttccagcacaggggctacagcctgttcacctgcaactgccactccttcgtcgtgaacaacctgaaccgtctgttctactccggccatgacaaatggaatgtggtcagcctcgctgctgtgatgttcttacggggtcgctgggtgagcacagcgtcggtggtgaagacttttttcccatttgcactggtgatcaccatcggcactctccttggcggcgcgacattcctgatcggcttgcttgctttcgctgcggtgatgactggctggttccttgtgggcacctactgcatcaagagccttgtagagttgtagctggagtagtatattggattgtacttggttttgggtctccttgtgatcaaagggtgcatacttctaatttttatagttgcttgtaaggtttatttttgactggagagatctatgaactggaatataatttgtagcttgatgaactggtcatcgatccagacggtt

SEQ ID NO: 21429 - DNA, 1793 bp, Oryza sativa
  ref <308>: DATABASE ACCESSION NUMBER: AK071710
  ref <309>: DATABASE ENTRY DATE: 2001-12-06
ggcgagtgaggcggcgagcggcgagctcctccggtgatccgaggctcgccggccggcgagagcttgcctgtttcgggaggttttcagggtgatctgagagcacagcgagccgatggcggcggcggcgaacggggcggcgtgctgcggtggcgcgacggggccagggtacgcgacgccgctggaggccatggagaagggcccgagggagaagctcctctacgtcacctgcgtctacaacggtactggaattaacaagccggattacctgggtacggtggacgtggaccccaattcccctacatactcccaagtgatccacaggctcccagtcacccatgtcggcgatgagctgcatcactctggatggaacgcttgcagttcttgccatggtgatccatcggctagcgccgtttcttgattctgccttcgttgctgtctggccgtgtgtatgtcgttgacacgctgaaggacccaagggcgcctgccttgcataaggtggtcgaggctgaggacattgctgagaagacagggcttggatttcctcatacatctcattgcctggcatctggggagataatgatttcttgccttggggataaggagggaaatgctgctggcaatggcttcctcctgctggattctgaattcaatgtcaaaggacgttgggaaaagccaggtcacagccccttgtttggctatgattattggtatcaacctcgtcacaagacaatgatcagttcatcatggggagcacctgcagctttcaggactggttttgatcttcagcatgtgcaggatggtctctatggaagacatctgcacgtgtatgactggcctggtggtgagctcaagcagacactagatttaggcagtacaggtcttcttccacttgaggtgaggtttttacatgatccatcaaaggatactgggtatgtgggctgtgctctgacaagcaacatggtcagatttttcaagactgcagatggatcatggagccatgaggttgctatatctataaaaccattgaaagtgcgcaactggattctgcctgaaatgccaggactgataactgattttgttatctctctggatgatcgctatctctacttggtcaactggcttcatggtgatatcaggcagtacaacatcgaggaccctgcgaagcctgtgttggctggacaagtatgggcaggaggccttcttcaaaagggcagtgaggttgtgtatgtaactgaggatgacaaagaagagcagtacagtgtgccccaggtcaagggtcatcgacttagaggtgggccacagatgattcagctgagcctggatgggaagaggatatatgtgaccaactctcttttcagccgatgggacgagcagttctatggccaagatcttgtcaagaagggctcccacatgttgcagatcgacgtcgacactgagaaaggaggactatcgatcaaccctaacttctttgtagattttggtgctgagccagagggtccctccttggcccatgagatgagatatcctggtggagattgcacctctgatatatggatataaagatcttgaaggatttgcatacactcaggtgttgattcatcctgtgtattcactgtaactaagactgtatgcttgctgtggtctatatgtaatttcgatggtaacaagtccccataatacctagaacattcactccatggctcatttggtaacattagcttaataaagagatgtatccaatggtgcactttctgctagtgtttggattttgagctatctgattaaatttctcc

SEQ ID NO: 21430 - DNA, 1453 bp, Oryza sativa
  ref <308>: DATABASE ACCESSION NUMBER: AK071711
  ref <309>: DATABASE ENTRY DATE: 2001-12-06
gagagcagcgggagggtcgctttggcggtgggggacgttggagaagagattgatgggcatgagcacggagagggggaagatgaggatgagaacggtgagattggagaggaagatgaggagagattggaggatgatagggtttatgaggagtaatgatgacgacgaggaggatgtggatgatgaggatgaagacacagaatatcttgttcaaccaattgctcaacctcaggccatggcggttggaaacgactttgatgcagctgaggctgatgatgctgatgaagatagagatgaggttgatgacgatgatgatggtggtacggacctgccctcgtcctcgcagggcgctaagcggaagagagatgatgatccatcaggcagtggagatgacgacgaggacgatgatggtgtcgaggacctgaggcccttcaagcaccactgaccaagcagcaatgtacatggatcccttcctccccctcttctcagctagaaagaaccaagcaagcagcagcaggagcatcagcaaacagaaatgtcagtgagaagaaggatgcggccgatgccaagaaggaagccaccgcggaggcgaagcccgcagcgaagccggccgcgaagccgaagaagcctccggtgaagccgctgccggagatgatgcaggaggagatcatccccccgctgaaggcagctctggaggctgaggacgacgtgtcccaagtggagctctccttcgaagataataggttggagggttccttcataaaggatgaagtgccttattacttctgggccttctttccaaatggagacctcacaggaccgaagggcttcgcgctgtcatcgtatagcacagaagtgagcaccatcgagccgttcctgatcgacgagaagagagcaaacgccaagtatgtggtgttctgggtttacaagaggctggctggccaagggatcctccctgtctggaaggaagaggagggtgagggtgagggggagggggagtcttcagcgtagccactcaaaaacacacacacatgggcacaggctgctctgaatatagtacattgtgcaattcctaattgtgaatgttgtaaagatgtaaagttcatctgctaatatatcacagataatcttgatgttcttttttggagcgaagatgatcatgacgtctgaaccttgcatctatctctttggtgccgtgtcaagtatcagtctatcagcagctgaaaaatggtctcttgctgagtctgcagggtagccactgaaaaaacacacacatgggcagtacaggttgctttgaatatagtacattgttcaaagcctaattggacagaattttataaagatgtaaagttcatctgctaatgtatcacagaaaatcttgatgttctttcaggagtggagataatcttgatgtctgaaccttgcaccattctcttctggtgccatgtcaaatacc

SEQ ID NO: 21431 - DNA, 1564 bp, Oryza sativa
  ref <308>: DATABASE ACCESSION NUMBER: AK071712
  ref <309>: DATABASE ENTRY DATE: 2001-12-06
gcctttgcctttggcacccggcgcgcgtcccgtctcccacgcccgcacccgcaccaccgcccaccaccaccacgccacggcagccgcaccgcaccgcaccgcaccaccatccttcctaggaaaaccccacccaccctcaccctccagttccaccgtcgtctccactctcgccctcctcacgtcacccccacccccaccaccaccactctcccacctcggccggcgccacctccccaccccagccctcgccgtcgtgcccaggcggcgggccctgatccgcgagcctccccggttgttgggggctgggggtgcatcgatccagttccgtatctagtggacccttctctgtcgaggtactaaaatgtcctttctattcaagtcaagcaatggtgctacaacagagaaaaacttgaccctagaagagcagcaggagaagataaatgacttgcgtaaggagcttggtgaacactcatcagaagaaatacaagatttcctttcagatgcctcgtgcctgagatttcttcgagcaagaaactggaacgtgcagaaagcaagtaaaatgatgaagtcagctgtaaagtggcgggtgtcatatatgccacaaaagattaactgggatgatgttgcacatgaagcagagacaggaaagatatatagggctgactacaaggacaaacatggaagaactgttcttgtcctgaggccaggcttagagaacactacttcaggaaagggacagatcaaatatcttgtttactgtctggagaaagcaattatgagcctgacggaagatcaagagaagatggtctggctgacagacttccagagttggacattggggagcacaccgctgaaagtgacccgagagactgtgaacgtcttgcaagactgttaccctgagaggcttgggttagcaatcctttacaatcctcctaggatatttgagtccttctggaagatagtgaagccatttttggaccatgagacctacaagaaggtgaaatttgtgtactccagcgataaagagagccagaagataatggctgacgtctttgacttggacaagctcgactcagcattcggaggaaggaatccagctaccttcgaatacaatagctatgctgagcgtatgagagccgatgacattaagatgggttcttcattcaaatcaaacggcatcaccctgcctcaggaccattcacatgtatccgctgacaaggaggctaatggtggcggttcggacgcctcaagtgaggcctccttctatagtggaactgattcccctcttcgtgcttagctgagttgaactgcttgcttgctccagtcatgggttgggaatatcggataggtcaatatatacagttagctaactaggatggaacgtttggaccatcggctgtgatgcattgacatcttcctgaaatataaatgagaaaattctgatggataaattcggtcggggcatttctttgctgctggcccggcggaaaaaaaattctgatggataccctgtggcattcctccataataaataatttgatgtgccgtgtacttgtatgcgtcc

SEQ ID NO: 21432 - DNA, 1055 bp, Oryza sativa
  ref <308>: DATABASE ACCESSION NUMBER: AK099190
  ref <309>: DATABASE ENTRY DATE: 2002-08-28
gatatcagattgatcgatcggtgatcggtctatgccgttgctgccgatgacgaagctggagctcggccaccgcggcgaggcgtgggagcccggctgcctccgcgccgtcgccggcgagctcctcttcaccttcctcttcgtcttcatcggcgtcgcctccaccatcaccgccgggaaggcggcgggtggggccggcgaggcggcggcggtgacggcggcggcgatggcgcaggcgctggtggtggcggtgctggcgacggcggggttccacgtctccggcggccacctcaacccggccgtgacgctctccctcgccgtcggcggccacatcacgctcttccgctcggcgctctacgtcgccgcccagctcgccggctcctccctcgcgtgcctcctcctccggtgcctcaccggcggcgccgccacgccggtgcacgcgctggccgacggggtgggccccgtccagggcgtggcggcggaggccgtgttcacgttcacgctgctgctggtgatctgcgccaccatcctcgacccgaggagggcggcgccgccggggacggggccgctgctgacggggctcctcgtcggcgccaacaccgtcgccggcggcgcgctcaccggcgcgtccatgaacccggcgaggtcgttcgggccggcgctggccaccggcgagtgggcccaccactgggtctactgggtcgggccgctggcaggtgggcccctcgcggtggtggcctacgaactcctgttcatggacgtggaggacgccggtggggcccaccagccgctgccgcaggagtgaagtgaagccggggaaggcgcgctcacgtgaggtccacgtggcttcgggagattgcacggccgtgtgcgtgcgttttcggccgttgattggtgtaatctccagatggaattatttttgtacgtttgatttttttttccattttgtttaaaaaaaatgggaggcgtgcgtgtaaatttggggtttttttttgtgtgtatgtgccggtacaagtgaggttttgctcgttgaaaatatgatgaataatacgtatttc

SEQ ID NO: 21433 - DNA, 1156 bp, Oryza sativa
  ref <308>: DATABASE ACCESSION NUMBER: AK071713
  ref <309>: DATABASE ENTRY DATE: 2001-12-06
gtcgtccccgatcccctcctcctctcctctcctctccactcctcgagatctcgcaaggtcagggagccagcaaattcacccgcgattccgcgcgccgccgccgtcgccgccgccgacgtcgccgcctgggtgggggaggagatggccggcctcgggaaggccttctacgcggtagggttctggatccgggagaccggccaggccctcgaccgcctcggctgccgcctccaggggaactactacttccacgagcagctctcaaggcatcgcacacttatgaacatctttgacaaaacccctcatgttcacagagatgcatttgttgccccaagtgcatctctcattggtgatattcaagttggacaaggagcttcaatttggtatggatgcgtcttaagaggggatgcaaacaacgttcaaattggatctgggaccaatatacaagacaattctcttgtccatgtggcaaaatctaatcttagtggaaaagtctttccaaccatcattggggataacgtcacagtaggtcatagtgctgtattacaaggatgtactgttgaggacgaagcatttgttggtatgggggcgaccctgttagatggtgttgtcgtggaaaagcatgggatggttgctgctggagcccttgtaagacagaacacaaggatcccctgtggagaggtatggggaggaaaccctgccaaattcctgaggaagctcactgatgacgagattacgtttatcaaagaatcagcttctaactattccactctggcaaaggcccatgctgctgagaatgccaagcctgttgaaaagactgaatttgagaagctgttccgcaagaagtctgctcaccaggatgaggaacacgattcaatgattggtgctactcgggaggttactccggagctgacgccctcgagttctgcccaataaaccttgtttctgtttttgcttctctctggtgcctttgcatcatcttatattggacagtgcaggattgttgaaggtgacactgttccatgagttcggcggtttatgtttactttcctccccaataattttgggtcgagcattgtgcaaaagctggccatgtacttcgttttctgtattccatatgtttaagatgcgctccatggaacaaagagaaccattacgc

SEQ ID NO: 21434 - DNA, 1312 bp, Oryza sativa
  ref <308>: DATABASE ACCESSION NUMBER: AK071714
  ref <309>: DATABASE ENTRY DATE: 2001-12-06
gatagtcatcaaaacagaataatgcgtggcgtcgccgcatccgcctgcacgctccgccctgggccacccggagccgtccgatcaaaatccaacggcccggatcgcctcagccacctccccacgcggcccctctcggctccccgcctccacctccggcgatcgccggagcccacccaccgccgcctccccctcatggcttcctccccctccgcggccgccacaggtagcggaggctccttccctgagatgaactcggtcgacgacttcgccgcggtcaccgcccctcgcggcggcggccgcgtatccgtcgtcggcttcggctccctcctctccgagcggagcgcgaggagcacgttcccggagctggaggggttccgggtggcggcgctgcgcgggttccgccgcgtcttcgcccactccgccccgatcttcttcgagcgcggcatcgccatcgaggccaccaaggagttctcaagcttaagtgtggagccatgtgagggtgaactgatcgttgtcactgtgtttgaaataaaggaggatgaggtcccagcgttcatcgagagggagcatgagtttaggtttcttgcggttgttccagaaggactggatggggtgccttatgcaaatccagcagttgtctgtgcacgctatagcgatgaagaatatttccaagtgagatgcaaaggaagcaaggaaatatattatcagcgctatggccgatacaacattgatagaatatggagagacgatattttaccctgtcgtgcttatcttagacattgtgtcctcgctgcgaaaaatcttggagaaccagcatacagcaacttcctagaccacacctatctgggtgaccggacaaccacaataagggaatacctggccactaccggagccggcatcatggaagaggagcctccagaatcgctaaaaagccgctatggcgggtagctagcgagctagctagctccacgaagacgactccgtcgactcccacagccaccatggatcgaacttccatccgcttcgctgtcgctcaaatctgacggttggtggtgttcctcacaattctgctaaataatccctgatgcttcagtgcataatactaccaaaattccaatttttcgggccacatagtgttcagactttcagaggaagattgtgattcatgaccctcttcatgggagagttgaatgattgatgtaccacaacaataacagtgactattttgtcaccaccaccaccaccacagaaattctggagccatatgatacatgcagaaaaaaaaaaatgaggacaaaatgcatcttttttt

SEQ ID NO: 21435 - DNA, 1460 bp, Oryza sativa
  ref <308>: DATABASE ACCESSION NUMBER: AK071715
  ref <309>: DATABASE ENTRY DATE: 2001-12-06
ggtgccgtccgtatcgttggctccgcctctcctagggttttagctcccctctcccctcccctcccctcccctcccgccgcctcctcctcctcacgcttcgcaatcccttccaccacctcgccgcggcggcgacgagcgggcggcgccggcggcgcaggcgcaggcgcgggggcggcggagatggaccggtaccagagggtggagcggccgcggccggagtcggccatcgaggagaacgagatccgcatcaccgcgcaggggctcatccgcaactacgtctcctacgccacgtccctcctccaggatcggaggattaaagagattgttctgaaggccatggggcaggcaatcagcaaatctgttgctgttgcagaaattatcaagaaaagagtccctgggctttatcaagataccaacatcagttctgtcagcatcactgatgtctgggaacctattgaagaaggccttgttccactagagatgactcgtcatgtttcgatgatttcaattaccttatctcccagagatctggacaagaactctcctgggtaccaaaccccagtttatgttgaacaaccccggcaacagccgcgcctccagcaggcgccaccaccaccacagcgccaagttcgtcaaccaccacctgattatgaagactcctatgtccggggtcgtggcagaggaagggggcgtggacgtggaaggggttggggtagaggaggttatggtggttatggtggatatggaaacaatcaaggtgggtacaaccaaggtggtgggtactatgataaccaaggtgggtatggtggctatgataatcagggaggatatggtggctatgataatcaagggggatatggtggtggtggatatggctacaaccaaggcagatatggaaactaccaagaaaatggtggatataaccgaggacggggtggcatgcgcgggaggggcaattggaattaccgtggcgggtacgaacgaggcagaggtggcggttttcctggtggaaggggatatggcggccgcgggcggggaagaatgggtggccgtggtggacgaggaaactgaagatccaagcagtgagcagatgggtgaggagaatccatgggctactggtgatatttaagtgcatgctttatttaaatatcagggaaaaaagttatctatttatgtgttgggagccctcatgtttggtttgttgttttccctgagcgcgaggtttggttgtgagcataatgcctttttcccaaaggtatcctgtagtctttcgatgatgttcgggtatcatcctgtagtcaatctttcagtgttggttatcagctgctggcgagttttgcttgtttctcaatggtcgatgaatgctgagcatgcctctatgttcatgcccgtcgtatttacctgatgttattaaattcatgcctctatgctgagcaatcccctatgttattaaattgttc

SEQ ID NO: 21436 - DNA, 1853 bp, Oryza sativa
  ref <308>: DATABASE ACCESSION NUMBER: AK071716
  ref <309>: DATABASE ENTRY DATE: 2001-12-06
gacggctataccaactttatcctcgccccctccacaccacccctctctcccctcccctctcaaacaccaccgccaccgccatggtcacgcccttcccctcctcctagcaccacctctccccttcccgcgctacgcgggacgaggaccagggatggctccccccaccgccgtctccgcctccaccgccggcctgatctggtccttgtcgccctcgctctcgctcgtcgtcaccacctcggtggcgcttctgctcgtgctcggcggtgtgtccgggatccgcgtcaacgtcatccggctcccgtcggcgtcgccgttcccggcgttccgggaggcgccggcgttcaggaatggcgacgggtgcccgccggcgagggggtcggcggcggcggagggggggcgggtggacgtggccatgacgctcgacgccaactacctgaggggcaccatggccgccgtgttctccatcctgcagcacacggcgtgcccggagagcgtcgcgttccacttcctcgccgcgcgctccgacccggacgccggcgacctcgccgccgccatccgcgccaccttcccctacctcggcgccgccgtcagcgtctaccgcttcgacccgtcgcgcgtccgcggccgcatctcccgctcggtgcgccgcgcgctcgaccagccgctcaactacgcgcgcgtctacctcgccgacacgctccccgccggcgtgcgccgcgtcctctacctcgactccgacgtcgtcgtcgtcgacgacgtgcggaagctctggtcggtggacctcgccgggcacgtggtggcggcgccggagtactgccacgccaacttcaccaagtacttcaccgacgcgttctggtcggacggcgagctcagcggcgccgcgttccgacgcggccgccgccggccgccgtgctacttcaacaccggcgtgatggtgatggacatggggcggtggcgtgacggcgggtacacgcggcgggtggaggagtggatggcggtgcagaagcggaggcggatctaccacctcggctcgctgccgccgttcctgctggtgctcgccggcgacatcaaggcggtggatcaccggtggaaccagcacgggctcggcggcgacaacgcggaggggaaatgccggagcctgcacccgggcccggtcagcctcctccattggagtggcaaggggaagccatggctgcgcctcgactcgcggaagccctgcgccgtcgactacctctgggcgccgtacgacctctacaaggccgccgtacccgcgctcgaggagtgagctagctagctagctcgccgccggcgagccgaggcggcggcgtgattgcattgcatgcattcgagggcagacatacgagagaagaggagagagggagagggagaggaggtgtgtacacgtacgtacgcacgtgcgtgcgtgcatgcatgcatgcatgtgtccatacgtgcaaaacacaaaaggggcaaaaaaaaaaaaaagttgtgacgtcatgcaaaacggcacaaataagattaattaggactggaagtggtgaagaaatacatgccaagaggatcaatggaaggaaggcgctccgtctcgtagaaaaactaatcctaattacgaatctaaatacatatgtatctaggtttataactaggattgacttttttttacagagtagtacatatgtggatgcatgtgccgatctctttttctttcttcctcttgttttgggttccttgaaaaattttctaccgttgaatttgattcatcatggtgacgatgatgtacataggtgttttgattggagtacgatgtgtaaaaaattagggtggtgagatcagaagtgggtggtgcactttgc

SEQ ID NO: 21437 - DNA, 3144 bp, Oryza sativa
  ref <308>: DATABASE ACCESSION NUMBER: AK071717
  ref <309>: DATABASE ENTRY DATE: 2001-12-06
ggccaagcaacgccatgtcgctccacagcctcaaagaaaccctccagtcttcctccttttcacagccccaatccgagtcccaaccccgatcacctcctcctctcctcgccaggaggcccccaaaaacgtccctctcgcagcagctcctccgccttgatgcctcctcctcctcttcctccttttccgtctcgccgccaccgccccctcgcacttccccgacctcggatgcggcggcggatgatgcgccgccgctgccagaggaggaggacgaggtcccctgcatccgcccccgcgcttcccttccgccagcggcctccctcgactcccgcgggccctacgaaccgcttgctctctcgccgcccggagagcgccccgtcgtccaggtaccctcctcgataaattgcaggctacttgtgcatcagagggatggtgtaagattcttatacaatctgtatagaaacaaccatggcggtgtgcttggagatgacatgggtttgggaaagactatccaaacaattgctttcttatcagctgttattggaaaagataatgaccacggtgatcaattagtggaaggaagaaagattgcccctatactcatcctctgccccacatcagtaattcgaaactgggaaaatgaatttgcagagtgggcaagatgttctgttgctgtctatcatggcccaaatcgtgacctggttcttcaaaaggttgaaactcaaagactagagatagttattaccagttttgacacttttaggattcatggcaagattttgtgtggcatctcgtgggaccttgtggttgttgatgaggcacaccggctgaagaatgaaaaatcaaagttatatacagcttgcttggaaattactactcgaaagcggtttggtctcacaggaaccataatgcaaaataaaataatggaattatttaatctgtttgactggattgtacctggttgcttgggggatcgagaacactttcgagtatattatgacgagcctttaaaacatggccagaggttcagtgctcctgagagatttgtacaagttgctgataagcgcaagaagcaccttgtttcagttcttagcaaatttctgttgagaagaacaaaggaagagaccattgggcatctcatgcttggaaaggaggataatattgttttctgcagaatgagtgacgttcaaaagcgcgtttacagaagaatgctgcaacagcctgacgtgcaaatccttataaacaaggatctcccatgtagctgtggaagtcctttgactcaggtggaatgctgcaagagaactgaaccacatggcattatctggtcttatcttcacagagacaatccagagggttgttctctgtgccccttctgtcttgttcttccttgccttgggaagcttcagcagatcagtaaccatctggagctgataaagccaaacctgaaagacgaaattgagaagcagaagaaagatgctgagcttgcagctgctgtctttgacacagatattgaattagttggtggaggtgctaaaagtgaaaacttcatgggtctcagtgatgcagaacattgtggaaagatgcgtgcgttggaaagactattgtcattatggactctgcagggtgacaaaattcttcttttcagctattcagtcaggatgcttgacatactagagaaatttcttatacggaagggttactgcttttctcgctttgatggaacgactcccatgaatgcacgccaattactaattgatgagttcaatagatgcccaagcaaacaggttttccttatatctacacgggcaggaaatttaggtgtcaacctggtcagtgctaatcgtgtggtgatttttgacccaagttggaaccctgcgcaagacttgcaagcgcaagacaggtcatttcgatttggacagaggcggcatgtcactgtatttcgcctacttggtgctggttcccttgaagagcttatttattctcgacaaatatataagcaacagctttccaatattgcggtctctggaaaaatagaaaaacgttactttgaaggagtgcaggatgacaaaaaatttcaaggtgagctctttgggatatgcaatctgtttcgcgacttgtctgataagcttttcaccagtgagatcattgaaatgcatggagaacatgggaagggtaatacagctgaaacaataggaattcgagaaatagttgatacaaatatatttggtacgcaagatcaaatgaaatcctcaatgacagcaatacataacgagaacaagaatttgtaccattgtggaatagtttatgctcaccgaaatgaagatgttgtaaacacgaggacaaatgaagcaagcaactgtgcagaagataaaactgtcccaaggcacttagaggagctgcaaagtaagaagaatgaaacaatgcatacaattaaggcaaaatcttactcactggtgcagaaaaagaaggaattcagccgaattgcatctttcatgggtatgaacgaccttgagtttagtaagtggttgctgtctgtctcgcctttgcaacgacatgaagtattggaccgctacaggaatgcaaagtaagccatagggagtatggataatgcttccctcatatagatagccctttcctgctccaccgatgttttccttctattctcctgttctgccccatccactctttctctggcttggcacaggctatcagaaggggaggaacatttcatgttcagatcatcttatttccttcttttctttttcttcatttattgcatttgtaaggtaagatcagacccatagtggtttgtcttttgggtttgacataaatcgctgtttctcctgctggttctctggatttgggcgcttgtatctttgttggtcggctgagtaaagcttttagagttaccacggagttctgagtgcatctcaaacagaaagaagctgtgctggttagtggttacaatgtacaaatgatacgagcatagcaggtcatgtatcatgcatgcaaataattcacccgttatccgacttttcccgagacataatattgtagctgatcgccagcggcacaccaaggtctggcgttgtggcaatgttgtaacagagagtgcaggctgttaatacatcccttgattatgcatct

SEQ ID NO: 21438 - DNA, 1395 bp, Oryza sativa
  ref <308>: DATABASE ACCESSION NUMBER: AK071718
  ref <309>: DATABASE ENTRY DATE: 2001-12-06
gattcctcctccgatctctcgctttcctttccccaccacagagccgcgcctccgacgcgatcaccctaaacttctcgatctcctcctcctacgccgccgccgccgccgccgacgacgacgacgacgatgacgtccgacgcgtcgccgcagcccatccagagcgccaagtcagccgtggagtccctcgccgccgtcctcggtgccgcgctcccgggcaccctcgcctcggccgacgaccccgcgaacgcgctcctccacgacgccggcgtcgcccgcgccgtggtggggcgcctccgcagggaagggtcgggcgccgggaacgacgggctctgccggtggctctacgacgcgttccagtcgaacctcccggagatccagctcgccgtgctccgcttcgtcccggccctcgccggcgtgtacatgtcccgcgccgtctcgaggaagccgctcgccgggttcgaggccgtgctcctggcgctgtacgcgcacgccgcggcgcagcggggctccggggaggccgagaccgtgtcgctgccgaacctggccaaccccagcgtgtaccacgacgcgaaggtgccgcccaagaccaaggccgccgagctcgacgtcgccgtgctctcccccgctctggagccccacggcaccatgcgcgccacgcgccgcgcccggattgtcggcgccgtgctggagctctaccacggcaagctcgccatcatgccgctctcctccaagatggaattctgcgagttctgcgtcgcctggaccgggaaccgcagcaagctggacgacaagccgcgcgtcgcggctgcctccgagcctgccgccgccgaggagaagttgcggagggtgccattgccatgggagctgttccagccggtgctgcggatcgtggcacactgcctgctgggcccgacgaactccgacgagctgaagacgcaggccacccgcgccgcggagtgcatgtactggagagccgcggagaccatggacgcgcgctcggtgctcgccaccaggagcctcgtccggctgtcccagatgacggaggagccgatccctgagccgtccttctccggcgccgtcgagacgaacatggcggagctggaggccatgagggctaacatccttagcaacaagaactgaactgaactgaacgcagttgaattagtcgtcaggattcaggaatttgatcagacactcacactgcaacacgaattacaagttaagttacaacgcacactgcaagcctgcaaaagttagcagtgttggcgcttttgttagtcaggtacctagcacaagtcttctctctaatgtgagaaattgagagattgatcagtagatggtgtacaggtctcttctctctgatgtgagaaaccgagagattgatcggtagatgtc

SEQ ID NO: 21439 - DNA, 3643 bp, Oryza sativa
  ref <308>: DATABASE ACCESSION NUMBER: AK071719
  ref <309>: DATABASE ENTRY DATE: 2001-12-06
gtgacacactgccccacacatccatcgccggattcgcctccgcctctcccttcctctcgtcggcggcagcaagcggcggcggcggcggagctccggattcgaggggaccaagcatcgcctgcagaggaatccgcctgaaggattggacttcgattccgggaggatccccgcccggatccgaattttggccgaccgggatccccgtctcctccgccgagatggggagcacctcgtcgatgctgacgcagtacgacatcgaggaggtccaggaccactgcgaccacgccttctcgcagcaggagatcgtgtcgctgtaccaccggttctgccagctcgaccggaatgggggcggattcgtctccgccgaggaattcatgaccgtccccgagttcgccgtgaaccctctctctcagaggcttctgaggatgctcgatgggctgaactttaaggagttcgtggcgttcttatcggcgtttagtccccgcgcaagcctgcagcaaaaaattgaatggtttatgacactgactgcaatgggaaggtggcatttgatgatatcttgagcatcttgcgggatctgtctggttcttttatgactgagcagcagaggcagaaagttttgatccatgttttagaagaagctggctatacaaaagattcaaattttactctgccagactttatgaagattcttgacaattctgatgtgaagatggaggttgaagttcctattgactaagtacttgtgtcattgttctgtgccccggcatgcttaattaacttttaccacccgtgcatcctatgacctttcaggtactgttaccctgtaaggtccccttcattttttcctaacatcttttcatattgaaaacgtctgtgatattatggcttattaatcctttctagtaccttccattatgagtgaaaaaaatgttctttgttctctcgcatcgaggatatctgcaaattggagcaggaacaatttgggcttgcttggatcattgtcaatccatgccttaccaaaatattggcatgctaaattttttttggtggagtatgattggttggtttgttgccaagttgtttgagctcatggttctcttgccattttttttttgatccccagaggcccagttcaaatgcacgtctagcttctccagctactaatcttctgcatggcaagtttagaggcagtaatccaaaaacaagccctttatctcgtcgtacaatgggcaatgcaacaatattcatttctctaggtcaatatggctaaccaaaggacatgctgctctggctttttatctgccatcctcatgtttgttggtattccaggcagactggtgaagagtaaataggtttgctcagctcagatgactccaaattcacatcccaaaaataaggaacaccttcctgtctttctccctctaaagttgaggtcatcaatgttttctcctattaatagacgctaagctgattacctgcacttctccctagcagggaggaaggaatggcagaaccattggagaattggatctttggctcatcgttggggggtttcaaatatcggttcaatagatgaatttaatagattctaaggcaaatagtaaaccatatactaatcagagcctttgagaaagatggcagaaactgaagatactcagttacaaaaagcaatattcgcacagtacattatgatgaagaagttattcatggagttggaagaggagagagaagcttcagcaacttctgcaagtgcagccttgtcaatgattcgaaagcttcagaaggagaaggaggagcagaggatggaagcatggcagtacaagaggatagctgaggaaaagattagccacagtgacaaagcactggagattctacaggaagtccttcaacagaaggaactggagaatttttatctgagaaaccaattgctggtgtataaacacaagctattggatgttggtattgatgagtgtgatattgcagacgagacgataactaacaatataccattatttgaaagcaaaaccgtggagaatctttgtcgtagcatcaaaaggaatttctctctgccaactttgcagatgaagaaactttttgccgaaaaggacaccgacagaaatgttgaatcaacaaagagcagattaggtggctttgtttgtaatttgagtgaagatgaattgaagcatatttctggaaatgctagtgacttcaaggctctagaggttcagaaaagcttgctgacagatggggatgccacagaagaacatggagaagaaccaaatcctccaagcagtgatctttctcaacaacctcatctcttggaagagtcaagttgttcctcctcgttgttgagtaatcatagagatacatccagtgaaagagcaatacaggttggggaaaatgcggaagatacacgacatggtgatcaactcaagcagtcacattcaggcattggaaaggaagaagtacaatcacatcccttggaagagtcatcaagttgttcctcgttctccacatcgagtaatcacagagatatatgcagtgaaagagaaatacaggttggaagaaacgcagaggatgcaccacatggtgatcaaaccaaagagtcacattcaggcattgaagcggaagaggttgcagttcatcctataagtgacatcgttgacacaatcaagattcaagaaagaagccaaggagtagaagaatcctcatgcactgcaaatgaaatcatcacaaaggagtcagaactttctcccaaggacgttccgaaagagcggcggcctcaggctctatccaagttatctgcaacaagaaaagttggctccatgaacaacctctacaggaatgtccatgtaatcaccgataagagttcgacgccacgaggaaagaattcaacgccacgagctggcactgagaggaccagatcaaggctgaagcgggtgcagagcgagaagatggttgagatgaatgacaccaggaaaaacaaggagcagatcataatgctcaaggaggtgtacgagcagcttaacatgatagaatcgcacatgaggccttcgacttcacaggagacccctcggaatgaccaatccttggaatctgtcttggaggcggctctgtccttctccttatagctagacccttgtggcctctactctaccatctgaacttctgaagcatatattcagaggccacctccagttttgaggcggccatctatcaggaacatctcttccatgaatacccaacaaggggaaatgcatagagtttttatatgcagtgtaaaactgcaaactcccatggtggcgttctttgagaagtctcatacacacactcatctatcaaggcctccttcgagcggaggattttcgaagaaattctgcaggaattgaactaattcctgtaaaattctgtgaagttttcgcgttcgggagtccaaatagaaagaaatctaggtgttgggtctgtgggctgtggcctgacgccccacttcggcaaccaggcatccgttgtagcaacgttcttttcacagtggcagcggccaatgcagccgttatgttacttgtgtgagaaagttttacggttctacagagacaattttttttaccttatcacactaaatatagttaatgccatttctctcttc

SEQ ID NO: 21440 - DNA, 1048 bp, Oryza sativa
  ref <308>: DATABASE ACCESSION NUMBER: AK071720
  ref <309>: DATABASE ENTRY DATE: 2001-12-06
gccggggaaaagaaaaggaaaaatccgccggcggcggcggcggcctccgcctccgccttgaagacctgaccagccgccggccagcatctccatccgccctgccctgcggcttacaccgatttctataccacagaagattgctacgccagcttccagaataaccatcatgggtgaaccattaagaactcttcaaaatgatcaatcagaagctaaggataaggggaacaagatagatattaagtacgagctgacttctgcaatactgagtctaaagcatcaacaagcatctggcaggttgaagatgccttcaagactgccagcaagatatccccataatgtgggacattgtgcagagcttatcatgaatttgggcattggagaagatgttcattgcttaaatgtaatgagatcgtgtaaccatgagaacatattacatcctggaattattaaggaagttatcattggtgacagctcctttaatgtggcctggatggagcgttacactcgtgtgttatcagaatatgtgcaattgctcctgtcaacagctcggtttcatgcccccgttggtgcaactctcttacttccgtcaccccatctccagatggttttgagaggaatatttgacgggatggaacagctgtttctcaacgggtattatcatgggaacttttctctagagaacacatattgtttccttgaatgttctactccagtcgtgaagctcacaaattttagaaagaaagttccagagcaagctatgacctggggtgtggaggaggtgcggagtgatcgatatttgtccataagctgcattgagtgcgaaatttgttcttttgttgcatgttctttggaccaggttgttgggtcttctctcttttgtgtttgagttatataaaagccgatagctttacgatggtggtgtacaaaattctgtgtcgggcacatttaatagtatttaggagaccgtggcacaaatgcctttggcaactctgcgttgtaaggtagataggtgtagatataaaatacattctcaccaaattttaaatcc

SEQ ID NO: 21441 - DNA, 2410 bp, Oryza sativa
  ref <308>: DATABASE ACCESSION NUMBER: AK071721
  ref <309>: DATABASE ENTRY DATE: 2001-12-06
gacccgctctctcctctcatctcctcctcctgtgttcgtgttcttcttcttcttgtagcagcgcttaaccaacccatcattagcgaccaaacctctctccctctccccctctgactaatcaaaattaaacaatttcgatctccaccttcctcttcttgattccagttccaccagagagagacagggtcttctctaatccatgtggtgcttgttggtctcgcttgcttcgtcttcgtcttcgtcttcctcttctcgcacctagtcccgcctcgtcgcctcctccggagaccggagccggacgggacggttgccggcgagcggcggtcgctttcttctctcggccctactcacgttattttcagtgactcttcttccaaaccaagtggtaaagccaggattctaccattacaatgacgatctgcagctgtgaggagacgatcaatgagtttgagatgttaacgcgtgatgctgcgcgtgtgcagaaggatacactgaaaaagatccttgagataaatgctagtgctgagtacctgcagaactttgggcttggggggaggactgatgccgagagctacaaatcctgcatcccattgtgtgtgcacaatgatattgagccctatatccagcggattgttgatggcgatacctcaccagtggtcactggagaacccatcaccaacctctctctcagttccggtacaacacacggaaagcccaagttcattccattcaatgatgaattacttgagaccacacttcaaatataccgtacatcttacgcgtttaggaaccgtgaataccctattggccaaggaaaagcactgcagtttgtttatggtagcaagcaagtcataacgaaaggtggcattcttgcaacaactgcgacaacaaacttgtataggagacagcgctataaggaaggcatgaaggatatccagtcgcagtgttgcagtcctgatgaagttatctttggccctgatttccaccaatccttgtactgtcacttgctgtgtgggttaatatactcagaggaggtccattcagtgttctcaacatttgctcacagcctagtccatgcattccaaacattcgaggaggtttgggaagatctatgcactgatataagagacggtgttctctcaaagaaagttacagcaccatcaattcgtgaggctgtttcaaaaatcctgaagcccaatcctgaacttgctgactcaatatacaagaagtgtattggtttgagcaattggtatggagtgatcccagcactgtggccaaatgcaaagtatgtgtatggtatcatgacaggatccatggagccatatctgaaaaaattaaggcattacgcagggaacttgccacttataagtgctgactatggcgcatcggaaggatgggttggctctaacatagaccctactgtgccaccagagcaggtgacatatgctgttctcccacaagttggttattttgagttcattcctttggagaaaccaataggggaggagacagaaaactccgcctccattcattacatagaatcagatccagttggcttgactgaagttgaggtcggcaaaatctatgaagttgtaataactaactttgcaggtctatatcggtacaggctaggagatgtcgtgaagatagcacgcttccacaactccacacctgagctccaattcatctgtcgcagaagcctagtgctgagcatcaacatcgacaagaacaccgagaaagacctccagttggctgttgaggaggcatcaaagttcctggaaggagagaagctcgaagtcatggatttcacgagcttcgtggaacgatcaagcgatccagggcgctacgtgatcttctgggagctgagtggcgatgcgagtgatgaggtcttgagcagctgcgcaaatgccttggatctagccttcattgacgcaggctacacgggctcgaggaagatcaagacgatcggcccccttgagctccggatcctcagaaagggaaccttcaaggagatcctagatcatttcctaagccttggtggtgcggtgagccagttcaagacaccaaggtttgtgaacccatcaaacagcaaggtgttgcagatactgagtagaaatgtcacccaaagttatttcagtactgcctatggattttgatacaaagaaacatattagatgctagcagctgcatgtaattacctttttacctcttgtttttcagctttactgtagtctccaccggaagaaaacgtttggtttagtctcttgaataatctattttcttatcctgtttgtgactatctagaatctatgtaaatggcccagctctagtgaaagttatggtgatgttatcaggaaagaaaatgtggtgtttcccgtaacaagtgctgcaaagtattattcagactccc

SEQ ID NO: 21442 - DNA, 2357 bp, Oryza sativa
  ref <308>: DATABASE ACCESSION NUMBER: AK071722
  ref <309>: DATABASE ENTRY DATE: 2001-12-06
gatattccggcatttcaaccccacccactccgcacccccgcaagtcaactctcttccttcctcctccgtgcttaatgctctccgcattataaccacccacctctcctcctccccccacctcctctctctctatctccatctccaccgctacgcttcccagccatgggcaactccctcgcctgcttctgctgcggcggcggcgccggcggccgaggcggccgccacgtcgtccccgccgcgctcccctccgacccggcctacgacgagggcctgggccactcgttctgctacgtccgccccgacaagttcgtggttcccttctccgcggatgatttggtggctgacgcgaaggcggccgcggcggcggagggggaggcgaccacgttccgggcgatatccggggcggcgctcagtgccaacgtatccacgccgctgtccacgtccgtgctgctgctgatgccggaggagtcgtcggcgtccgccaccgcgtcgtcggggtttgagagctcggagtcgttcgctgctgtgccgctgcagccggtgccgaggttctcgtccgggccgatctccgcgcccttctccggcgggttcatgtcggggcccttggagagggggttccaatctgggccactcgacgccgcgctcctctcgggccctctccctggcaccgccacctccggtcgtatgggtggcgccgtccctgcgctccgccggagcctctcccacggtggccgccgcctccgcaatttcacccgcgcgctcctcgcgcgcaccgagaagtttcaggattctgcggatctaggctcgccggacgccgccgccgccgccgtcgccgcctgtgggggcgatccctgtggtctgcagtgggcgcaggggaaagccggcgaggaccgcgtccacgtcgtcgtgtcggaggagcgaggctgggtgttcgtcggcatctacgatgggttcaacggccccgacgccaccgacttcctggtatccaacctctacgccgccgtccaccgcgagctccgcggcctcctctgggatcagcgggagcagaacgtgcagcacgaccagcgccccgaccaacccggctcagccccaagcaccacggcctcagataaccaagaccagtggggtcgccgccgccgcacccgccgctcaagaccgccgcgtggcgccgacgacgaccagcggcggtggaagtgcgagtgggagcaggagcgggattgctccaacctgaagccaccaacgcagcagcgtcttcgttgcaacagcgagaacgaccacgtcgccgtgctcaaggcgctgacccgtgcgctgcacaggaccgaggaggcttacctggacatcgccgacaagatggtcggcgagttcactgagcttgcgctcatgggctcttgtgttcttgccatgctcatgaaaggagaggacatgtacatcatgaatgttggcgatagccgggctgtgttggcaacaatggacagcgtcgatctcgagcagatcagccagggttcattcgatggatcagtcggggattgcccgccatgcttgtcggccgtgcagctcacgtcggatcacagcacttcagtggaagaggaagtaatcagaatacgaaacgagcatcctgatgatccatctgccatctccaaggatcgcgtgaagggctcgctgaaggtgaccagagcatttggtgctgggtttttgaaacagcccaagtggaatgatgcactcctggagatgttcagaattgattacgttgggtcctccccatacatatcatgcaatccatccctttttcatcataagctcagcacaagggatagattcttgatattatcttcagatggactttaccagtatttcaccaacgaggaggcagttgctcaggtcgaaatgttcatcgcaacaacccctgaaggcgaccctgcccaacatcttgtggaggaagttcttttccgtgctgccaacaaagcaggaatggactttcatgaactgatcgagataccacatggtgatcgtcggcgataccatgacgatgtatctgtcatcgtcatctctttggagggcaggatttggagatcctgcgtgtaaatagaaacaatagtaggctagtgaaacaaaacgtatagagggggttcttcccatgccttccttgagctgagaggtgttcttgcggctactctactcctcttcccccagttgctactgtacaatatcaaccaagcactgtggggggttggattcggcttgggctctcggcacatccagctgaatcgccatgaatcgcccgcagggctggccgcgtggtataatatgttgatgtaaatgaggatttgttcaattattaataatttataaaatcgacc

SEQ ID NO: 21443 - DNA, 754 bp, Oryza sativa
  ref <308>: DATABASE ACCESSION NUMBER: AK071723
  ref <309>: DATABASE ENTRY DATE: 2001-12-06
gtctccggctgactccgacaatatgtgcggtgttgatcagcgcgccggcagggaggacaggggaaggaccatgatcctgcagaacaacgggtacgacgcgtcgggctcgttcatggtctactcccagatcgacagcgagctgatgaacaccatggtcctgagccccagcgacctgccgcccgggcggggcgggccgtccctctaccccaccggcttctcccttctccctgacgtcgaggctgcccaggacagcagcggcatcgccctcggcgaggttgggggaactctcatgaccatgggcttccagattccggtgaagctcgccagtggggatcgcatgtattcccggtctgcggcatcggcaatcaggctcatgactgacaccattgccctcgtcaagaagacgctgatgaacgagcattctggtatctacggggttagcccgttccacccctagattcagaaaaacaccagagggagaaaagggaggtccgtgtgcagataaaaatcaagaacatgcgaaggggattcatcggctccgatcaccctgcatctcccagaatttgctgaattaattagaactttaaggttgtgttaacaacctgtaataatgtttttaaggccaaacttatatcgtgtctttgctgtaataatgtagtatgcgcctgatggatgtcgactgccgtgtaccgatgcagtttgcttcgcagagacgcggatacatttgctatcgtatggatgctcctttagaacc

SEQ ID NO: 21444 - DNA, 1282 bp, Oryza sativa
  ref <308>: DATABASE ACCESSION NUMBER: AK071724
  ref <309>: DATABASE ENTRY DATE: 2001-12-06
gaatctcacaaaccctagcccccatgtcatcgccgccgccgccgccgccgacggaaatggcggagggcgaggtcgagagccgcgactgggcggagatgccgtcggacgcgctcgcggcggtgttcgggaagctggacgtgaccgacctcctggtcggggccggggtggtgtgccgcgcgtggcgccggctcgcggcgatcgaccccacgctgtggcgccgcgtggatatgagccaccagggagacatcatggaggtcgacgaggcggtggccatggcgcgcgccgcggtggaccgagccgccggcaccatggaagctttctgggccgactccttcgtcaccgatggcctcctcctctacatctccgagagagcctcctcattgaagagccttcaactcagcatgtgccttaatgtcagtaatgaagggatggcagaggcaatgaagggctttcctcggcttgaggagctggatattacattctgttctttgtatggtgatgtgtgtgcatccgttggcaaagcttgcccagagctcaaatgcttcaggctgaacgaacgttatactttacaaatggattatgcagcccctgatatcatggatgatgacactgaagcattagggattgcaagcaatatgcccaagctcagagagcttcagctgattggcaacaagctaactaatgatgggctgatgtcaatccttgaccactgccagcaccttgaatccctggacatacgccagtgctacagcattcaaatggatgatgctctgaaatcaaagtgttctagaataagtgatcttaagcttcctcatgactcgatctctgatttcaagtaccgggcttacattttcagcagcagtgccttttctggttctgatttagagcttgatatgtatgatgatctgctggatgtggtcactgatgatgatgatgctgactttgatgatatggatgattatgatgatgggggctcagatggtggcatgtacgatgaatttgatatctgatgagaattacactgtgcatgtgaaaatcgagagctagaacagtttggtgcttctgtgtgttgagaatatggaattaggtcttcatatcagcggcaatgtttatcacttagctacagcagatctgctggtgtttatattcagtgttcttttctggcctcattttccaagaatctgtaattgattatatgttgactttgctacgagtagtagttttgcagacatgttctgagtaggatgcttgcaaatgtgataatattgcattcctgagaagc

SEQ ID NO: 21445 - DNA, 1923 bp, Oryza sativa
  ref <308>: DATABASE ACCESSION NUMBER: AK071725
  ref <309>: DATABASE ENTRY DATE: 2001-12-06
gcatggcctcccgccctctccgcctcctctaccctatcctctccctccacaccccactccgaccaccaccaccacctcgcccgcggtaacgccgccgccgtcgctcgccgcggtaaaaccagcgcgcgcgagagagtgggtgtccgtgtggcctactacttgcttcctcggcgcgcgcggcgcgtgtgtgcctcgcatcctccaccaccactagtgcagccaagtgcgtgcgtgtgtgtgtgtgcggacaccgttgctgccgccgccgccgccgccgcgcgcagggtggtgacaagatgacggcgacgccagcggtgatcgggctgagcgcggggaacaggctgctgagcgcgtcgttcgggccgaccgacctgatgcccgacgccgtcgcccgcctcgcgcgccgcccacgcccatgacctcgagtcctccctcgaggccatcgtgctgctgcagaggtccatgctcgagaagcagtgggagctccccttcgacgacgacaaccacgccatggccatcggcttggccgaggatgacgacgacaccagcaaggccaccgtcgtcgtggcgcggtccagtgtctcggcgcggcagaggaggatgagcgggcggcggcgggggaggaccaagaacggcgcggcgcacttcgccgtcagccccgagctgatccagagcaggaacaggatctacctcaggggcaccgtcagcaaggagctcctcacgcacaagcaggtcgtccacctctcccacaagatcaaggatggcatctggctgcagcagcaaagatcaaagctgaaagagaagctgggaaatgagccctcatacaaacagctggcgcattcgctgaagatatcaccgcccgagctacgatcaaggatgcacgagtcgtttcttgcaagggagatgctaacaatgagcaacctccgtttggtcatttccattgcccagaagtatgataaccttggtgttgagttggctgacctcattcagggtggtctgatagggttactccgtgggatcgaaaaatttgatgcatccaggggctttagaatttccacttatgtatactggtggatacgccagggtgtttcaagagcattagctgaaaactcaaaaacattcaggcttccaacttatctgcacgagcggctgattgcgattcgtggtgcaaagtatgagttggaagatcaaggaattgctccaacaatagaaaacatagcagggtcactcaacatatcagaaaagaaagtactcaatgctacagaggctgtgaacaaggttctttcgttggatcaacaagcatttccatccttaaacggcttacctggagagacactgcacagttacatagaggatcaaaatgtcgcaaatgatccatggcatggatttgaggagtggtatctcaaggaggaagtcaacaagcttttaaactcaactctcaacgagcgtgagagggacattatccggttatatcatggcataggaaaacaatgccatacatgggaggatattagcagacaattcgggttgtcgagggagagggtgaggcaagtaggactcatcgcaatggagaagctgaagcatgctgcgaggaggaaaaatttggaggcattgcttgaggattattgagttgaggggctttttgtttgagtcagatccacaaacacagcggttgtatatactcagaaaacatagggtacatccttcaaaaggcgtactgccactcacatgaaagtaattatacgtgtacattttgtgacattagggagatgcatgatcaaaatctctatgcctgtgttatgaccaaggcaatcaggaaacagagagatgatgtttttccttcaaggtttacaattattctgtaatatatatgtaagtatgatttagcttgatcaatagagcaacacttaaaagttctgagcc

SEQ ID NO: 21446 - DNA, 1295 bp, Oryza sativa
  ref <308>: DATABASE ACCESSION NUMBER: AK071726
  ref <309>: DATABASE ENTRY DATE: 2001-12-06
ggcttgtacctatcctccaccaccaccagcagcgagtcatggcggccatggcgatggtgtccgtgcaactcacagtcgcggcgaggcccctgcgctcccgccgcgcgctctccgtcttcacctgcgccgcacccccgaggcagcggcctcctccaggcccaaccaagcaccgccgcctccgccacgacgccgacgcgcagcctcccaggaagcgaggtcatcctcctcctcctcctcccaggcgcacccgcacccggggccctcccgctcgcccccaacaatcctacactgacgacgacgaggaagaggacgaccaagacgaggaggaggggagcttcggtgggggcacccgggctgccgccatgcccaagccgccagcgggcttcgtgctggacgaccagggaaggtgcatcgccgccgcctccaagcgcatcgtcaccatcattgatgacaccaacaaccggcccttggagtgcatcatcaggagggtgttccgaagcacgctagaccacgactgcatgctcctttgcccagttgacatgcctgtgcaggtccttaagagtgccaatttcagtggctggattgctgttgatgatgaccagattaaggaaatcattccatccgttgcatatgccctcgctagagtgcatatgcactttgtagagagtggattttgttatacagcacggggtggcttttgctttcctgaagacgcgattcaagaatttcatgattctggtgacggcggtgatagtgtaccttttgaaggtgtagagatttgttgtttcaatttggatggcgcacattatatgatttatacaccagttgatcctcttctgttcgttgcagtgaaggataaagatggcgtgctacgcattgctgaagatgaactcatggacgaccctgctgttgtcggtgccatagacgaagagacagaattcacagctttggtggaggaggaagaggcccttcttgaatcggtgctgggtgaaagatgaccatgccgcggcctgtattgatggtcgatcagaggcggagactgcaatggtgggcgtccatcgatcatcattcccacccaccaattaagtagcagaagcaagctccccgcaaaaaaaaaaaaaaaaaaaaaaaaaagaaggtagcagaagcaagctaagatagactgcgagaagatttgtactacaaccaacaatagggatatatatagaatggagcactgtgatgttagatgtgcaaagtagcttgaactagggactcatattaagctgcttctctccgatgaagcttgcaaactc

SEQ ID NO: 21447 - DNA, 1445 bp, Oryza sativa
  ref <308>: DATABASE ACCESSION NUMBER: AK071727
  ref <309>: DATABASE ENTRY DATE: 2001-12-06
gtggaggaggaggaacgggagcaatccttggagagagtaccatagcgctctccccctccttcctcgtatcggtccgttcgtgaggagagcgccgccgctcgccagattgggcatgtcggccttgtaccttgctcgcggtgcttccaaggtggtcaggagaatcacctcggagacgtcggtcgagctcaagattctcactgagaaatggcaactcctactcgcgggcctcgtcttccagtacattcatggtttggctgctcgtggggtccattatctgcaccggccagggcctaccctccaagatcttggattcatgattcttcccgagcttgggaaagaaaggggctacatcagtgagacgctgtttactttcatcttcctctcctttgttctgtggacatttcatcctttcatccttcaaaccaagcgcttctacactgttcttatttggcgtagagttcttgccttcttatgtgcttctcaattcttacggatagtcacattctattccacacaacttccagggcccaactatcattgccgtgagggctcagctcttgccagattaccacatcctcaaaatgtagcagaggtgcttctcattaatttcccaagaggagtaatttacgggtgcggtgacttgatattttcatcccacatgattttcactatagtcttcgttgtaacataccagaaatatggaaatataaggtttataaagatgcttgcatggtgcatagctattgctcagagtcttcttatcatagcctctcgcaagcattacagtgttgatgttgttgttgcatggtatacggtaaacttggttgttttctttgtggacaagaagcttacagaacttcctgaccgatcagctggatcaacatctgtactacctgtgagcataaaggagaaagacagcaagttgaaagaggataagactagaatgttgaatggtaactctgttgattctgctgattggagaccatggacacaaatgaatgggaagcacattgagaatgggaaccatcttgataccgaaacaacaaaaacatgatgttttatgctgttggatcaatgtttgctattgtaatgctttatcccaaaggtctagggagtatacgtcgaatggcatctaaaatctttcatacctagaaatgtgatggcttcagtcctatagttcagaaggaagaggaattggtgccctgtgaattggttctatcctgtagaagtttttttttcctacgcattatctcactgttttttgatagcatcagccctttctctttttcttttttggttccctaatctttcaacatgtaattagattatgcattatagaaaatgtctattgttttgaattcattcagattctttgccaagtgtaattacctggaaaagcttaccctggccccctgaaattggaagtcccattaaccttttgattt

SEQ ID NO: 21448 - DNA, 2119 bp, Oryza sativa
  ref <308>: DATABASE ACCESSION NUMBER: AK071728
  ref <309>: DATABASE ENTRY DATE: 2001-12-06
ggcttgcattgcctccatcctagctaggtagctatatcgtcgtcattaattggagctagctagggaggcagcaggcagagcgcaggggggcggccgggcggcgagggaaccatgagcaaaggtgctatcatcggcgcttccaccgtgctggtggtggcggtggtggcagccgtgtgcgtggtgtcgttcaagaacggcggcggcggcaaggaggatggcgagctgtccacgtcggtgaagtcggtgaaggccttctgccagccgacggactaccagcagacgtgcgaggaggagctggggaaggccgccggcaatggcgccagctcgccgacggacctggccaaggccatgttcgccgtgacgtcggagaagatctccaaggccatcagcgagtcgtcgacgctggaggagctcaagaacgacaagcgcacgtcgggcgccctgcagaactgcaaggagctgctggagtatgccgtggacgacctcaagacgtcgttcgagaagctcggggggttcgagatgaccaacttccacaaggccgtggacgacctccgcacctggctcagcgccgccctcacctaccagggcacctgcctcgacggcttcctcaacaccaccaccgacgccgccgacaagatgaaaagcgccctcaacagctcgcaggagctcacggaggacatcctcgccgtcgtcgaccagttctccgccacgctcggcagcctcaacatcggccgccgccgcctgctcgccgacgacggcatgccggtgtggatgtcggagggcgggaggcggcagctgctggaggcggcggggcccgaggccgggcccgtggagttcaagccggacgtgacggtggcggcggacgggagcggcgacgtgaagacgatcggcgaggcggtggcgaaggtgcccccgaagaacaaggagcggtacaccatctacgtgaaggccgggacgtacaatgagtacgtgtcggtggggcggccggcgacgaacgtgaacatgataggcgacggcatcgggaagaccatcatcacggggaacaagaacttcaagatgaacctgacgaccaaggacacggcgacgatggaggcgatcgggaacggcttcttcatgagggggatcacggtggagaacacggcggggccggagaaccaccaggcggtggctctccgcgcgcagagcgacatggcggtgttctaccagtgcgagttcgacgggtaccaggacacgctgtacccgcacgcgcagcgccagttcttccgcgactgcacagtgtcggggacaatcgacttcatattcgggaactcgcaggttgttcttcagaactgcttgctccagcctcgtaagccgatggacaaccaggtgaacatcataacggcgcaggggcggcgggagaagaggtcggcgggagggacggtgatccacaactgcacggtggcgccgcacccggacctggagaagttcacggacaaggtgaagacgtacctggcgcggccgtggaaggagtactcgcggaccatcttcgtgcagaacgagatcggggcggtggtggatccggtggggtggctggagtggaacggcaacttcgccctggacaccctctactacgcggaggttgacaaccatggccccggcgccgacatgagcaagcgcgccaagtggaagggcgtccagtccctcacctaccaggacgtccagaaggagttcaccgtggaggccttcatccagggccaggagttcatccccaagttcggcgtcccttacatccccggccttctcccccagacgcagcagggcaggatgcactaatttttcactcctgtactataaccatcatcgccccagcccccagcccggacctacgtactacacactatatatggatcttcgatctctcactcacctgcatcaattgccggcccccattatttattttcatatacatatacttgttgttatatatatatatgcatctcacacattccaactgcagtcgccgcggttgattaactaaattagtagctcgatcatggaacatgcatatgcatggatctcgattgttttgggactggatccaaaatgtatataatgtatattcaatctctttgttactttc

SEQ ID NO: 21449 - DNA, 754 bp, Oryza sativa
  ref <308>: DATABASE ACCESSION NUMBER: AK071729
  ref <309>: DATABASE ENTRY DATE: 2001-12-06
gatctcaacatttcacaaatcaatccaaaaggcttacaagagaagcaaccatccggaagaagatggccatggcgacgtcctccgcatccaccgtctccttctccgcccgcccgtccgccgcgagcgcggtccggccgtgcgccgccgcggggagggcgagggcgcgggcggcggcgggggagagcggcaagtggtgggcgccgctgctggggtggtcggggaaggccgactacatcgaggccccggcgccggcggtggtggcggcggcggaggagagcgaggcgcggaggcggccgttcgtgggcgggttgacggaggagaaggcgcgggagctgcgcgcaaggatggtggagacggagagcttccacgacgccatgtaccactccgccatcgcctcccgcctcgcccgctccgcctaggcgcgccgctgccgccgccaccggaggagggagatggagcccacagctcgcgacgtcgccgcgatggcgtgtatataaaatccggggtgggattcgtctcgttgcggaggaaatttagaagaatttagaagggatctggtttttaggattgatcccttgcttccatccatctctgcttttttttttcttgcgttttctcccgaattgtaatctcgagatgaaatgtaatctggatctgagatagatctactcgcttgtggcgaagtatgatgcatcagatccattaggtttgttgtactgctcatttccaatcgattggatccaattctgatccc

SEQ ID NO: 21450 - DNA, 969 bp, Oryza sativa
  ref <308>: DATABASE ACCESSION NUMBER: AK071730
  ref <309>: DATABASE ENTRY DATE: 2001-12-06
gagacgaaacacgccaaggaagaaaaaaaaatgggcgtccagcatctgctcaagctgaggatggcgtcgccccacccgcacccgcaccccggcgcgccgctcgccgcgcgcccgctctccgcgctcgcctccttcttcctcgcccggccctcctccaccgccgccgcgcctcctcctcggcacgtcaccctctcgtgctcgcggccgcactgcaaccacaaccagtgggccgccagccggtgccgcgggacggcgggccggcggcggctgcaggtcgtcgtggcgatgtcctcgtcggcgccgccgccgcctccgggatccgtgcagaagtcggaggaggagtgggaggccatcctctcgccggagcagttccgcatcctccgcctcaagggcacggagtatcctggaacaggtgaatatgacaagctcttcgctgagggtgtttatgaatgtgctggatgcgggactccattgtacaagtcatctactaaattcaactcaggttgtggttggccagcattctatgaaggatttcccggagccatcgcacgaacgcctgatcctgatggcaggcgaatagagatcacctgtgcggcttgcggaggacatttaggacatgtcttcaaaggggaggggttcaacacgcctacagatgagcggcattgtgttaacagtatctcactcaagttcattccagcctcagaagatagtaagctttgagcatggaagtataagcccgcaatagaacagtctgcgcagtcatagtaaacctgtgattattaaaaaagtatcggatttttcagaaagcaatttatactctgcggtttgtcaataatgcgaaataccaagtctgatgattgtcgaaaacttttggctgtaacctatttacacttccagttctacttttttctgataaccagagaagttcatatccgtacataattgaacacggaagaaactatccgatgg

SEQ ID NO: 21451 - DNA, 1423 bp, Oryza sativa
  ref <308>: DATABASE ACCESSION NUMBER: AK071731
  ref <309>: DATABASE ENTRY DATE: 2001-12-06
gaggaaggaaagaagcctaagcccatcggaaatctctcctcctcccagcaaagaggaggtggtggagatctcccaatccgcgggaatcactcgctgttcaccccgattcggcctccgctcgagctctgaatctcgggagctcctgatctggaggatgccaaatgtatgaaccaaagcccttctcaagcattgtactagctcacaacgatccagtttcccacaatcaacaaattgaacgtattaacaacaatgtagtatctaatagtggtgggaacagctcaaacagcaactttgccgccagacagcgcttacggtggactgatgacctccatgatcgttttgtggatgctgtaacacagcttggtggacccgacagggcaactccgaagggaattcttagaataatgggtgttcaagggttgaccatctatcatgtcaaaagccatctgcaaaaatatcggcttgctaaatacattccagatcccacagctgatggtgccaagtctgacaagaaagatctcggagatttgcttgctgacattgaaagctcctcgggaatggaaataggggaggctttaaagttgcagatggaggtgcaaaagcggctacatgaacaattagaggtgcaaaggcagctacagctccggatagaagcccaaggaaggtacctccagaagatcattgaggagcagcagcggctcagtggtgtgctgggtgaatcaggcaagttaggcgccctgggaccagctccaggggagccataccaggattccaacaaaaccgacccctcgaccccggtaccgacttccgaatccccaatccgcgacaaggctggaagcggcttgttcaagaccatttcttcgcacgacgactgccgcgagcctttgacaccggactccagctgccgtgccggctcccctttggagagcccccccagggctagcaagaggatccgggtcagcagcgacattgatcatcgtgggaacaatgagttcccccctcctctcaaagttccggagccaagttcaggttcagatttccgacaggaaagctcagtgttattatcatccagcgcagtgcacttcgattctttggagagcctggatgcagatgaaaatgtcttcaccaatggttcaggcagtgatgattgatttttcatctgtgtaggggcagggcagtgatgtttagaggacttgctagttatctcttcagtagagctgttgatcttagtgaggctgtaatgctgtaaacccagccatgactgttagttgttatctactgttcagtgcatgtttgtagcttatacttattcaatcagagatgtgcagtgtgcacatcactttacagttcatgtaggtctggaaatgtagtaaggtgagaagaacataaagatatgatcttattttcgttgagcatgcaactg

SEQ ID NO: 21452 - DNA, 1067 bp, Oryza sativa
  ref <308>: DATABASE ACCESSION NUMBER: AK071732
  ref <309>: DATABASE ENTRY DATE: 2001-12-06
ttggggaggagaaggtttaaggaaatatctagtgaagtgggcttcttccgtggtagaaagaagagggaggattgaaaaacaagttatcttcgaagatccagagcactcttcaacatactgtcttgcatttaaagtggtcaatccaaatcatttacctcctttaaaggagctgcaaaagttgatgagaattcagtcactccgttgtcacgctctgtataaccatggtgctaccagactatctgtaattccaatccacgcatcacggtctaaggctctaaggtacttatctgttcgctggggcatagagttgcaaaatgtggtggttcttgttggtgaaactggtgattcagattacgaagaattgtttggaggtcttcataagacggtcatccttaagggtgaattcaacacatctgcaaatagaatccattctgttaggcggtatcctttacaagatgttgttgcacttgatagcccaaacatcattggaattgagggttatggcactgatgacatgaggtctgctctgaaacaactggatatacgggcacagtgacaccaagcccccatctgtttatcattaatatatgaagaaaaccagtggacgatacaaagacagcaaacaaacactagcatttccatacttgatggagatgccgattttgccatgtaagtcatgtagtttatgtgtgtggtccttgagctgtgaatagcattccgaaatctcatcccattgagattttggtatgtggcaattttggagtaaaaatcgattccatccaggaatacggacaaaagaaattggttacaatgttgataatgaaaaacatgttaaggaagcattaattcagcaagaaaagcttccaaaatcactacaattcttggccaagcttgcaatttccctttttttgaagtggaagcttatgttgtgtgtttactgctgggtggaccatatggccctggcagcccttctttactatgtttactccaggagggctgcctagctttcgtgtaagtattgtttgacacgatggttcattctatatatccaaagttttgttgagatc

SEQ ID NO: 21453 - DNA, 1353 bp, Oryza sativa
  ref <308>: DATABASE ACCESSION NUMBER: AK071733
  ref <309>: DATABASE ENTRY DATE: 2001-12-06
ggatcgtagaaataaagtgtttgtgcgcgcatctatgagaattgagtgtgagcacctgctgcataaaaacctatcagcgatcgagctctataaattgcggcctcaatcccatgcatcgatctacacattcttccccatcactgaaagagatcctcaggctagctaattaagatacacggacgtacacatacatacggagatgaagaaggcattagtagtaggggtcttggctgtgctgatggccacagccatggcggcgtcggcgcctcagccgcatgtcccgttcacggacgaggacctggagtcggaggagagcatgtggagcctctaccagaggtggcgcggcgccgtgcacacctcgtcgctggacatggatgtcgccgagacggagagcaggttcgaggcgttcaaggcgaacgccaggtacgtcagcgagttcaacaagaaggagggcatgacctacaagctcggcctcaacaagttcgccgacatgacgctcgaggagttcgtcgccaagtacaccggtaccaaggtggacgccgctgccatggctagggctccccaggctgaggaggagctggagctggccggcgacgtggcggcttcgtgggactggagacagcacggagctgtcactcctgccagggagcagggtacgtgcgagagctgctgggcgttctcggcggttggcgcggtggagggcgcgaacgcgatcgcgacggggaagctggtgacgctgtcggagcagcaggtgctggactgctccggcgccggcgactgcatcggcggcgggtcgtatttcccggtcctgcatggctacgccgtgaagcagggggtcagcccggctggcagctacccgccatacgaggccaaggatcgggcctgcaggaggaatactcctgcagtgcccgtggtgaagatggacggcgcagtcgatgtgaccgccagcgaggccgctctcaagcgcagcgtctacagggctccggtcgcggtctccatcgaagccacccaaagcctccagctctacaaggaggtaattaatcgaatttaaattacttcaaattaagattaatcgttgtagcaaaatgagttaggggaggtggtctggttgatttgatccattcctcccggcttttctccagaattgatttagcatctgactttttttccttttttttcaatcatatctcttataattggtttttctcctatatatagtacataaaaatgtgtgataaacatgcattttgtctgtcatgtgcgataaatgcgagtttaatttctagtggtgtgtaattaaggaccatgttgcgcaatacaaaagcaaaaatactatgcatatggtttatatgt

SEQ ID NO: 21454 - DNA, 1181 bp, Oryza sativa
  ref <308>: DATABASE ACCESSION NUMBER: AK071734
  ref <309>: DATABASE ENTRY DATE: 2001-12-06
ggaaaccatcgccaaccatcacatctgatcgagaacaagaagaagaagaagaagaagcaagaacagcaagaggaagagatgcaaatggagtcgtactacggcgcgttccacgccgacgaggccgcgttcttcttcccccaccacgtgccggcgtcgccggagctgccgttcggcctcattgcgtcgccggagccggagccggagccggagcaggcggcggcggaggcgaggcagagcgcgttccaggagtacggcggcgcggtgcacgccggagcgccggcggcggcgggggctgtcaccaccggtgggacgaacatccaccggagggtgatggacgtgctgggcaggatgggcggcggcggcggcgggggggagaagggggagggtgaggagatggaggaggaggaggaagtgccgcagcggcggcggcgcgggcagggcgccgacgtggagagcagccgcggtttccgccacatgatgcgcgagcgccagcgccgcgagaagctcagccagagctacgccgacctctacgccatggtctcctctcgctccgagggggacaagaactcgatcgtgcagtcggcggcgatctacatccacgagctgaaggtcgcgagggaccagctgcagaggaggaacgaggagctgaaggcccagatcatgggccacgacgagcagcagccgtgcgtcacggtgcagttcgaggtcgacgagccgtcgtcgtcgatcgactccatgatcgccgcgctccggcggctcaagagcatgagcgtcaaggcgcgcgggatccggtcgagcatgtccgggaacaggctgtggacggagatgaacgtcgagaccacgattgcggcttgtgaagtggaaaaggcagtggaagaggctctcaaggaagtagagaggaaccagcctgacagcgatgccccatttcctggaagcaaaggctggacacagacatctcatgtgcaaaatgtgttttgatcggttttgaaacatgatcctgctgggacccccatttgttcatttttttaaaagcttgtgatggagcaagtgaaaaaaaaatctccatatctccttgtcaatgtaccttttttttgtccatgtagatacaatcatacaaataatagcttcctctcttttctacaaggaaaaaagaaagagaagagtacaaaaaagatttaagc

SEQ ID NO: 21455 - DNA, 1085 bp, Oryza sativa
  ref <308>: DATABASE ACCESSION NUMBER: AK071735
  ref <309>: DATABASE ENTRY DATE: 2001-12-06
gggttaatctgtaggctgctacctcgctagctccgtccgccgtcgtccgtccgcgagccaccaccaaccggccggccgcgcgcgcgcgcccatggacagtaaggacaaggagaaggagcatgagcagaccgcgtcgggcaggaaccccgacgtgaacgacgtcgaggaggaggaggaggacgaggagggcaacaagcgcgccgtcgtgctcggcccccaggtccccctcaaggagcagctcgagctcgacaaggatgatgagagcctgaggaggtggaaggagcaactcctcgggcaggttgatactgaacagcttggagagactgctgagccggaggtgaaggtgctgaacctgaccatcctgtcgccggataggccggaccttgtactgccgatcccgttcgtccccgacgagaagggctacgccttcgcgctcaaggacgggagcacttacagcttccgcttcagcttcatcgtctccaacaacatcgtgtcaggcctcaagtacaccaacactgtctggaagactggagtaagagttgagaaccagaaggtgatgctggggacattcagtccccagctagagccctacacatatgagggtgaagaggagaccaccccagctggcatgttcgcaagaggttcctattctgctaaactaaagtttgttgatgatgatggcaaatgctacttggagatgagttactactttgagattaggaaggagtggccaaccatccaatgatgtgtggaactaaaaaagggcttcagaaacatgttagctgctagctaagccaagtcagatgcgctgttgcttctagaaatgattcaatgtgtcgtcatcgttaaacgccttttaatttgttttgagcttgtcacactttcttttttctctttttcttcctgttcttcggtcgcataatgtttattcaaacctatataatcgattctctatacatggagacgcgctgatatatatttatgtactactgaattctgttgtttacttgtttgcctgaaacacaccagctgatcaattcctttgagctaatgattaattgtcctagacatgcactttcagatcg

SEQ ID NO: 21456 - DNA, 1364 bp, Oryza sativa
  ref <308>: DATABASE ACCESSION NUMBER: AK071736
  ref <309>: DATABASE ENTRY DATE: 2001-12-06
gactccgcgccgtcgccagcagccgccgccgctgcctctcctcctcctcccctcgccgccgatccagtccggtcactttcagtcttttttcttgagggggagatggcggtttctttcaccaacgttagctcagaggcaggcctcaaaaagctcgatgagtaccttctcactcgcagctacatctctgggtaccaagcctccaacgatgacttggctgtgtactctgcattttcaactgcgccctcttcaagctataccaatgttgctaggtggtttactcacattgatgcactcctacgtctgagtggagttactgctgatggtcaaggcgtaaaggtcgagtcgacagctgttccttcagcttcaacccctgatgttgctgatgcaaaggctcctgcagctgatgatgacgatgatgacgatgttgacctttttggtgaggagactgaagaggagaagaaggcagctgaggagcgtgctgctgctgtcaaggcttctggcaagaagaaggaatctgggaagtcctcagtgttgcttgatgtcaaaccatgggacgatgagactgacatgaccaaattggaagaagctgtgaggaatgttaagatggaaggcctcctttggggcgcatccaagcttgtcccggttggttacggtatcaagaaattgcaaatcatgatgaccattgtcgatgatcttgtgtcggttgatagtctgattgaggactacttctacaccgaaccagcgaatgagtacatccagagctgcgacattgttgcgttcaacaagatctagatcttccttgagtcaggtgatggcgatcggtgcacaaagataaaaagaaaaatccggaagtttgaattaccgttgatacttcaatctagaagtttgaattaccattgatgtgtcgttcgtggtgtcaactagtacttgagcccgttttgtgttgagattgtagcactctacttctactgagatcgttttctcctcctttaatgtttaaagaccaatcaggttattattactgtgtctgcctgtgtcaccatagcggcattgttggtcgatccagttttgatgcggtcttcaattctcccgtctttcgctttgcttgattgcttcatcgcttttgcggctaaagtttttctgctcctaccaaaactgtaggggaaactttggttgtgctgtttgttctatctcttatgcattgcgcagcctggttttttcgctcttctgaagtatagccctgtgcgctctcatcaggcctgtcctgaaatacgtgatttccgttcggtatcgatgttcggtttgtcacacatatcttctactttcttttctgtaatgaagagcattgtctactgttatcacct

SEQ ID NO: 21457 - DNA, 1103 bp, Oryza sativa
  ref <308>: DATABASE ACCESSION NUMBER: AK071737
  ref <309>: DATABASE ENTRY DATE: 2001-12-06
gacgtaagcacacaaagacactagtagaaaacacctgacgaacgactctgaatctgaagccatgtgtatagctgcatgggtttggcaagctcacccacagcaccagctcctcctgctgctcaaccgggatgagttccatagcaggccaaccaaggcagtaggatggtggggggagggctcgaagaagattcttggtggtagagatgttcttggtggagggacatggatgggttgcacaaaggatggcaggctcgccttcctcaccaatgtgctcgagccggacgccatgccgggggcgcgcacaaggggagatctccccctcaggttcctgcagagcaacaagagcccacttgaagttgcaactgaggtggcaaaagaagctgacgagtacaacggcttcaaccttgtactggctgatctgaccacaaacgtcatggtttatgtgtcaaatcggccaaaggggcagcctgcaacgatccaacttgtctcaccagggctccatgtgttgtccaatgcaaggctagacagcccttggcagaaggcgattcgcctcggtaagaacttcagggagcatcttaggaagcatggtgatgatgaggttgaagccaaggacatagttgagaggctaatgactgacaccacaaaggctgacaaagataggctgccaaacactggctgtgatccaaactgggagcacggcctgagctccattttcattgaggtgcagactgaccagggactctacgggacacggagcacggccgttctatcagtgaactacgacggtgaagctagcttgtacgagaaatacctggagagtggtatatggaaggatcacacggtgcattaccagatagagtaggcggtaatatactaatatgggagcctccaataagaaaaggatgacgaaattaatagctacaattgtgcatgtagttatcttcttcacccggtatattgaagatgaagaaatgtacaatgattctctaattacgccgattaaattatatatactgtatgcagattgcttattcatcacatggaagatgataaagttgtcactgatgtgttgaatatatacattttatcctatacatatttac

SEQ ID NO: 21458 - DNA, 1433 bp, Oryza sativa
  ref <308>: DATABASE ACCESSION NUMBER: AK071738
  ref <309>: DATABASE ENTRY DATE: 2001-12-06
gactcgtactgtttctgatatcattgattgctatcctcctcctcctccttcctcccctaaatctctagagaaatggaggacaatctaccagtcaatgtccgggagtatcaagaactcgccaaaaaagcgttgccaaagatggcttatgattacatcaatgggggagcagaggatgagcacacactgagggagaatatcgcagcatacacaagaattatattacgacctcgcgttcttgtggatgtgagcaagatagacatgtcaacaactttattaggatacaccatgcgttcacccataattgtggctccaactggggggcacaaattagcacatccagaaggggagaaggctacagcaagagctgcagcatcatgtaacgccataatggttctttccttttcttccagttgcaagattgaggatgttgcctccagttgcaatgccattcgcttttatcagctatatgtgtataagaataggaatgtttcagcaacattagtacggcgggccgagagttgtggattcaaggcacttcttttgacagttgacactcctatgctcggtcggcgtgaagcagatatccgaaacaaaatggttttcccacggagtggtaatctcgaaggtttaatgacaacagatgaccatgataccacaaacggttctcagctcgaacgattcgcacgagcgacgctggatccatcattatcatggaaggatatagagtggctcaagtccataaccagcatgccgatctttctcaagggcatcgtcaccgctgaggacgcgaggagagcagtggaggccggggtggccggcgtgatcgtctccaaccacggcgcgcggcagctggactacgcgccggcgaccatcgccgccctggaagaggtggtcagggcggtggccggcgccgtgccggtgctggtcgacggcggaatccggcgaggcactgacgtgttcaaggccctggcgctcggcgcacgggcggtcatggttgggaggccggtgttcttcgggctggcggcgaggggggaggcaggcgcgaggcacgtgatcgagatgctcaacggcgagctggaggtggccatggcgctctgcggctgccggagcgtcggcgagatcacccgcagccatgtcatgaccgagggtgacaggatcaggtccctgctctgatgaatcatttctcatctggccaatgcagcttcaggtctaaaaatacaagtgggctatgggccaacccgtaaaccgatttataggtaataaaatttgaccgacccgtgaatctatttatatgtaaaattagtgggtaatccaaagtctacttatttggtctataactataagtggcttcgcggatcagtccagttacatcatattcaggtctcaatgtgagagactttagtatatgcagtatattgcaattggatttatgg

SEQ ID NO: 21459 - DNA, 1328 bp, Oryza sativa
  ref <308>: DATABASE ACCESSION NUMBER: AK071739
  ref <309>: DATABASE ENTRY DATE: 2001-12-06
gttctggccctgatctcctccccctctcacttgccctgcccaagcccaagagaggaatccaagttgctgcattgacggcggcggcggcggcggcggcgaggagatcgggagcaatggcggaggaggcggcggcaggcgggctgtactactgccacatgtgcgcttcgacggtgagcgccgtggcggcggcggagggggaggtggagatcaagtgcccgtactgccacagcggcttcgtcgaggagatcgagtccgcgcgcggcgtcgccaccggcggcggcggcgcgatctcctccgtctgggcccccatcatcgacggcatggttggcggcggcggcggcgacgcgtccgccgccaccgccgcagccgtcgcctcgcggacgccgccggcgcggacgacggctactaccgcgacctggccctcctcgacttctccgagagccggcggcgcaccgccgcgctgctgctgctcatgcaggagtttcgggagcgccagctccagcgcctcgagtccgccaccgccacgatctccgccgccgcggccgaggccggcgccgtcgtcgggacctcgagagacgcggagggcgtggcgctggccgactacttcctcggccccggcctggacgccctgatgcagcgggtgggcgacggcgacgcggagcggcagggcacgctcccggccaagaaggaggccgtggagtccatgccgacggtggaggtggccgccgggggcgactgcgactccgcctgcgccgtctgcctcgaggactacgccgccggcgagcgcgccacggaaatgccgtgccggcacaggttccacgccaagtgcatcgtgccgtggctcaagatgcacagctcctgccccgtctgccgcttccagctccccaccgacgacgacgacgactcctccaagtccgcacgcggcggcgccgcccactccggcggcggccggcggttgtcccagccggcgccgcgggtcgacgggggaggcctgggcaggttgccggccgtgatgcaggagctcaggagcatcctctcccagccgtcgccggcgtcgacttccggcagcagctcgcacgcgcagcagcacagcgacgagtgatgacgactcaggatggtcgccggtcaccggcggtgctgctgctccggcgaccggcggaggagctcatggttttgcaactttgacaatgtacataatccggggttcgtcgtcgctgtggtgactggctttggtgccaatggaacttcatttttcctcgtctcccctttctttagcaatcatcttgtgatatatcccatgattttaatatacaatttgcgttcggcgg

SEQ ID NO: 21460 - DNA, 1741 bp, Oryza sativa
  ref <308>: DATABASE ACCESSION NUMBER: AK071740
  ref <309>: DATABASE ENTRY DATE: 2001-12-06
gagtcccccattgatgacctccgccgccaccgccgtagatgcacaggctctccttcctccaggccaccatcattgacgcgccgcggtgggggcggcgagtcggagtcggagaatgaggaggaggaggagaagcgggggggcagggcgggggagaggaggctcagaggcggcgggagcgccgcggcggcggcggcggcggcggggagcggggagctcctctccatccccggcgtggggcctcgcaaccagaggaagctcgtggacaacggattcgagggcgtcgcgcagcttaagcagctctatcgggataagttctttggaaaatatagcgagaagatggttgagtttttacagagctcggttggcatcattcataagaaccatgctgagagtataacttctttcattaaggagagtgttgatgaggagctgaaggatgcagactcatctaaggcttctcagaagaagaggctcaccttttgcgtggaagggaatattagtgttgggaagtctacctttctccaaagaatagctaatgagaccatcgaactgcgtgatcttgtagaaatagtgcctgaacctgttgctaagtggcaggatattggccctgaccacttcaatatattggatgctttctatgctgagccacataggtatgcctatacctttcaaaattatgtgtttgtgacaagggtcatgcaagaaagggaatcttcaggtggaataaaacctctcagactgatggaaagaagtgttttcagtgataggatggtatttgttcgtgctgttcatgaagctaactggatgaatgagatggagatcagcatttacgactcatggtttgatcctgttgtgtcatcgcttccaggtcttatccctgatggatttatctatctaagagctagcccagatacttgccacaaaagaatgatgctccggaaaagagcagaggaaggtggtgttactcttgactacttgcaaggtttgcatgagaaacacgagagctggttgcttccttcaaaaggaggaggtactggtgtgttatctgtcagtcagctgcccacacatttggaaggttccttgcctccagcaattcgagatcgtgtcttttacttggaaggagatcacatgcactcaagcatccagaaggtccctgctctggtcttggattgtgaacctgacattgatttcaacaaagatatagaagctaaacggcaatatgctcagcaagttgcagaattctttcaatttgtgaagaaaaagaaggaagctccatctgaacaaacaagcactgacaagaaccgtatcaatccacagatcatgcttcctcacaaaggcggattgtgggttcctgatggaagaaaccctttctcaggatctgctatgaatctgaacttcagaagagccatgtcttcctatctctcgacataggatttcagctccagaatgaacgtaggatcttacaaatcccactctcactgaccttgtaaatgggcctatgcgttaagttaaacctaggttagccactgatgtaagatagtctgccaccgcatctccatcttttgtaaatgatcatcttccaccctttccgagttccatgttttgtagtagcgtcagcttccgtttgtctgagttctggtatctgtatcgttatgttggttgctgactacattctgttagatgatccggaactctttgacatttctgggaaagatgcttcagtacttgccgtttgtttgtc

SEQ ID NO: 21461 - DNA, 1603 bp, Oryza sativa
  ref <308>: DATABASE ACCESSION NUMBER: AK071741
  ref <309>: DATABASE ENTRY DATE: 2001-12-06
gatctccgatctctctctccaccgcggcgtctctctctctctctcctcccccacccccaaccaccacttcctccatcaccaaagcgccgctccctcgccgtcgccgccacctccgccgccgccgccggtgccggtcgtcgaggcgggaggactcctccccgcgcgccgcgctcgatccgtccgctccccagtacgcccgagggcagtgatactctgctgcttagttgggtgcagtgtgcactacaagtctacaacaatggagcttgacagtctaagagaggcgtttgatcgagttattgaaaaacgtgcttcctcttctgctaaagctcaggaagttattgatcagatagtgagtgaagttgagcaggcaatcacgaagatgcagatgatgaatacagattccatgggtactgctgaccattcatccatcctggcagaattgaaagccaagttgaatgaattggcgccactaaatcaactagaaggttgtcaaaaggaattgaatgttgcacttagcaaatatctcaagctgctcgagaagtctttcagtccagacatatcgaaagcatatcgaaatgtggattttgaggccagtactataaacagcataatagcaaatcatttctaccgccagggcctttttgatcttggagactcatttgtccgtgagtgtggtgaatcagatggggcacacttgaaactacaattccaagagatgtattcaattcttgaagcaatgcaagttagaaacctccaacctgctctcagttgggctgccaagaaccatgatcagcttttgcagaatggttcaatgcttgagttgaaacttcatcagcttcagtttgttgagatactaacaaaaggaagtagagatgaggctttaaagtatgcaagaactcacttagtgccctttgcatccttgcacaaggcagagatccaaaagctaatggcctgccttctctgggctgataggcttgatcagtccccttatgccgaattcatgtcatcgactcattgggagaagctagcagaggagcttacccatcaattctgcagtcttttggggcaatctagtgagagcccacttggtgtggcagtatcagctggctttcaaggacttccaaccttgctgaagctaacgacagtgatggctgccaaaaaaacaggagtggcaggcgatgaaacaactgccagtacccatagatatcggaccagaattccagtaccactctgtctttgtatgtccggtgctcagagagcagtcgagtgatgaaaaccctccaatgctgatgccctgcggacacgttgtgtcgaaacaatcgataatgaagctatcaaagagcagctccagacccttcaaatgcccatactgtccctcagaggctgttgcttctcagtgcaagcagctacatttctgaatgttctttccctgctcagatatgtttatacacgtgttaatttatgttcctgtggcacccatccaataactaccttgtaatataatcctgtatgttaatgaacattctagtgctgtctctggatgttaatctgtacagttgcaaattcctgttcgttttatcaaattatatctctggcatgactg

SEQ ID NO: 21462 - DNA, 822 bp, Oryza sativa
  ref <308>: DATABASE ACCESSION NUMBER: AK071742
  ref <309>: DATABASE ENTRY DATE: 2001-12-06
cactgagcccgcatcgtctcgtctccctctccctctcccaccccgcctccctcctcgacgagctccgagcggcggcgatggcgagcgacggcgcggcggccacgccggcgaaggcgagcccgaagaaggccaacctcctcgacccccactccatcaagcacctcctcgacgagaccatctccgacgtcgtgaagagcaagggctacgcggaggacacgcggctgggcaactggaagctggcgattggggcggccgtgatcgccatcgctctcctcgcgcagttctacccgaagaagttcccccagaaccgcgagttcctcctcggctgcatcgcattatatgtggtgttgaatgtggtgctgttgatacttagctataccaaggaaaaggatgccattatgttcacacaccctcctgcgggttctttcaatagcactggactagttatatcttcaaaattaccaagattctcggatatgtacactatcacaatagccagtgcagatccccagtctatttccgccaataagccagttcatttcactaagagtgttacaaaatggtttactaaggaaggagttctcgtggaaggcctgttctggaaggatgttgagaggttgattgatgactacaacactgagcgcaagggcaaatgaatgggtagtccatgtgactatgagacgttaattgtctagaaaagaaaccctcttgtggaattccttgcttggaagaatccttagcttaatcaaaatagacaattttgtcatacattactgtttcactggtgattgaaatactgtcgaagacacccggtaccatccc

SEQ ID NO: 21463 - DNA, 1803 bp, Oryza sativa
  ref <308>: DATABASE ACCESSION NUMBER: AK071743
  ref <309>: DATABASE ENTRY DATE: 2001-12-06
gatacttagtactgtacgtactaaaccggggattgatcaggagagtgcagtgcaaactcgcagtgaacctgtgtgatcgatcggccatggagtcgctgctcgcagccggtgcgggagggatcggcgtggctgcggcggccgccgtcgtggcggcgaccctcgccgtggtgccgcccaaggaccgcggcaacaacccgcctccagctgttcctggtttacccgttattggaaatatgcatcaattgaaagaaaagaagcctcatcatacctttacaaaatggtctaaaacttatgggccaatctacactataaagaccggagcttcttcagtagttgtgctcaattcaacggaagtagccaaggaggcgatgattgaaaaattctcatcaatatcaactaaaaagctaccaaaagcattgtctgtgataagccgtaaaaacatggtttccatcagcgactatggtgacttctataagatggcgaagcgtaatattatgctcgcaattttaggttttaatgcgcagaaacacttctgcgatacaagagaaaggatggtcagtaacgtgttaagcagtttgcataaattggttgctgttgacccacattcccctctgtacttcagagaagtttacactactgagctattcggattgtccttgatccagaatttaggtgaggatgtgtgttcagtttatgtggaagagtttgggagggagatatccaaggaagagatcttccatgtccttgtgcatgagatattgtcgtgtgtcgtggagcctgattggagggactacttcccctacctcagctggcttccaaacaagagcttcgaaacaatagtgtctagtacagaatttagacgagatgctgtgatgaacgcgttgatcaagaggcagaaggaaaggattgcgcgcggagaggcaaggatatcctatattgacttcttgctggaagctaagaacagtacacagctgacagatcaccaactgatgctgctgctggcggagtccatcgctgctgctgtggatactgtcctggtaaccactgaatgggccatgtatgagcttgccaagaaccctgacaaacaggaatggctttaccgggagattcgagaggtgtgcggcggcaaggcggtgaccgaggaggacctaccaaggctgccgtacctcgacgccgtgctccacgagacgctgcggctgcactccccggtgccggtgctccccacgaggttcgtccacgacgacaccacgctcgccggctacgacgtccccgcgggcacccaggtgatgatcaacgtgttcgggtgccacatggacgaggaggcctgggagtcgcccggagagtggtcgccggagagattcctcggcgaggggttcaagttggccgacaggtacaagacgctggcgttcggcgccgggaggaggacctgcgcggggagccagcaggcggtgagcatcgcgtgcgtcgccatcgcgcgcttcgtgcaggagctccagtggacgctgagggagggcgacggtgataaggaggataccatgcagtacactgccttgaagcttcacccgctgcacgtgcacctcaagcccagaggaagctaggatcgatcgatgtgagccagaagaagctagcggttccatgatgaaggctaaataatgatcataccatctctgttttcttaattaatatattagaaaaaatgtcttgcattgtaacgggtgctatggcaactactattagaagatgtgcaataaattgaaacattgaaaccgttatacgttataattgaaaaagttgattaaaatc

SEQ ID NO: 21464 - DNA, 2520 bp, Oryza sativa
  ref <308>: DATABASE ACCESSION NUMBER: AK071744
  ref <309>: DATABASE ENTRY DATE: 2001-12-06
gagctgcacacactgacaagctcatcactccaccagccagcttgagctcgcccacttccgctcacaagaagcacaaccgcgagctaccacagcatcggatcgagggcgagcggcggcggaggcggcggaatgggagggccactcggcgccatcataggcaggcacccggcggcggcgggcggcggcgggggggatgagctgggaggtgtcggcggcggcggcggcggggatggcatcattcggcacaaccggaggtgccgggatttggccttcctcgtgctcttcgcggccttctgggtcgccatgatcgtcaactccagcttcggattcaaccagggcaacccactcaggcttacttatgaactagactacaaagggaacatttgtggcagtaggcatggtgacccggatttgcatgagcttgatgttagatattggatgaacccaaaccaggtgtaccaaagtggggtcaaggacaacaagattaaccttgctgatgccaaagccatctgcctgatggagtgccccatgccagcagcagacggattaaactttgtttgtgattatccagaaggggacattcgcctgtctgtcgatgattggatcgacagggactatgactattttgagtttctcacaccagatatgagaaatagttctcttcaactgcagggtccatgctaccctgttatatttccaagtgtgaatgtctactggagctgccaatttattgcgcgagcatcaaatgtctctttgaagcattggcaacagatgggtggtatcaacatcgacgaaaatattctcatagataaaacaatccacaaggccatcaattctaaatcttcagtcctgaagagatacgttgctgacattgggaagtcatggcctgtgttaattgtttgcggtggactgctccctcttttcttgtcagttatctggttgcttctgattcgttattttgttgttgccacgccatggataactgtagtggttttcaatgctctagtaatctctgttaccatgtttttttatattaaagctggctggttaggcaatgatcccttaacagttgtaattggcgaaagtgatccatatgtccacataactgggcgggaaataagccaccttcatgctgctacagtggtgatgacagtagtaatgattattgcatttctgacctccatagctattatccgtcgtatactgatagcaacacctgtcctgaaggttgctgcgaaggtcattggtgaagttcaggcactaattattttcccagttgtgccatactttatcctcgctatcttttatatgttctggttttctgccacactccatctcttcagctctggtcaagttctccgaaatgactgcaatacagattgttgctcatatgatctgaagttgggcaaagtaaactgtgacaactgctgtgggtacagcatccattacacccctcatattggtattgccattcttttccacttatttggctgttactgggcaacccaattctttattgcttgctcttcaaccgtgattgctggatcagttgcttcatactattgggcacgtggtgaaatatctcatgacataccatttgttacagttgtttcttcaatgaagcggttgttgcgttacagccttggttcagttgctataggttcacttgttgtatctgctgttgagtgggtgcggtttatactagaatgcctcagacgcaagttgaagctagttgattccgctcgcgaaagctgctttgggaaaatgacatcatcctcttctcaatgctgcctgggctgcatagactggaccctcaagtctgtgaatcgaaatgcctatataatgatcgccattaccgggaaagggttcttcaaagcttctgttcttgcaactggtttgatcatgaataacatactgcgcattggaaaagttaacgtcattggagatgtcatcctctttctggggaagctctgtgtgagcttgttctgtgcgctctttgcgttccttatgttagacacacacaaatacaagtccgcacataacaagatatcatctcctcttgttcctgtagtggtatcatgggcccttggtttcatagttgccaagcttttcttccaggtcgtcgagatgtcgattgacaccataatcctctcattctgccaagatgcagaagagcaccaagggaacgcgcagtacgctccccctctcctcatggagacactggatgaacagagtgaactccaaagactaactcaaggaccttgatcttttctttatttttttttcttcttgcaagtagaattaagtcgaaatgaagaaatcaagtagaagcctggttattatgtaatcatgttccatgttgctgggtagtgggtaatttcaccattttagtagtgcactctgatgctgaatgtctggtctctagcgtgaccaatacccttggcttggtctaacgtatgtactacttttacttagttaagtacaatgttagtgaagaaggttatatctcacctgaatgtc

SEQ ID NO: 21465 - DNA, 943 bp, Oryza sativa
  ref <308>: DATABASE ACCESSION NUMBER: AK071745
  ref <309>: DATABASE ENTRY DATE: 2001-12-06
gacattcactagtggtttgcttccagttcctatccaatctctggtcttccggcaggtccccgaagaaggagcggcggcgatggcggcgcctgtgacggtgtacggtccgatgatctcgccggcggtggcgcgcgtggcggcctgcctcctggagaaggacgtgccgttccaggtcgagccggtcgacatgtccaagggcgagcacaagtccccttccttcctcaagctccagcccttcggccaggtccccgcattcaaagacagcctcaccaccgtcttcgagtcgagggctatttgccgttacatctgtgaccagtacgccgacagcggtaacaagaccctcatgggcaggaaagaagatggggcggttggccgcgctgccattgagaaatggatagaagctgaaggccagagcttcaacccaccgagcttggcaatggcattccagctcgcatttgcgccgttcatgggtagggccactgacatggccgtggttgaacaaaatgaagcgaaacttgtgaaggtgctcgatgtttacgagcagtggctgggggagaaccagtattttgcaggtgatgagttctcgctggcggacctggtgcacatgcccaacacagatcttcttgtgcgcaagaccaacaaggcagggttgttcacggagagaaagaatctggcgaggtggtgggatgaggtatcagctcgtccttcatggaagaaggttgttgagttgcagaatgtaccacggccctcatgaggcttcttgttttttcccctctgagcgtcttgtgttagttgcgttaaagattcggtcttgttcagttgtttgtatcatttgacaaaatgtgcaagctcttcctatgggtccctaatattgtgctaccatctgtaccttttagtttggataaggttgaatctattttcaggttctcaagtttacttacct

SEQ ID NO: 21466 - DNA, 1157 bp, Oryza sativa
  ref <308>: DATABASE ACCESSION NUMBER: AK071746
  ref <309>: DATABASE ENTRY DATE: 2001-12-06
gatcgaattgatctgccatggcatcaaacaagcaaattgatctcgagtcccagaagccggcgacgtcatctccggcggccagcgtttcatcggcagcagctgccaccgcgccgccagcttctagctcggctgtacccgtttcagttggcataaccaaccgccacaacgtgcagccagagacggagcctctgctgctgctggcgggcggcgacggcgatggcggctctgacgacgagacaacgcggctggagcggaccatcacgcgggcgttccggagcacggcggagctcgccaagcacctgcccacgggcgcggtgctcgtcttcgaggtgctgtccccggtgttcaccaacggcggcaagtgccaggacgttaaccgcgtcatgacggcgtggctggtggggctctgcgccgcggcgtgcttcttcctctgcttcacggacagcttccacgacgggaaagggacggtgcggtacgtggtggccacgcgcgccggcctgtgggtcatcgacggcaccgcgccgccgccgccggacgtggccgcgacctaccgcctcaggttcatcgacttcttccacgccgtgctgtccctgatcgtcttcctgtccgtcgccatgttcgatcacaacgtcggcgcctgcttctacccggtgatgtcctacgacacgaggcaggtgctcaccgacgtgccgctcgccggagggctcgtcggaaccatgctgttcgcgacgttcccgtcgacgcggcacgggatcggtttcccggtacacgtggcttaataagaccgacccacgtggatgttttcctttccagcagctgcctcctgtcttgcgtgctttgcatctcctagttgtcttgtaaagttgtacaattgacgtataaactctgtctagattcattaatataaatataaatgtggaaaatgctaaaatgacttatattataaaatagagggagtaatagatttaacgattcaaaattacgtgaaacttacatacaagttacactgtagttacatgcaagttacagtgtaattacactataattgtactataattacatctgttaaatttttaggagaaaatttatcaacaaatgtatatgtggtcccatttattacatgtaattgattaatgattgctagaacatgtcctacc

SEQ ID NO: 21467 - DNA, 1150 bp, Oryza sativa
  ref <308>: DATABASE ACCESSION NUMBER: AK071747
  ref <309>: DATABASE ENTRY DATE: 2001-12-06
gatacgtgtgccttcatctagccacgcaattctcccccaaaatttcccccacaacaacgacccgccattactgcccctgtgcgcctcgcctcgccaccgaaccgccgcgagcacccggaggaagagaatcgaatcgaggcgagaggaggagcaatggcgacggcgaggacgctggcggctgcggcggcggcggcgagggcgttctcgttgacggcgacatccggcggcggcgtgtccatggtgcagggcgcgtcccgcggcatcgggctcgagttcgtgaggcagctgctgaagaggagcgacgagggccgcgtcgtcgcgacgtgtcgcgcgccggattcagccgtggagcttcagaagctgaggcaggagcacgagcagcgcctcgccgtgctcccgctcgacgtcaccgacgagagcaccatagaggcagctgcggcctcgataggagagacccatggatctctgaacctgctgatcaatgcaactgggatcctttcaattccgaatgtgatacatccagagactacatttagcaaagttcagaagtcatccctgctactggcatatgaagtgaacgctgttggccctattttagtgatcaagcatatgtggccattcctgaaggctggaggttgctctgagaccgggagaggattttcattggttgcaaacatgagtgccagagtcggttcaataggtgacaatggcctaggaggctggcattcatatagggcttctaaaacagcactgaatcaattgacaaagactgtatcagttgagctggggaaaaaggacaacattgcctgcatcctgctgcatccaggaaccgtggacactgacctctcacgcccttttcagaagaatgttcccaaggataagctcttcacaagggagttctctgttcagaagctactgtccatcatcgacaatgtcaagaagagcgacaacggcaagttcttcgcttgggatggacaagaaatcccatggtgatatcaatcagcacttcagcagagcaagtgagcaacagtgtccaaaatttgtgctcaatattttctcagcctttattgtgttgttggcaccaaatagatcgtgtcaatgctcgatttgaattctatttggatctacgatgatctgaacataacaaacc

SEQ ID NO: 21468 - DNA, 686 bp, Oryza sativa
  ref <308>: DATABASE ACCESSION NUMBER: AK071748
  ref <309>: DATABASE ENTRY DATE: 2001-12-06
ggtgaatccccttctcccttcggtttccccttcttaattcttctcgcctcgagcgaaaatcttatcattgtagttctttccatcgcagagggtgggctagggcgatccggggggcgcgaccatggcttacgtcgagagaggtgttgtgaaagacaaacggacaatttggcggctaagcataatttctgacttcttcagggctattgtgaacttcatcagaatgttcttccttacaatgttctcgattgaaaaaacagacagctataggaaagggtatggctctggtaagaaatgggatggtgggcctggtgggggaggtcctggtggtggcccttatgggggcggccgcggcggtggaggcggcctccgaggtcctcgcacactatctgacatccgatctaacgatcagaattctctccctgcttgtggatcctgctgcggttaacctgtacatctgtcattgtgactgctgaactatgaacgactctaagatccttttgatgtcattttttaggagcaagtctgaattctgaaaattttagaacgtatataatcttcgctggttaagcaggatataagaacacttgttacatgttacatcttctgcttagaaagatcatctatgcattgtgacattgtcaaaacacgagtgtaatacccagcacatattatgcaacttgtttctg

SEQ ID NO: 21469 - DNA, 1337 bp, Oryza sativa
  ref <308>: DATABASE ACCESSION NUMBER: AK071749
  ref <309>: DATABASE ENTRY DATE: 2001-12-06
gaggagatcccctgatccctcttcctcgccggcggcaatcgctcgccggagtcaaggtaggatgatggcggcggcggggctggagtcggcgtgggagtacctcatcacgcatttcagcgagttccagctggcctccatcggcaccttcctcctccacgagagcgtcttcttcctctccggcctcccctctctcctcttcgagcgcctcggcctcttctccaagtacaagatccagaagaagagcaatacacccgattaccagaacagatgtgtagtgcgtctcgttctctaccatgtctgcgtcaatctccctctcaccattttatcatatcgcaccttcaaattcatgggcttgaggagcacccttccgctgcctcactggacagttgtcgtctcccaagtgctcttcttttttgtgcttgaggatttcatattctactgggggcatagggcactgcataccaaatggctgtaccagcatgttcacagcgtccaccatgaatatgccacaccctttggcctaacatctgaatatgctcaccctgctgagattctattcttgggctttgctaccgtggccggccctgcccttactggccctcacctcttcactctctgggtgtggatggtcttgagggtcttggagacagttgaggctcacagtggctaccacttcccatggagcccgtccaatttcttgccattgtatggcggcgctgaattccatgactatcatcaccgtgttctctacaccaagcctgggaattactcgtcgaccttcatctacatggactggctgtttgggactgataaagattaccgcaagacaaaggccctagaggagaaagaaaggacgaagcatctgtaaattgtgagctcttatccctttgctggcgccttattcccaatgagctttcatgtgttgtagtactgatgatgagacattccgttgattgaagcaaaacggcaggcaggcgtcttaaccactgctaccttgattagggcacatgtgtatgtatgcggtgctcctcctgttattagttttcttcatgctgtaattctccattgtaattttggactgcagagttgggggtagaggtgtcctgcgattaatttgaagcaaaataaaaggttaagttttgctgaggatcgatgtttgtttgcactggtgttgctcagatcgggatatgacgactttgtgtcttgtttgttgggatgttagaaatgcaaaattattactgtatatatgggccctggctggagtgtttcaggatgtcccaaattgtaaacggcctggacctgcctggcccatctaaaacggggcctttcgcttcttc

SEQ ID NO: 21470 - DNA, 1206 bp, Oryza sativa
  ref <308>: DATABASE ACCESSION NUMBER: AK071750
  ref <309>: DATABASE ENTRY DATE: 2001-12-06
gagcgaagcgagactgcgagagcagagcattgttcttcttctctagctattagtggtggggaataatggctcccgccaccaccgcagcaatggccctcgcgccgcctccttcccatcaccatcaccatcaccatgtcaagcagctgcagctccctccgtctgtctccgtctccgtgcccctccgctccggtttccttggccgcgcactgcctgctgctgccaacccacagccgctgctcgccgccgagagccgccgcagcagcgccgtgtccgtgcggatgtcgtgggacgggcccctctcctcggtccgcctcattatgcagggccgcaacgtcaagctgaatgagaaggtgaaggagcacatcgaggagaaggcggggagagcagtggcgaagcacagccagcttgtgaaggaggtggacgtgcgcctctccgcccgcggtggcgagctcagccgaggtcccaagatttgcaggtgcgagatcactctcttcaccaagcgccacggcgtcatccgcgccgaggaggacgccgagtccacctacgccagcatcgacctcgcctcctccatcatcaagaggaagctcaggaagatcaaggagaaggagaccgacgtccgccacctcaaggggaccaagccccccgtctccgactggccgccatcattgctcgacaacaacgacgacgacgcccaggcccagctcaaggatctggaggaggccgtcggcgccgaggacgaggacacggtgctcaccaaggtggtgcgcaccaaggtgttcgagatgccgccgctgtcggtggaggaggcgatggagcagctagtgaatgtggaccacaacttctacgccttcagagacgagaagaccggggagatgaacgtcctgtacaagaggaaggaaggaggcttcggtctcatcgtccccaagggagacggtcatctccacaaggagaccatccccaactctgaccaccaccacccctcccttgctgcctagcctctacacctcctgcatcaccatcctcatttgctaattatttctatgcttgcccaagagtctctaaatattactagtattaattaatccaagtgatgagagaggtctttgattttgtctccgtgtacatcgatcgatcgactcttgactactctgtttaaccaactgttttcgatatatttatattattaatgatttttccaaggttttt

SEQ ID NO: 21471 - DNA, 892 bp, Oryza sativa
  ref <308>: DATABASE ACCESSION NUMBER: AK071751
  ref <309>: DATABASE ENTRY DATE: 2001-12-06
ccccccgcaatccatccccaacgccatggcctccacgctcgcctggagctccgccgcctcctcctccgccccctcctcccgcctcccgccgcgccgctccccgtcgctggtcgtcgtcgcccagggcaaggtcaagaagtatcgccaggtcatactgacagatgacatagcagaggtggggaagaaaggggacacgcttaaagtgagggccgggttctaccgcaacttccttctgccaaagggcaaggcaacgctgctcaccccagaagtactcaaggaaatgcaagtagaacaggagaggatagatgctgaaaagaagcgggtaaaagaagaggcacagcaacttgcccgtgtttttgaaactattggggcattcaaagtgccacgtaaaggtgggaaaggaaaacagatatttgggagcgtcacagcacaagatcttgttgacatcataaagtcacaacttaatagggatgtcgacaagcgtctcgtgacagtgccagaaattcgtgaaattggggaatacattgcagagattaagcttcaccctgaagtcacagctcaagtaaggctgaccgtatatgcgaaataagccctgaagctgcttgattgaatctttagtggatggtgggctttggatgaattctgatttcaccagagatttttgctgaaactccaaggtgcagtgtcacatcacggggcttggtctttacacattgccactgtccatcctacctgtaaagtcagtttcttgcacctttttttttttgacaaatttatttgtgttaatgttatggggttaaatgggcatgatgtaaacaacaaagggttcagagtctagagcaactgatacttgtcttgtaatcttgtttaaaggtgcacgttctttatagtc

SEQ ID NO: 21472 - DNA, 1066 bp, Oryza sativa
  ref <308>: DATABASE ACCESSION NUMBER: AK071752
  ref <309>: DATABASE ENTRY DATE: 2001-12-06
gaaagcgaggtaggaagagggatttggtcgaattttacgtacttagccgtgggcgaggcgtttacagggttgcttcggctcggggtgggttgggttgggttgggttcgatggagaagtggagcagggggctctcctgccgggccgccatctgcggcatcgtcgtcctgctctgcgccaccgcgttctcctgctccctcgccgccgaattccgcaaagtcaaggagaaggacatgaagctggacggtagcctctgctccctgcccaagagctccgccttcgaattgggcgtcgcggccatcgcgttcctctccgtggcgcagctggtgggcaccacggcggcggcgaccaccatgtgcgccgcgtccaagcgcagcaagtcgtccaccaccaggcgccgcgcggcgtccgtcgccatcctcgtcctctcatgggtgagcttcgcgctggccgtcgtcctgctggcgaccgcggcgagcatgaaccacgggcagcggtacggccggggctggatggacggcgactgctacgtcgccaggaacggcgtgttcggcggggccgccgcgctggtcgtcgtcacggcgctcctcatcctcggcctcacctccaccaccaaatcatcctcatgcgccacctcggcagcatccgccacaacgacaatccgtctcgacgcggcggccacggacgccgagcaggcgagcgggcgatcgaagcagtgacccgccggcctggccggggcggaacacgcggggcgggacgggccaaccggaggagaggcgggtggacggtgctccgcgctgttcgtcccgcaaaggccaagcggcgtgggggcaatctccgcttgctggcaaaggccaacggctggtgatgggtgggggcgggtataccggtgggttagaagatattttagctggacaaaggtagtacatagcattactgacaaaattactgaccaagaggtccaagaccgtgcaaaatgtaaatgaaaccagatcaaacagatccacgcaaagaaagtaaaggttgtacatgaattaattacagcatcttaagacatagccgagttcg

SEQ ID NO: 21473 - DNA, 1100 bp, Oryza sativa
  ref <308>: DATABASE ACCESSION NUMBER: AK071753
  ref <309>: DATABASE ENTRY DATE: 2001-12-06
gatgggcacgcagcgcatcacgaagcccccgcgacgatccatccatcgatcgcgacgccgagggagcgagcagcgccggcggcaactccggtagctcgctcgcttccccggcccggccggaagatatggccgatcacgccgtggtggtggacgacggcggttcacgaaggatgaggccggcgtccctgtcgtcgtcgtcggacgccgaagacgacgacgccggcagcaagaagcagttcctgcgggcggcgggacgagcgctggaggcggcgccgcccgtgcggcggaggccggggaggccgtcgcggccggtgaggatgttccacaccatgtgccggtcgctcccggtgctgacgccggggtgcgggcggctgcagccggccggggcggcgtgccggatcgcggcgccgtcgcggctgtccccttccgcctccctgatgtcgaagctcgtggcgtcggcctccaccggcgccgccggggcgtcgcgccggcgcatgacggggacgctgttcggctaccgcgacgcccgcatcgcgctgtccctgcaggacaacccgcggtgccagccgacgctggtggtggagctggcgctcccgacgcacgcgctgctccgcgacctcggcaccaccgccggcgcgcgcatcgtgctggagagcgagaagcgcgcggcggacggcggcgacggcgccggcgccggcgccagctcgaggcgcgagcgcgagcagcaggacgggtgggtgctcgaggagtccatgtggaccatgtcctgcaacggcaagaaggtggggtacgcggtgcggcgagacccgaccgacgacgacatcgccgtgctggagactctgtgggcggtgtccatgggcggcggcgtgctccccgggatctcggacatggacgggaaagacggcgagatggcgtacatgcgtgggagcttcgagcacatcatcggctccaggaactcggagtcgctctacatgatcagcccgcacggcggcgactgcccggagctcgccgtgttcttcgtgaggctatgaaattaatacaccacgcgcgtgcatggccatctctgtttatttttttaaaatctcttgctacctccggcc

SEQ ID NO: 21474 - DNA, 2008 bp, Oryza sativa
  ref <308>: DATABASE ACCESSION NUMBER: AK071754
  ref <309>: DATABASE ENTRY DATE: 2001-12-06
gaatcgagtgcaagaagaggaaagcaagacgcgtcaaatctatcaatcagcttcagccaaagccgagagcccccccaaaagagagagaagcacgcatccgatcgccggcgacgaccgaatctgtgccgggcggcaggaaggagagcggcgatggcagcgatggcatccctgtaccggcgtgtccttccttcgccgccggctgtggagttcgcgtcggaggaggggaagcggctgttctcggaggccctggagagcgggaccttgcaaggcttcttcaacctcatctccgtgttccagacgcagtcggagccggccttctgcggcctcgcctccctctccgtcgtcctcaacgccctcgccatcgacccgggccgccaatggaagggcccctggaggtggttcgacgagtccatgcttgactgctgcgagcccctcgacaaggtgaaggcggagggcatcaccttcgccaaactcgcctgcctcgcgcactgcgccggtgccaatgtccgctccttccgcgccgaccagtccaccatccacgacttccgccaccatctcgtccgctctgcctcctcccaggactgccatctcatcacatcctaccacaggaagcctttcaaacaactggaaccggccatttctctccaatcggcggctaccatgccggccaagacatggcgcttatcctggatgtcgcccgcttcaaataccctcctcactgggttccactcccactgctttgggaagccatgaatacaactgatgacgcaactggtctactcagggggttcatgcttatctcaaggcacactgcagctccttcattgctctacacagtgcttttgtgcagagttgcagagatgaaagctggaaaagcatggcgaagtattgcatggaagatgtacccgatcttcttaaggatgagagtgtagacaatgttccagcacttctgtcccgcttagtgaaatcccttcctgccaatgctggaaatttgatcaaatgggttattgaagttaggagacaagaggaaggaggatcaggattaagcaaagaggaggaagaaaggcttattttgaaggaaatgatactacagcaagtccgtgatactgagctttttagattagtccgtgaactgcaattcactaagcagccatgttgtagttgctcatattcaagtgatgatgattcctttacccggattgcagcctctgtgtgctgtcaaggggccgcattgctaacagggaatctttcatcaaaagatgggttctgctgcagagaaacttgcttcaaatgtgtacaagtggatggtgatgggcctaagactgtcgttacaggcacagcggtttcaggagtcaatgaacaaagtgttgatatgcttctaccgatatccacattggaaacaagcgtgtgcaattcaaattcaagcaacgaggttgtcaaatatccatctagaacagatattttaactgttctattgctggctttacatcctagcacatgggtgggcattaaagacgagaggctgaaagctgaattccagagtcttatttcaacagacattcttcatgatgatcttaaacgagagatattgcatctaagacggcaactccattatgtgaggtcctgtaaagaggaggaatatggagatcctgtgccacaatcccattaacaatgatgcaaatcgcgcagttggttaccctggagatgcaaaaaaaaggggttagaggaggaactacatactccgtattacctttgtttcgagtgaggacttctcatttttgagacacctgacctgagacggatccgtgtagacatgttcatgttcatcacctgtggtcgtttctcttgttagtgacaactgacaactagcggggaggcacacgctaattgtgcggctggtgtccttgcaaaagtttctcataataacgcaatggcagatatattttcacactttattattaaataaaaatattgaaaagggcaattaaggagtaggataaactctaag

SEQ ID NO: 21475 - DNA, 1028 bp, Oryza sativa
  ref <308>: DATABASE ACCESSION NUMBER: AK071755
  ref <309>: DATABASE ENTRY DATE: 2001-12-06
ggctcgctcgcacacagtccccaatggcctcccggaacgccgacccgccgcgtcaccacccctcgacgccgcctctcctcctcgccatgcgccacctcccattcccgggcgtccaccggccgcgcgcgctccccgccccggacctcgcgcccctcgccgcccgcctcgaagagctcgctgccgccgcggccgcgcacccgctcctgaagccgctcttcgccttccactcccacctcgccgccttctcccagagcaggaggcgggcgatggcgacgatgcgccggcggcggacgacgggcgagtgcccgctgtccggcgagcactgcttcgcggcggtgctgggtgactccgtggccggtgtggtggtgtccagcggcatcaacaacttcctcagcctgtacaacaccgtcctcgtcgtcaggctcgtgctcacctggttccccaacacgccgcccgccatcgtcgcgcccctcagcacgatatgtgatccgtatctgaacattttccggggaatcatcccgccgctggggggaacgctcgacctgtcgcccatcctcgcgttcctggtcctcaacgccttgtccagcaccgccgccgcgctcccggccgagctcccggacccagcaccgccgacgtctcgcggcgcaacctcgtcaagctccgtgctcaccgcaaaccggaggaaatggatgcggagaatccgcccggtaaaatcgcaggaaggagaggaggaaatgtgatgctctatctaggtgggacttcgtttgaaccagtttggacagatggaatcgctgtctcactgacatggtggccatcagactaagagtctgggcatgttcagacgcgaacgatcatcaattaagcaggcggaattgttttggttgtgttgcttcagaagatttttgcttgtacgctgtagaatccatcccattgaggcttcgtgttttctgcatgtatgcagaggaacaacctgcttgactagtttgacatgttccagtcttttggatgagtttgttactttgttgacg

SEQ ID NO: 21476 - DNA, 1258 bp, Oryza sativa
  ref <308>: DATABASE ACCESSION NUMBER: AK071756
  ref <309>: DATABASE ENTRY DATE: 2001-12-06
gatccggagacagtgtcagacaaaaaaatcgtgttcactggccagcctcttctacccttcttctgatcctctcccgtatagccatttcgtcgaacaccttcccgagccgactgccgccgccgccgccatgctcctcgcgaagccccacctctcctcctcctctttcctcccatccacgcgggtgtctagccccgctccgggtcccaaccacgcaaagcccatcgccgcctctcccgcccctcgacgctgcctccgtctcgccgtcacatccgccgcggcgccggctgcttcgtcggcggaggcggcggcggcgctgagccgcgtggatgtgctctcagaggcgctccccttcatccagcgcttcaaggggaagaccgtggtggtgaagtacggcggcgcggcgatgaagtcgccggagctccaggcttcagtgatccgcgacctggtcctcctctcgtgcgtcggcctccaccccgtgctcgtccacggcggcggccccgagatcaactcctggctgctccgcgtcggcgtcgagccgcagttccggaacggcctccgcgtcactgacgcgctcaccatggaggtcgtcgagatggtgctcgtcggcaaggtcaacaagcacctcgtctccctcatcaacctcgcgggcggaaccgccgtaggtctctgtggcaaggacgctcgcctcctcaccgcgcgcccctccccgaacgcagcggccctcggcttcgtcggcgaggtctcgcgcgtggacgccaccgtcctccacccaatcatcgcctccggtcacatcggtcatcgccactgtggccgccgacgagaccgggcaggcctacaacatcaacgctgacacggcggccggcgagatcgccgccgcggtcggcgcggagaagctgttgctgctcacagatgtgtctggaattctggccgaccgtaatgaccccgggagtctggtgaaagagatcgacattgctggggtgcggcagatggtggccgacgggcaggtagctggtgggatgataccgaaggtggaatgctgcgtgcgtgccctcgcacagggcgtgcacactgcaagcatcatcgatgggcgtgtcccgcactcgttgctgctcgagattctcacagatgagggcactggcactatgatcactggctgaggtgattcatcccgtcgtggtattctccggtgcctctcttctcatactgtaatgtaatttgcatttgatatgcctcatgattgcaataagaattgtattcc

SEQ ID NO: 21477 - DNA, 945 bp, Oryza sativa
  ref <308>: DATABASE ACCESSION NUMBER: AK071757
  ref <309>: DATABASE ENTRY DATE: 2001-12-06
gaggatcgatcgagctctccccccctctcactcacctcggggggcgcggcggtggggggctagggatttgagccggatcgcggcgagcttgaaggggcgcggactgaggcggcgagaggagcgggtttccggttcgggggaaggaggggaggagtagtaggaggaggaggaggagatggtgctggtgctcgcgctcggggatctgcacgtgccgcaccgggcggccgacctgccggccaagttcaagtccatgctcgtcccgggcaagatccagcacatcatctgcacggggaacctctgcatcaaggaagttcatgactacctgaaaagcctttgtctctgatctccatataaccagaggtgaatatgatgaggatgctcgttacccagagactaagacacttactattggtcagttcaagctagggctgtgccatggtcatcaggttgttccatggggcgatttggactccctggcgatgctccaacggcagctggacgtggacatcctcgtcacagggcacacccaccagttcaaggcgtacaagcacgaggggggagtggtcatcaaccccggctccgccacgggcgcctacagcagcatcacctacgacgtgaacccgagcttcgtgctcatggacatcgacggcctccgcgtggtcgtctacgtgtacgagctgatcgacggcgaggtcaaggtcgacaagatcgacttcaagaagacggcgacgatgcacgcctgaccaaaaaacacatcagaaaacccttccccgtcctgcccagccctgcccttgtttttagttaccctttacccttcttgcttgattcagagatcatcccattttctcaagcttccttttcttcctcgctctcgtccttgtgcaaaagcttgagccgtgtattcagattagttaataataaaagatcgtcaagagttgtcatggc

SEQ ID NO: 21478 - DNA, 1279 bp, Oryza sativa
  ref <308>: DATABASE ACCESSION NUMBER: AK071758
  ref <309>: DATABASE ENTRY DATE: 2001-12-06
gattcggttggtcggctcgcgatcgcacagccggagaccaaatcggataagctcgccggagtaatcgccgccgatgccaccgccgccgccgccgctcctcttggccgcggccgttctcgcttcggcggcggcggcactcgctgaccctcctccccctccgtccccgacgccgtggccggagcggttccacgcggtgcttttcacgaacctgacccagacgagcggcggcgggaagctgcagatgaccgacctctactacgactggcctggggggcgcaacctcaacctcgtcgccggccagctctccggcgacccggtctacgacgtcgagtggaccaacggcacctcctactacttcgactccgcctcctgccgcaccttgctgttccccgtcggcatcctgccccccgactggctcgccgccggcgccgcctacctcggccgcgaggccgttgacggcttcgactgccacgtctggaccaaggtcgacttcatctggtactacgaggacgtcgtcacccaccgccccgtccgctggaacttctacaccgggatgcagcagcatgtgatgagctttgaggtgggtggagccctagaggattccaagtggcaggcaccggcatactgcttcaacgatcaagaagccgccacaaattccgacaccgccaacgacaatgaagacggtgaggtcgatgcgatgagcagcctcctcaagttcttcagggctcagcaaacagccgtggcagcagtatgactatgagcaagacttatcacttatgagaatcttacttcctccgtttcatattataagactttctagcattatctacattcgtatatatgttaatattaacatctacatgaatatgggtaatgctagaaagttaggggctgtttggatgacttccctagtttaccacaaaatatttggcaaagtgtggcatgccatacattgtatagctaagaatttgttggcaacaatcgtggcaagttatggcaaaaaaaaattactcaatgacaagtgggctagcttgctaaaaaattgtggcataactcacttgtggcatgaaacaaccactaggcttaattggtcaaacttgattgccacaactttggcaaaggttggcactcaaccaaacaaccccttataacctgaaacggaggtagtagcaattatccattggcggtctggtccagtctgttcttggatcatgttgtaataatgcataaaaagcgtttatgtatatactccccttttatgtaaccaagctcatatatt

SEQ ID NO: 21479 - DNA, 1611 bp, Oryza sativa
  ref <308>: DATABASE ACCESSION NUMBER: AK071759
  ref <309>: DATABASE ENTRY DATE: 2001-12-06
ggctcgccattttccccaagctcccgaagcgatttccatttcaactgctcttcctcccttcgcagcacgcacgtcgccgtagccacatggccgacccttccagatcctcccccaccgcggccgccgccggcgacgccctcctggcggcggcggcggcgcccggtgacgcgccggacgcgaccgccctcgccgtggcggccgatgcggacgcggagttcgggttccagcgcgcggagctcgggacggagaagctggccggcacggtgcagttccacgagcgccacgtcttcctctgctacaaggggcccgaggtgtggccgtcccacgtcgaggccgcggagtctgaccgcatcccccgcctcctcgccgccgccatcaagacccacaagtcggacttgaagaagaaaaccaaattgaccatttgtgaaggagaagatggcactgagtcatccaatggagacgtgttgatctttccagatatgatcagatacagagggctgacccactttgatgttgacaactttgttcaagaagtgcttgtgaaagatactgaatggcttcctggatctcctgaggctataaaaggttcctatgtttttgtttgctgccatgcaagcagggataagaggtgtggtgtctgtggacctgctttgattaagaggttcaaggaagagataggtgtacaaggccttgctgatcaggtgtcagtcagtgcatgctcacatgtgggaggccataagtatgcaggaaatgtcattgttttcagtgcagatgccaagggagaagtgactggtcattggtatggttatgtttctcctgatgatgtgcctgtcttgctacataaacatattggacaaggagagatcgtggaccatctatggaggggtcagatgggtttgtctgaagaagagcagaggaaagccctggagtctaaacacgtgacaaatggtgtgaccgaggatggtgcccatgaatcccctgaagaaactaccaacggttctgcttgcaaccctgtcgctgcaggtggttgctgccagggcaatggaggctttacctgctgccagagtgatctgccaaaggaggataagagcatcacagctgagcagaaccagaagagctccgagaagggggctgacaaagagtgtgctgctggcagcaagaagaggcacatgaagatgtgttccatgccaacctggtttgagacatgggaaacggctgacacctatgctgctcttggtattgttgcagctgctgcatcggtgttcgtcgctttcaggatctacaagaacctcaattgagaatcctcagaacagggctaggttttgtgcactaaggacagtctactgctgtaaaacagtctgctgtgagaataatatactacgtgtgcatagtaatgcaagattagaactttaaagtagctaatctgaagaaagtgaccaaagttgttttgggtaatgtcgtcctcatgtgaaactctgcttaatctccaagttttcccacgccttgcctatttgtttaccttcgcaaggcagtgaccctgctgttcgacatgacgatgttatctttattttgaactggaggtgttcttcagcatgtggatgcatgctattc

SEQ ID NO: 21480 - DNA, 2257 bp, Oryza sativa
  ref <308>: DATABASE ACCESSION NUMBER: AK071760
  ref <309>: DATABASE ENTRY DATE: 2001-12-06
gggcgcaaatcacaagcgaagcaaagcaaaacacgccttcgccttcgattcgattcttctccactccggccatggcgtccgccgcgtcctcctcctcgtcgtcgactcaattcgacgatgcggcggcgaggcgtcagcagcagctgcagcagcagcggaagccgccgttgctgatgctgctcccgctcatctacgccccggtgctccccctcattaggattgggttgcggcacaacccggtgtggagggatcgcctcttctacggcgtcctcgccggcgcgttcgcccacggcacctacctcatgtaagtgtttgctacattgcgcacccgagctcctgtatgcagctatgcaccgtgtatttgcttgtgatggttcatgttcatgtatgattcgtcattcatgtacaatgccaggttattgtgattgatatctccctggttttattagctgtctgatatgcacgaggtaaagcgatgtattgttctgattacttcgaaggggatgtgtatgtgtttgtgcctagttgttatcggtgaggcttctcagaaagggtgtaattccgttagaatacgatatggcagctgttgagtttttcagcacgtgtagtatgtatatatggctaatatatctgtttgttaagtagtagtatatatgatagctatgcaatgacctgttctctgttttctctaatacaaatgcttcacgcggactgttgtaccataaatgatttcaatgtctgccgcttgccaaaaatctgtagttgtgatcactgcaaaggaactatttttagttcttctcccatgctcacagaaaaccttgggggaagatttttggaactcagtacacaacaacagttttatattgctttgagtataaccaaaattgatgtgattgggtgacttggcgagtcagccattactgattaagcacatgaagcatggattctttagtagaatttaatctcagcaatcttgacaatcaactatggtggtataatcttctttacagttttttccccgattactgcaaagggaagacttgatgtatttgcgcctactgcctagttttcacttaggatgttactagtaagggttgtgatattttggcaatgaattgacttgtatcacaacacttgagtgcttgtaccttcataatgtgagtttgagcatgaggaaaggtagatgcatccaatcgtagcagtattttgttttctgcttcaaccgagttgctgcacatggtttctgccattatatggttccagactttttggggcttactaatgtaatactgctgtggaagtgtggagttgaggtcactgcagagaaattttagtctagtgtatatccactttagatatgaatttagtaattgagtattgacagattttatataaaagaaggaagtttgggcctaaataactactcccgccgttattaaatgtttgctgctgttgacttttgggcatgatgtttgaccgttcatcgtaaatgtgcaaaaatataaggcatgcttaaagtacttttagtgataaaacaagtcacaacaaaataagtgatagttttttgaataagacagatgatcaaacgtcatgtccaaagatcaacatcactcatacatttgaaaatggaggtagtaggccataattttgggcatgttactgcttgattgtggtgatcatttgatctctgcacaaatctattcttcatatcatgctagaggttgggttattgaagccataaatattcaacaatatgtcattatggtgagcctgtcatgtttgatggtgaggcaaagaattttgttgttgacttgtttgatgcccttccaatgtttttaaaacttgttctatccctatcattgaagtaagcagatataccttcttcgcaaggataagcataggttactctaacgccataacagagggatctattgggatgttaattaacgtaattcacaatagatgtgcttatcttcttatctttgatgtactttcagatcggagctatatgacgtagagagcaagtgaatcatatctctccaagtataaagtcaagggtatccatcggcagattttgacttgattgtaagtcatcaactgttaatgagagctgtccggtttttcaggttgataaaatggaccatgtatctatcatttttgttaatccatttaggcttttatggttgctgtaatgatagaatattggagcacacataataattctgactctggagcaacatgtccggcatttttttcc

SEQ ID NO: 21481 - DNA, 2374 bp, Oryza sativa
  ref <308>: DATABASE ACCESSION NUMBER: AK071761
  ref <309>: DATABASE ENTRY DATE: 2001-12-06
gcgtgaccaagaaggagaagagagggaggacctgcagccgttgcggtaaaaggaagtgggagagcaaggaatcatgcattgtttgcgacgcgaggttttgcagctactgcgtgctcagggccatgggctcgatgccagaagggcgcaagtgcatcacttgcattggccagccaatcgatgagagcaagcggtcgaagctcgggaagggttcgaggatactatcacgtctgctcagcccgttggaagtaaggcaaatactgaaagctgagaaggaatgccaagcaaaccagctccggcctgagcaactcatcataaatggttttcctcttaatccagatgagatggccagcttgcttagttgccaacggcctcctcaaaagctcaagcctggaagatattggtacgacaaggagtcaggcttgtggggaaaggaaggagaaaagccagacagggttgtcagcactaacctaacctttaatggaaagcttcagcccaatgccagtaatggcaacactcaggtttatatgaatggaagggaaattaccaagattgaactgagagttctgaagattgcacaagttcagtgcccccgagacactcacttttgggtttacgatgatggtggctatgaggaagaaggccaaaacaatatcaaagggaagatatgggaatcgcctgtgacacgttttgcatgtgccttgttttcactaccggttcctccagcaaactctgacgaaccaaaggacgaagctccttattcagcaagaactgttcctgattacttagatcagaaaagaatccaaaagcttcttattcttggatcgcctggagctggtacaagcaccatattcaagcaggcaaagttattatacgacactaggtttacccaagaagaacttgatagtatcaaacttatgatccaaagtaatatgttcaagtaccttgggatccttcttgagggccgtgagcgttttgaggaagaggctttggctggatcgaataacccaagctcagaggatgagaatacgcagcatgatggaaataaatcgaatggttcagattcttgcatatactcgataaatgcaaagctgaagaagttctcggattggcttttggatataatagcaatgggagacctcgatgcattcttccctgcagctacgcgtgaatatgctccaattgttgaggaaatgtggaaggatcctgccatacaagcaacatataaaagaaaagacgaattgcattttctccctgatgttgccgaatatttcttgagcagggccattgaagtatcaagtaatgagtatgaaccttcagagaaagatataatatatgctgaaggagtaacacaagggaatggattagccttcattgagtttactctggatgaccgtagccctatgtcagaaatgtacactgacaatcatgagcctcactctcagacactaaacaaatatcagctgattagagtaagtgccaagggaatgaatgagggatgcaagtgggtggaaatgtttgaggatgtcagcatggtaatattctcggtagcactcagtgactatgaccagctgggggccccttcaagtggtggcaacagtccccttgtgaataagatgatccaaagcagggacttgtttgaggctacaatcaggcaaccatgtttccgcgacatgccatttgttcttgtgctcaacaagttcgacctcttcgaggagaaaatcgggcgcgtcccgctctccacctgcgagtggttcagcgacttctgccctctccggactcaccacaacaatcagtcgctggctcaccaggcgttctactatgtcgcgatgaagttcaaggagttgtacgccgcctgcacggatcgcaagctgttcgtgtggcaggcgcgagcccgcgacaggctgaccgtcgacgaggccttcaagttcatcagggaggtgctcaaatgggaggatgagaaggatgggggtgggtactacccagatgagtccttctacagcaccacagagctcagctcctcacgtctgatcagacaagaatgatgcacattttgcccagaaagaaactggagattgttgctcttcttttttcagtagtattttttcccctgggtgatttgcaaccaatttcgttctgtgcaggcagagatctcgttactgattgtattgtatagtagtattgctgtattagtttgtcagatggagatgatgattattgtgtgttctttatagatcattaattaatacactttcatactaatttgccagtcaaatatagtggaggacgagaaatggttagcttgtaaaatcattatcatgcgtgttttgtgacttgtgtaagttgtgttgtgtgagcttataaaatcatttcctgg

SEQ ID NO: 21482 - DNA, 1136 bp, Oryza sativa
  ref <308>: DATABASE ACCESSION NUMBER: AK071762
  ref <309>: DATABASE ENTRY DATE: 2001-12-06
gatccatccagtgtgagctccgtttcttgctccatccatccatccatccaaggagtgtggaacgccacacgtattttttttttatctatgctaatctgatcattagcagaggagagttttagcagtaggattggattaaattggagtagtttcatagtttgtgtgtagtgatcttaattagctttgattagacagacagtacagtagagtagaggatgttggctgtgttcagcggcgcggtggtggaggtgccggcggagctggtggccgccggcagccggacgccgtcgcccaagacgcgggcgtcggagctggtcggccgcttcctcgccgccgccgagccggccgtgtccctgcagctcggcgaccttggccacctcgcctactcccacgccaaccaatccctcctccgcccaagatcctttgcatcaaaagatgacattttctgcctgtttgagggagtcctggacaatctgggcaggctgagccagcagtatggcctgtccaagggcgccaatgaggtgctcctggttatcgaggcgtacaagacgctgagagacagagcaccttaccctgctagcttcatgctctcgcagctcaccggcagctacgcctttgtgctcttcgacaagtccacctcttctctccttgtggcctctgatccagagggcaaggtgcctctgttctgggggataactgctgatggatctgttgccttctctaacgacattgacctgcttaaaggatcatgtggcaagtcacttgcacctttcccacaaggttgcttctattccaatgctcttggaggcttgaagtgctatgagaacccaaagaacaaggtgactgctgttcctgcaaatgaagaagagatctgtggtgcaaccttcaaggttgagagcgccactgcaatcctcacagctctgcactaggatgatgtttcggtgtccggtcgttgtacatggtggtggtgtaacatagttgcaactgatctgtatcatcttttcataaaagagaagtactgcctgcatggcaagtgcttcagtgttctgggtgtgtagtatgatctctgtacctttgttgttcaagcaggaatgaactccaggccggctgtgatcagttgaatgtagttctgttgc

SEQ ID NO: 21483 - DNA, 2128 bp, Oryza sativa
  ref <308>: DATABASE ACCESSION NUMBER: AK099191
  ref <309>: DATABASE ENTRY DATE: 2002-08-28
gggtccctcgcctcgcctcgcgtctcctcctcctcctccttcccctccccgcctccaatttcttcctactcctcccgcctccccgcgaagcttccccacgcctcagccgccaatccagccctagtgtggcggcggcggcggcggcttctagaagccctcctcttcccggactccaggatggcggcggtggcgggtagcgcgagcgcaggcgccaacggttcggcggcggcgcatcgggtgggggcgccgacgaaccccatggcgacggcgctgctcaccgatcagtaccagttctccatggcctacgcctactggaaggccggcaagcacgccgaccgagccgtgtttgatctgtacttcaggaaaaatccatttggtggagaattcactgtttttgctggtcttgaagaatgcattaagttcattgcaaattttaagttcacagaagatgacattttgttcctgcaatcagtcatgccaatgtgtgaggatgcgttctttgattatctcaggaaaaccgactgctctgatgtggaagtgtactccattcctgagggttcagtggtttttccaaaagttcctttgatgcgagttgagggtccagttgctgtggtccaactacttgagacaccgtttgtaaatcttatcaattatgcctctttggtaacaacaaatgctgcgagacaccgccatgttgctggaaaatcaaaagttttactggaatttggtttgagacgagcacaggggcctgacggtgcaataagtgcttcaaagtattgtttcatgggaggttttgatgcaaccagtaatgttttggctggaaatctgtttggcataccacttcgcggaacacattctcatgcttatgttagctcatatatgagccttgatgagatcccagacaagtccctcaagagcaaagatggttcaagagtctgcaaagattttgttagtttggtaaaagagtggcttcaaaagattcagttagcagattcgttatgtggtgtatttggtgagacaaatcaaagtgagctggcagcatttgcatcctatgcattggcttttccgaccaattttctagctcttgtggacacatatgatgttatgcgaagtggaattccaaacttctgtgcagtagcgctagcactccatgacttagggtacaaggcatctggtattagattagattctggtgatctggcctatttgtctattgaggcccgtaaagtgttccgtacactagaaaaggagtttaatgtgcccgcttttgggaagatgataattactgctagcaatgacctgaatgaggaaacaattgatgccctgaacaagcagggccatgaagttgattcctttggtattggaacttatctagtaacatgttattcccaggctgctcttggctgtgtctttaagctagttgagataaacagtagacctcgtatcaaactttctgaggatgtggctaaagtatccattccatgcaaaaagcgatgtttcagattgtatggaaaagaaggctaccccttagtagatatcatgatgcgtgaaagtgaaccatcaccgaaggctggagaacgaatcctttgtcgtcatccattccttgaatccaagagagcatatgttgtcccccagcatgttgaggagctcctacaatgctactggcctggtacatcaaataaacctagggtagagttaccctctctagaggagatcaggggcgctgcatgcaacagcttgaaaaacttcgaccagatcacatcaggcggttaaatccgacaccttacaaggtgagtgtgagtgcaaagctgtatgagtttatccattccctatggttgaatgaggccccagtaggagagttacaatagatttctacagaagttgggaaaaacagagaagcgtattctttgaagcatagcaaaatagcaatacatcaaagaaaagtagagctctgttgtaaaaaaataaaaaaaatcgtcagttcatgggcccaaccttataggatttttgctccccaatttttattagtacaaactagttatcagtatagagataggccaacctatctgactgtacatccatgatccattgtactatacgtcgttatggaattgaacatcctttttgg

SEQ ID NO: 21484 - DNA, 1432 bp, Oryza sativa
  ref <308>: DATABASE ACCESSION NUMBER: AK071763
  ref <309>: DATABASE ENTRY DATE: 2001-12-06
gatacgccagagcgctacaaaatggcccacgccgccgcggccacgggcgcactggcaccgctgcatccactgctccgctgcacgagccgtcatctctgcgcctcggcttcccctcgcgccggcctctgcctccaccaccaccgccgccgccgccgcagcagccggaggacgaaactcgccgtgcgcgcgatggcaccgacgctgtcctcgtcgtcgacggcggcggcagctcccccggggctgaaggagggcatcgcggggctctacgacgagtcgtccggcgtgtgggagagcatctggggcgagcacatgcaccacggcttctacgacgccggcgaggccgcctccatgtccgaccaccgccgcgcccagatccgcatgatcgaggaatccctcgccttcgccgccgtccccgatgatgcggagaagaaacccaaaagtgtagttgatgttggctgtggcattggtggtagctcaagatacttggcgaacaaatacggagcgcaatgctacggcatcacgttgagtccggtgcaggctgaaagaggaaatgccctcgcggcagagcaagggttatcagacaaggtctcctttcaagttggtgatgcattggagcagccttttcctgatgggcagtttgatcttgtctggtccatggagagtggcgagcacatgccagacaaacggcagtttgtaagcgagctggcacgcgtcgcagctcctggggcgagaataatcattgtgacctggtgccataggaacctcgagccatccgaagagtccctgaaacctgatgagctgaatctcctgaaaaggatatgcgatgcatattatctcccagactggtgctctccttctgattatgtcaaaattgccgagtcactgtctcttgaggatataaggacagctgattggtcagagaacgtcgccccattctggcctgcggttataaaatcagcattgacatggaaaggtttaacttctctgctaagaagtgggtggaagacgataagaggtgcaatggtgatgcctctgatgatcgaaggatacaagaaagggctcatcaaattcaccatcatcacctgtcgcaagcccgaaacaacgcagtagtaccctagtagtgaaattacgctcctgctatcttctccatcacgaataatgcaaattctgacgagttagcacctactgatggcgatttgttgatttggggaacagccagtgcactgttaccacgtcattgattttgtactcgtcagacttaaaaaaaaaatatccatgaatgtgcactccaaatacgtcaagaaattcttagatcttcagaccaactcgtcagctagaggtggctaaaaagctcatttagctccctcggtgcaagattgctttgattgacctagttttcttcttaaaactaaaactattttactttggatgg

SEQ ID NO: 21485 - DNA, 1498 bp, Oryza sativa
  ref <308>: DATABASE ACCESSION NUMBER: AK071764
  ref <309>: DATABASE ENTRY DATE: 2001-12-06
ggcacgcctctgcctctccccagccactacccctcccctcccctctcctctcttccccacgcaaccggggataaaaaaaggggagcttgaacgggacgaggcattcaggcatggatactctgctgggctccgggagattcttggcgcggcggcccccgctcgcgctcgcccctcgctgctcgcgaggatccccggagaaaggcggcggcagcgacaaaggtgacacatcatccactgactgggacaaagcttggtctacatttaagaagaaagggaagaagaccctattttcggagttctcaccaaacaagtatgtgagctggaacccacgacgcagcgagtatccattatcagaagaggttgatccaatcagaagaacggagaggtctaacctaatgttgtggacaagtccgaaatttaccttggtaatggcgattgtcatcgtctcgacattgctaatctatacaatagttgttccacccaagtaactgaagaagtgacaggcatgagttgaactgtaagagaaacattctacttgcatgtttgtactgtacatttgtttgtactagtattagacaactatagcgtttctattggcctgttgctttaattgcatgcagatggaccatgatagtgcatccttcacttctctttgttggttttcttcactttgtgtttcaattggctcctctctagaaaatctttttgttaaggaactcctcactagaattttatcacagcccagaattatggggagggactaagtagaatattatgttgatcagtattcagttagaatatataagccacgctactgatgtgtgttagtatcagaaaaaatctcagttactgtgtgatcgttggatagtaagtagttgtaaaaatgttgtatgaatcaatggtgtgtagtatttattgttggggttgcttgggcaagtgggcatgtgcaaaatgtctagtgctgtatgtaatacatactgattcagcccataagaagcacgtttttcattacagccaatttgaagtcaaaaaagccagttcattagcttcgtataatagtaatgcctagataaacaggaatcttgcttagatgtaaagctatttaattaaccttcccgtccactgaataattagcgtctgtcgcttatattggaggcatagaaaatagtctgtcaatatcttatagttaaacgattcgatggaatgcgaatctgaataaacatggtcagggcatcacatgtaatcttgaagacttggtcgtgacatctttatattcagcatccgggattaaatccgacgatggatttgtcatctttgtgtataataaaaaggatttttttttctttttttataattgaacaatgcccaagttttataggttgtggcactgtttgtccagtgaattcattgttcaggggctctggatggattttgtgttgtctgtactgaaccttcggagaatattttgtccagcgaattcattgtttacattttcagc

SEQ ID NO: 21486 - DNA, 1425 bp, Oryza sativa
  ref <308>: DATABASE ACCESSION NUMBER: AK071765
  ref <309>: DATABASE ENTRY DATE: 2001-12-06
tatctcgggatctcgcccacccaccactccaccccctctcctctccgtgcgccgccgcagaattcctcgccgccgccgccgccgccgccgccgtgaggtccatcgagatcgcgaccggagcaggttgcgatggcccgcgtgtacgtcggaaacctggatccccgcgtgacggcgcgggagctcgaggacgagttccgcgtctttggagttcttcggagtgtatgggtcgcaagaaagccaccaggttttgcattcattgattttgatgacaggagggatgctcaggatgcaattcgtgatatagatggcaagaatggatggagagttgagctgtctcgtaatgcaagcagtggtcgtggtggccgtgatcgatatggtagctctgagagcaagtgttatgaatgtggtgagactgggcactttgctcgtgaatgccgtttgaggattggttccgggggtctaggcagtggaaggcgtcgtagcaggagccgcagccgcagccgaagtcccaggtaccgcaggagtccaagctatggcagaagaagttacagccctgcagggcgctctccaaggcgtcgtagtgtgtcaccggctcgtgcacgcagctatagcaggtcaccacaatacaaccgtggccgtgatgaatctcctgcctatgataacggatatcgccgcagcagaagttagagctgaacctgatgtctaaagactgctgttacaaatgttactttgtgggttgtcagctatgaacaatgccctactccaaatatcatcatcaactctggactttgattaaggcatcggcctgcactgcttaaacgactcggccgactacggctaccagttatatcttcgtggttgtgttcttcgctcttcattctacgcgcgccctcgcctgcttcatgcaaacgtcatacagccccattagttgctgcctacaacacctcttcgtgatccatatacttcgttggagatgctgctcatcagaaaacagtaatcgccttcttttatcgtaataaaaatttggtcatattgtcttcggaacaacagtaagtgcagcatctggaagtattggtgaaacaaagttcttcgtaggcatagactccagaaaatgaatctgcaatccgaggagctgcagtattcagttggatgatttacacccctgcccagtccgtcacgccttgtggcagccagaggttttgctctccatgatcttccttctgcactcgctcagcctgcctcagcctaccctgcgtgctgccgtctagccaagagccttcgccaccactgcttccccgacgtcgccttcgtttccattgcttccccgacgtttgatttcatttgcttagcatttgttcgtcaaattaatgtggtgaatggttatttcttagggatctacgggtgaaaaatgccagatgttattct

SEQ ID NO: 21487 - DNA, 1447 bp, Oryza sativa
  ref <308>: DATABASE ACCESSION NUMBER: AK071766
  ref <309>: DATABASE ENTRY DATE: 2001-12-06
gtcctccctcccagacaggctccattttccactctcccctcctggcctcccacctcccatccggatctcgccgcgccgcgccgcgccacccttttccgcgccgcgtcgtcgggcatgggcgtcgccaccaacggctcctcctcctccacctcggagtcggcggagaccgcgcagtcgcaggcgtacaagttcctcatctacggccggaccgggtggatcgggggcctgctcggccagctctgcgccgcgcggggcatccccttcgcctacggcgccgggcgcctcgagaaccgcgcccagctcgagaccgacatcgacgaggtcgcgcccacccacgtgttcaatgccgcgggggtcaccggccgccccaacgtcgactggtgcgagacccaccgcaccgagaccatccgcgccaacgtctgcggcacgcttacgctcgccgacgtctgccgcgcccgcggcctcgtgctcatcaactacgccacgggctgcatcttcgagtacgacgccggccaccagctcggcacagggatcgggttcaaggaggaggacacgcccaacttcgtcggatcattctactccaaaaccaaggccatggttgaggaactgctaaaaaactacgagaatgtatgtacacttcgtgtaaggatgcctatttcatccgatctatccaatcctcgcaacttcatcactaaaatcgcccggtatgataaagtggttgatataccaaattcaatgacaatattggatgagcttcttcctatctcaatcgaaatggcaaagagaaacctcactgggatctggaatttcactaatcctggcgtggtgagccacaatgaaatattggaaatgtatagggattacattgatccgaatttttcttggaagaactttaccctggaggagcaagccaaggtcatagttgcaccgagaagcaataatgagcttgattgtaccaagctgaaggcggaatttccagaacttttgtcaatcaaggattctctggtaaggtatgttttcaagccaaatcagaagacgtccaaggcttgacaaatggaacggtctgcacacaatgttgttgttatttattccatataaattgacatttctctccctggtgacaatcaataagcatgcatgatgactctttccctgtgtgtgcattgtttttgaagcagataggtttctcataggaagtcataccccgtcccgtcatattgattacatagaacaaggcaaggtgccatatagttcaacttttgtatgtcttctggatcgtatgaataccgtgggaaatgggtaagggtggagattcctctgtttgtatcttacaattggaatacagtcagttgcactgcgtgttgttcaataggaaatggctttggactttccttcatgtaacatgtaatgtaatacattgaattctcagctaatatattgatatttg

SEQ ID NO: 21488 - DNA, 1408 bp, Oryza sativa
  ref <308>: DATABASE ACCESSION NUMBER: AK071767
  ref <309>: DATABASE ENTRY DATE: 2001-12-06
gatggaacaataaagaactcttgcctgcaactgtgcgtggccggtggcgatggcgactctaccctagtgtattctccgctctgccgcctccaccaggaccaccaccaccttcgctacccggcgccgtaccctgcgcagccgcggggcacctcggcggcgtaacgaggcgagggggatcggacgcgcgcgcgcgcgcgaggagaaaggccgggggggatcagcgatgagcttcgcggatctggaggccggcgcggtgcgggcgcccaggagggcgcggggccccgacgccacgcgcgcgctcgtcttccagatcaccaccgccgtggcctcctaccgccgcctcctcaactcgctcgggacgcccaaggacacccccgcccttcgtgaccagctgcagaagactagtcataacattcttcaattggcaaaggatgcgaaggagaagctcaggagagctgctgaggcagacaagaacgccgatactagtgcagacaagagggttgctgacatgaagcttgccaaggattttgccacgacgatggaggagtatggaaaacttcaaaatcttgcgattcaaagggagatggcatataagccagttgttccccagacatctcagccaaactatactacaggtggtatagaagccagggattctggtaaaattcctgaacagcatgcgctactcgcagaatcaaagaggcaagaggtgctgcaattggataatgaaattgttttcaatgaagctatcattgaggaaagggagcaagctattcaagatattcaacaacagattggtgaagtacatgaagcatttaaggatcttgctacacttgtgcatattcaaggagttacaatcgaggaaatcgatacaaacattgagaattctgcagcagcaaccaaagaggcaaagacagaactcgcgaaagcgtccaagactcagaaatcgaattcatcactgctctgcattcttctggtgatcttcggggttgtcttgctaattgtgataatagttttggcaacttgaggcgcgacgtagagattactggtgcactcggtagcatatttaaaagccatctgcatcggtccttgatcttctcgaagtgcaaagactgtcgctcacgaaacggtacaagtttgttgtttgttataggttttctgaattgtgagttcatttcctgatgtcatgcgtgagtctttttttcatggcttgccttgagtgaacagtgatgctcttttattttgccgacgaactttcactttgtaagtattttcagtgaataaaaacaaaagagcaactaagttctgtcttgtaaacccccgtaaaataaacttgtcgttgtatcatcaacgccctcacacttcagtggcttgggtttcatacgtggaataaatatggattgtgtct

SEQ ID NO: 21489 - DNA, 993 bp, Oryza sativa
  ref <308>: DATABASE ACCESSION NUMBER: AK071768
  ref <309>: DATABASE ENTRY DATE: 2001-12-06
ggttttgtctgaatttctgaatgcagctgaggcagaaatcggtgagagtggtaggtgtttgttgcgatcgttgaagcatgaagagcagcagccaagaagcgggagaggaggtgtccgagatcagcagccaggcggcgtccaacaacaacgagacgtgcaactcctcctccggcaaggtcagcctcgacctgtcgctcaccgtcgccgccgccgccgcggcggctgcctccgccaccgagtcgagcaccacggacagcggcggcacgcggccggcggcgacggcgacggcgacggcgcgcgagccggcgcgggtgttcacgtgcaactactgccagaggaagttcttcagctcgcaggcgctgggcgggcaccagaacgcgcaccggcgggagcgcacgctggcccggcgcgccgtgcggctcgacgcgttcccctacggctacgccgacgtggcctcgctgccgctgtacggcgccggcctgtaccccatcggcatccaggcgcacgcgtcggtgcaccaccaccaccctggcgtggcggcgccggcggggcgcgccgagttgaggtcggcgcgcgcgctgctcggcccgatgccgttcttcgtgcaggcggcaggcgatgaggatgccagcttcgggtggccgggcagcttcaggccaccgcccaccgccgccaccaccatccccgccgccgccgccgccccggtcgccgtcaactccggctcctccaactccaaccacggcggcagcgtcgtcgtgcaggccgccgccgacgagcccgacctcacacttagactctagctgtcccatccatccatccattagtctggtgtaacattcatcaggttgctcctgatcatctcctccgtttgtgagtagaattcttgcttgcttgcttgcttcgctctcgatcctgctgcttgagcttgacatcaaccaacctgctagtaaattactattgcttcaaatgcatgcgtggaagtattgtttttgt

SEQ ID NO: 21490 - DNA, 974 bp, Oryza sativa
  ref <308>: DATABASE ACCESSION NUMBER: AK071769
  ref <309>: DATABASE ENTRY DATE: 2001-12-06
gagggcgatcgccctggcataacgccgggggctactgtcggtgacatgggaccgggagtattatgacttagagacttgaggcagacacgatcacccacgtggcctaaccccctcgggggggggggggggggtcgggcccgagggtgatacggccgcccttctctttgtctccccgaggggtcggaccgctcccgtctcggccccgagggccgaggcgccccgaccccttgtgggttttgcgccgcgtatatggggtaggtgagcatagcggggctcacctaaccacatttattgcggtttggacgagcgcgtcacgccgcatgtaacgaagtgcagcgcgctcgtttatccggtctgtgatcagtcacagaccggtcagatcatgggttaggtggcgacaggcggtctgacgcacgcctcgccccatcccgtcaggacaagagcctccaagcactcgtccctagccggagccggcgtgttagctcctggagatggcacgttggttccggtcagatatatgccaggcttcatcctaaccattacaggcaagatattgtatgaagaagggcgaacatgcagattgttaaactgatacgtggtggacaagaatgaccgatttgtgaccggtctgacaatggtcatgtcgtcagcagacagccatgttcccacgtcgcgcctgcttccggcggaagtggaggtaggtatgggccgtcccatcagaaggtcattcggacggcagccatacaaatctccgtccattaatgaagagaagggaagtaagaaagagagggagagatggtgcatgtggtatccccttgagatataaaaggaggaccttgcccacttagagaaggaggagaaaaaaggatcccagaacgattgggggctggctcgcactttgtagcttcttcatacacagatccaccaaaacacaggagtagggtattacgcttctcagcggcccgaacctgtat

SEQ ID NO: 21491 - DNA, 1121 bp, Oryza sativa
  ref <308>: DATABASE ACCESSION NUMBER: AK071770
  ref <309>: DATABASE ENTRY DATE: 2001-12-06
gggagaagtgcccaccgcttccgcgtgctccgccgcagcaggttgcagcgcaaccggcgacgccgacgagacgagacgatcgaacgaaggccaagcaacctacggttctccccgacggcaagatggaggcgaagctggaccgcatcgcggagcagctgaaggcgctgcccttgctcagccaggtggtcgaggggcaccaacatcgcctcgaggagctgtccaagcagatcgccgttgcggcggcgctggtggaggacgtgaagaaggagcaggcggcggcggcggcgtcgcgcgccgccaggatcgacggctactcgggagggttctttcgtctggcgaagctgaagttccccactttcagcgggacgttcccgcgcctgtggatcaccaagtgcacgcgctacttcgagttctacggcatgccaatgaagatgtgggtttcctgggcttcgatgcacatggaggggatggctgagctgtggatgatgacctatgagaagcgccatgagcgtgattggggtcggttctgtgaggccgtggaggagagatttgggccctatgatcacaagcagaagctcacggcactcttggatctgaggcaggaggggatcatgacagtgagcgagtacagagaccagttcgaggagcgcttgtaccatgccaagctgttcgatccagtctccagcaactgcttcgacgtggcattattcataagaggcctgcgagaagagatcagagataggatgtggcagcaaactcctgctaccgtggatgctgctgcccaatcggctctggtgcaagaggcgttgtataacttggaaatgcagagagctcagagggacccgtataaagaatgagatgccggcctctgtcgatttgctccggtgaactgtgggagtagtgctactgtgttgtttttatcatgtcgatggtctttggttcgattatgctgattagtttgaggaaggtccttgggaattttgggattcagttatttctagcatgtcgatggtctttggttcgattgtggtgctcagtctgaagaaggtccttaggatttttgggattcagttatgcgttgcttctgaagatcttggttagttggttagatgcgaattttc

SEQ ID NO: 21492 - DNA, 3854 bp, Oryza sativa
  ref <308>: DATABASE ACCESSION NUMBER: AK071771
  ref <309>: DATABASE ENTRY DATE: 2001-12-06
gactggtgcgacggtggattcggcgagacgtgttggactcgcaggttgtcgaactccctcttccgctccgccgcaaccactcccgtctccatccttcccaaaccgcgccgcctctccccgtccctcctcctgcgccccaggtgcagccgcaacggcgacgaacgttaacgcggccgccggcggtgggggtatccgccgagactcagtgaccgcggcgccgcagcttcagggcaacaaggaatctgtggaattcaatttttctgcgggatatcggcaagggaggggattaattgattgattggtcgatggaggaggcttctgttacaggggaattgttggagcaagaagctccatcttcttcaatctccggtgtcgattggtcccagcttccggcggacttgctcgtctgcatcttcggcgtgctggaggtcccggatgtcttcagctccggtgtggtttgccgcgcctggcatgccagctttctggaggcccgccgccttggcatttgctccagtaaccctgggccctgcctcgtgttctcttccggcgaccgtgatcctagcgtggtcaccctgcacagcctcaccacggggaagaactactatgtaaccatgccggaccctcctttccgtacccgctacatcgttgggtcttcccatggctggcttattaccgccgatgagcggtccaatctgctccttgtcaatcctgcgactcaggctcagatccccatgccaccaccggagacaatagcgaatgtcaggatacgttgcaatggtgagggagtgccacatggctatgatctttttaaattggatatgtcatcacaagattttgatactgaaacagagccagatgatctttcctgggaagaaggccggttttacttctacacgagggttgtcctgtcagcagatccatccagtggaaactgcactgtaatgatcctgcacttgctacgtaatctccttttctttgcaagggtgggtgacactcattggacctggatcaatgttaatgagctatgttggaactatcatgatgttttgtacaatgacgatgatagattgttctatgcaatccgaggcaatggtgatgttcatgctatcaatacaaatggaccctctccaatattaagggttgtcttagacgccaagagctcacttgtcgattgtgccaagtacattgttctgtcagaattgggtggtcttcttcaagtatggaggtatcatcactatgttaataataataaggagaggaggaccagtgaattggttgtttataaggttgatcttgttgaacacaagcttgttgaacttaaggattttgaagaccatgcattgtttattggtttcaatagctccttcttcctacgagaagaagatttccccatgttgactccaaatagtgtctactgtacagatgatacagttacttatatttgtcattcaaggtttggctttcgagaggttagtgccttccatttggaagatagtagtttcaccgatctactacctattggctcacggttgaattggccacctcctgtttggtttaggccatcattttctaaaggtccactatgacatgattctgcagattgattgatctgatcaatggagcaggtttcttcttctgttaccggtgaattactagagcatgaagctccaccttcgacccccggtcttgattggtcccagcttcctgcggaccttctcatctgcatccttggcacgctggagattccagatattttcagctccggcgtggtttgccgctcgtggcatgccagctatctagaggcttgccgcctcggtatttgctccaataaccctgggccctgcctcgttttctcgtccagcgaccgtgatcctagcatcaccacacttcacagcctcaccacggggaaggatcactatgtaaccatgccggaccctcctttccgtacacgttacattgtcggatcctcccatggagcggtctaatctgctccttgtcaatcatgcgactcaggcacagatcaccatgccgccaccggagacaatagcaaatgtcaggatacgttgcaatggtgagggtgtgccagatggctatgatctttttacaatggatatgtcatcacgggattttgatactgaaacagagccgaatgatctttcctgggaagaaggccgattttatttctataagagggttgttctgacagcagatccatccagtagaaactgcacagtaatgatcctgcacctgctagatgatttcctttcctatgcaagggtgggtgacaatcattggacctggatcgatgttgatgagctatgttgctgctatcatgatgttttgtacaaggacgacgatagattgttctctgcaatccgagccactggtgatgttcatgctattgataccaatggaccctctccaatgttacgggtcgtcctagacaccaagaattcactcatcaataataccaagtatattgttctgtcagaatcaggtgatcttcaagtatggaggtattataaacacgtcaataacgacaggaggaccagagaattgattgtctataaggttgaccttggtgaacaaaagcttgctgaacttaaggattttgatggtcgtgcgctatttattggtttcaatagctcgttcttcctacgggtagaagatttcccaatgttagctccaaatagtgtctactgtacagatgattcaatggaatatatttattgtgtgaggtttggtttccgagaggttggtgccttccatttggatgatagtagcttcactgatcagcttattggctcacggttgaattggccatctcctatttggttttggccatcatttactaaagttaattagatttattgcttcaagttttacatatttcaatttgtttacatctctgtaatttgctattgcataccctattaataatagaactctggtggtagtttacaagttagtatatgtaatgctgctactgcctaacaatatagttggaaatgtaacagatgcattactgaaatcatggaaatcactacaaactatgtataaaaaatttaaaatattgtcaacacaacatatgcaatggaggtgctataatacgccatgtatttttttttaaaaatcgaacttgattctctttagaagggttgaaactcagaaagaaataaaggaataatactaaaatgttccaacttcactttattctgtcaacactattcatgtttctgttttttaattatatgtattctattccaaacaacactgagcattatcttcaaatttttacatgtgtgtatataatagtatgtccttctacttaagttaactttttgagaattttcttagaatgtttacatggtttattgcgaggtctccatgattcactgaatttgtggttttcacctataatcccctgctatatgaatatgttattatccgtctaaggtggcatctctaaaattaatatatacctcccaactatttatttgattgttacaaagattatgcaaaatggagacacagaactttttatttaaaccgtgacctttgtttatacatccacttagatccattaacattgtagtatttccatagtgttctagaccaatcttttgatttttaaacttgtttccgcagcatcacattcagtttctcaaataaagtcagactcatggtgatgccttttgattggttttcaggtcatctttctagtaattctggagattgagtcatgaatacattaatttagcgtggatatctgtacggtcttgctctagaataatttgtaaacagtggcgcgctaccttgtgttatcgtcatgttcaacaataatcatgctaacc

SEQ ID NO: 21493 - DNA, 1141 bp, Oryza sativa
  ref <308>: DATABASE ACCESSION NUMBER: AK071772
  ref <309>: DATABASE ENTRY DATE: 2001-12-06
gatacgaattcaaagcccgcgtgttctcccgaacagccaccgccgccgccgccgccgccgatccatggcgacctcgacggcggcgcccaggcacagctgcgcgaagctctcggtggcggtggaggaccccaaggcgggcggcggcggagccgtcttcgtgaaggccacgtggcaccccacgcgcttctccctcgccgtcaccgacggcggcgccgcgtgggtcgcccaggcctccgacgccgaggtgcgcctccgcgccgagcagtgggaccagcccgtcgccgactacctcgccctcgccgagcgctacctcgccttccagcagccctcctccacctactccttccacgacgccgccaacggcaatcgtaggctgtcatggacatttgagaaacaaggcaccaagttagaatggcgatggaaactgcagcctgcacctaacactcagcagactatagctgagatcttggattttcttatggatgcaaatatacgcttgagcgaagaggttgttaggaaaacacaatcctttgacaagttgaaacaagaatctgagaagtgcttgcaacaaagtgaaagatttaacattgagaaagctgagttcgaacaatccacattttcaaagtttgtggctgtcttaaattcgaagaaagccaagctcagacaactcaaggacaaactcacagaatttgaatctgctgacaaggctccaaaggaggaggatgagaactccactgataagacagagctttttgaggaagcaagtgacaaagatgcaagcgttaatgatgaaccctctgagactggtggcggcgatcttcatagctctcctgagaaaactgcagccacctccagaggggggaggggtcgcaagaggactagaaaatagcctgaacaagcaacctaactgctagactgaatatgacagtataacaagacctacatgcgaattcttaatgttaaggatatcaacaggacctacatgggagttcttaatatccttaacacttaatccatgtgatatccttaacacttaatccatgtgatgcatctgtcatgcaactaattttcatttcgtcaagtgtgtcaatcatgtaccttgtgaacatttaagtgcatgtggagctaaaccttgagtcct

SEQ ID NO: 21494 - DNA, 800 bp, Oryza sativa
  ref <308>: DATABASE ACCESSION NUMBER: AK071773
  ref <309>: DATABASE ENTRY DATE: 2001-12-06
ggcaccctttctccggctatttatgcagccggagagtgaccgggatgcggacgccggccggagaatccgcctgccatggattattactaccccatggaggaggaggaggaggtgcacgagcgcccaagattccggcgcccggtccacccgtggcagtggcaccattggcagaatctcctcggcctcctctcgtcgtcgtctccgtctccggcgacggcggcggcggcgcagaggtgcagccatgtcagctgggaggagaccgccgccgcgcacctctactccgccagcctccccggtgtgaggaaggaggagatcagggtggaggtggaggacgcgatgtacctcgtcatccgcaccgagcttgatgacggtggcgatggcgacggcggaggcggcggtggccggaggagcttcgcgaggaagttccggctgccggcgatggtggacgccgacggcatctcggcggagtacaccacggcgtgctcagggtaaccgtcccgaggctgcatacgcgggctcgccccgtcgtcaacctcgccggcggcggcggcggtggcggtggcccggcctgcgaccccgtcgcccgagcagcctgattagtgattcgatatcaatcaagaaaattacttaattacttatttaagttgcactgtgagcttaggattggggaagtaatagcagtatagtgaactgtacaattctcaggcatttcagaatttcagaaaattgccaaattggcagtgcctgttcgttatcttgtagtatcagttgttttttgtgctatagtactctatttctgt

SEQ ID NO: 21495 - DNA, 1445 bp, Oryza sativa
  ref <308>: DATABASE ACCESSION NUMBER: AK071774
  ref <309>: DATABASE ENTRY DATE: 2001-12-06
ggggtgaaattacccccacaaaaaccaactctgcaactctttaccttttttagtttgcctttgttctttgcggtgtttcgttttcacatccctggaaattttcagagcaaagacaacgtttgttgcaagaggaaagagggtggattggtcaggtttggttgcagcttggattttttcttaagaaacaaaaggcagcattgcagcttaattgatctggagggagaggaaagacaaagatttttgtaattggaaatatatcgtcgtgtcagcggaatgcttcttgtggatgtggtgaagaccggctgagttcaagcaattcatgctatgtttattctagtgcagagtacgggataatttatgttccaaaaggaattaaatggtccataagcaggaaggcaataacagtgaacagatgagcaccactcctgcccctccgggcgaaaccagtagacagattccatctagagatgatgccaaacatgagaaggaagcggccaactcctcatcttcctcatcatcagaggaaatagacgaggatgatttctttcagatagaaggcccaatactcagtacccagtactccctgtctcctccacctgcagaaggtggcaaccgagacgcaaagcaggcagatgaaccccatgacccaaagaggatcccgtccgctgtctttgcgagatccaagtcatcaacaccaactgactggagcatcacctccaatgaatctctctttagcatcaatgtcgggaatgcgagcttctccaaggatcacatgtttttgtatggcaagtcaggagagctgggtgctaatgatccattgccaccattgccaaagcagagcccaagctccagccctctaaaaggtgaggtggccacaccagagaagcctagtacttccaaggagaagggggatgggcgtggactcacagaccggaatggggacgacaatacagactatacccatagctcgtcacaccgatctgatggaagcacaacaagttttgcatttccaatattgacagggtcagcgaaaacaagtgggtccttgaaagatagccatccggagttagctcggcaaaccacggcgcagctgacgcatcccagcgagatgcgtgatgagaatgagaataaggaaacaccatttccagcagttgtaatggaggcaccaaaagtcgaagcaaccccagcagcagcagcaacagcacctgcaccaccagcaccaccggccacaacaaaatggtttccttgctgttcatgctgccctttctgttgctaacagcaaagggatatgcaacttcatcatccatgtccatttgcctattgaatccttaactagtggaaagctttgagcattcgacacattcatttatacatgctgacattagtacaaggataaaattcctggttcaaaaggaacatcggaaaccaattaattatttgctctg

SEQ ID NO: 21496 - DNA, 740 bp, Oryza sativa
  ref <308>: DATABASE ACCESSION NUMBER: AK071775
  ref <309>: DATABASE ENTRY DATE: 2001-12-06
ggtcttccattccagcccagatcgagcgagagagccgtctccctcttcgcttctcctctcccccccgtgatctgaccgccggcgacgaccccctcccaccacccgccgccgccgccgcgcccccgcccccgccggcgacgaccaccatgtcgtacgatcgcgtcacgaccttcgaggactcggagaaggagagcgagtacggctacgtccgcaaggtttctggacctgtggtcgtggctgatggaatgggtggtgctgccatgtatgaacttgtccgagttggtaatgataacctcattggggaaattattcgtcttgagggtgattcagccaccattcaagtttatgaggaaacagctgggttgatggtcaatgatccagtgttgagaacaagaaagcctctttcagttgaattgggacctggtatccttggaaatatctttgatggaatccagcgccctctaaaaactattgctataaagtctggagatgtgtacataccacgtggtgtttcagtccctgctcttgacaaagatcagttgtgggattttgagccaaagaagctaggtgttggagatgccatcactggtggagatctatatgctactgtgtttgagaatacgctgatgaaacatcatgttgcccttcctcctggttctatggggaaaattagttacattgcaccagctggccagtatagcttgcaggatacagttctggaactggaattccagggcatc

SEQ ID NO: 21497 - DNA, 1283 bp, Oryza sativa
  ref <308>: DATABASE ACCESSION NUMBER: AK099192
  ref <309>: DATABASE ENTRY DATE: 2002-08-28
gtggagtcggaaaggagatacagttctcagatagtttctgctacctttgctgccgcgcgctgcagaagatcggcgagatggatgctgtgttggttaccgccgccatcttcgggttgctgctctgcggctgctcggtttcaggagtggaaggtatcggtgtgaactatggcatgatcggcaacaacctcccgtcgccggacaaggtcatcgccctgtacagagccagcaacatcaccgacatccgcctcttccacccggacaccaccgtgctcgccgcgctccgcggctcgggcctcggcgtcgtgctcggcacgctcaacgaggacctggcacgcctcgccaccgacgcctcgttcgcggcgtcgtgggtccagtcgtacgtgcagcccttcgccggcgccgtccgcttccgctacatcaacgccggcaacgaggtcatccctggggacgaggcggcgagcgtcctcccggccatgaggaacctccagtcggcgctgcgcgccgcggggctcggcgtgccggtcacgacggtcgtcgcgacgtcggtgctgggctcctcgtacccgccgtcgcagggcgcgttctccgaggccgcgctgccgacggtggcgccgatcgtctccttcctggcgtcgagcgggacgcccctgctggtgaacgtgtacccgtacttcgcctactccgccgacccgtcgtcggtgcggctcgactacgcgctgctgtcgccgtcgacgtcggcggccgtgacggacggcggtgtcacgtacaccaacatgttcgacgccatcctggacgcggtgtacgcggcgctggagaaggcgggcgggcagggcctggaggtggtggtgtcggagaccgggtggccgtcgggcggcggcggggccggcgccagcgtggagaacgcggcggcgtacagcaacaacctggtgcgccacgtcgggcgcggcacgccgcggcggcccgggaaggccgtggagacgtacatcttcgccatgttcaacgagaaccagaagcccgagggcgtggagcagaacttcggcctgttccacccggacatgagcgcggtctaccacgtcgacttctcggcgtgatcatcttaatcaggcagcgacggcgggggcgacgctccatggatttggactcatcgtgtgcatgagttacttaagtaccaattttaggaagttagtagtatgattacaatattggacaaagatatttgacatcgatatgtatatgattccgctgcatttctgattaattaccagcattcacctgtttctccg

SEQ ID NO: 21498 - DNA, 1643 bp, Oryza sativa
  ref <308>: DATABASE ACCESSION NUMBER: AK071776
  ref <309>: DATABASE ENTRY DATE: 2001-12-06
ggtaggcccgtcctctcctcccgaagccaccaccggcccaccgtccatccacgccgccgcaccacgtgcccccacgcccccgacgcgcaaatcaccgcgtgatccgatccccccttcttcccaaagtccaagcctcactctctccctctccatcccacgcctcgctcactagcgcacagatctcctaccaccaccaccaccgccgcagccatggcgaccgggtactaccgcggcggcggcggcgccagggaccacgccgacgagcccgacgacttcgacgagtacgaccccacgccgtacggcggcggctacgacctcttcatcaccttcggccgcccgctcccgccctccgacgagacctgctacccttgctccgctccctccacctcctacgacgccccgcactactccgccgacgagccctccccctacgcccaccactccaagccgcagcccgcctacggcttccgcccccagcacgagcagcagcagcagccgtcctacgcctcctccggctaccgcccccagcacgagcagcagcaatcctacggctcctctggctacggatctaagccccagcccgcctatggcttccgcccccaggccgaggaggagaacacctacggctccggctatggatctgggtacggtggtggaggaaggaagcagcaggaagaggagagctacggctccggctacggtcgcaagccgcaggtcgaggagagctatggatcagggtatgggaccaagccgcagcaggaggagagctatggatcagggtatggatctgggtatgggaccaagccgcagcaggaggagagctacggctccggctatgggaggaagccgcagcaggaggagagctacggatcggagtatggttccggctatgggaggaagccgcaggccgagagctatggatcggggtatgggagcaggccacagcagggtggggaggagtatggtagcggtgggtatgggaggaaggctcaggaggagagctatggttccgcgggctatggcggcaggaagaccgaggaagagagctatggtggtggttctggttatggatatgggaagaaagcccaggaagagagtgaagggacctatggctctggtggttaccccaagccgaagccttacagtcaggaggagacgcagggttcttatgggtatgggtacggcgagaagcctgcgtatgagagtggtggatacaacaagccgagctatggcgggggagacgaataccagggaggctacggccgcaagaaacatgatgacaatgactctgatgatgaaaagaagcagcgttatcagaagcaccaccaccatcgccgccaggagtacgatgattaagcttccggtgcgttatcttctacggggccatcgattgctgctatcacttgccagccatagtactctgcgtgaataaaagatgctcctgctcagtcgtttcatcgttcgtctcatggacactatttgttatccgtctccatgatagtatgatgtcgcttcaacactgataataaattgtggctttgcgcgtgtttttttatgtttgaagcatgtctaaacaatcactctgtcagttatcatttctttgcttgggatgattggtgtatatatgtgcccctgttgcgtct

SEQ ID NO: 21499 - DNA, 1874 bp, Oryza sativa
  ref <308>: DATABASE ACCESSION NUMBER: AK071777
  ref <309>: DATABASE ENTRY DATE: 2001-12-06
gggaatttcccccacgataattacgaagcagagccagccaccacgcacagctccgcaagtccacaactccctctccctctctagtctctctctcctcccccttctcgaagcacgctgccgccgcctcctctccccgcgccgcgcgcctcgccgagttagggttccggcgagctcggggcctttctccggcgacggcgccctcctccggcccgagggctcgcttcgcgatcaaatagcagcgatggaaagggacacaagctctagtgatgtttctgcttctcatgtaggacgtgccaggcagcgaagacgtcctactgaggctactgcagatgggaatagaaccaatggaccagctttgcttgtcaatgatcagaataagtacaagtcaatgcttatccgtacatattctacagtatggatgattggaggctttgtgttgatagtttatatgggtcacctctatatctgggccatggtggttgttattcaaatattcatggccaaagagctttttaacctactcagaaaatccagtgaagaaaaacaactaccaggtttcaggctactgaattggcacttctttttcacagcaatgttgtttacttatgggcgttttcttagtcgacagcttgttaacacagtaacttcagatcacttattgtataaggttgtcagtggtctcataaagtatcagatgttcatttgctattttctttacattgctggatttgtctggtttattttgactctgaagaaaaagacatacaagtatcagttcaaacaatatgcctggacgcacatgatccttttaacggtttttgcacaatcttcttttaccgtggcaaatatatttgaagggatgttctggtttctgttgcctgcttctctcattgtgattaacgacattgctgcctatctatttgggttctttcttgggagaacacctctgatcaagttatctccaaagaaaacttgggaaggttttattggtgcatctgtgacaactatcatatctgcttttgtgttagcaaatgtaatgggccgtttccaatggttgacatgcccaagaaaagacctgtcgacagggtggcttcgttgtgaccctggtcctatgtttaagccagaacattattctttgggagaatgggtgccaaaggggttcccttggaaggaagttgttcttttgcctgtgcagtggcatgctttagcactaggtttgtttgcatcaataatagcaccttttggaggtttctttgcaagtggcttcaagagggcctttaaaataaaggattttggagacagcatacctgggcatggtgggattactgaccgaatggattgtcagatggttatggcagtttttgcatacatatatcaccaatcattcatatcgccccaaaactactctgttgagctaatcttggaacagattctaagaaatctaacctttgaggagcagaaattcttatatcagcagcttggggaaatctaccgtgaaaggcaattaatgcagagctgagaactagtttgcttatgatgaagcatacagtatgttgtttttgagcgctcggttccatgtatagcagcatagcttctctgtacggcgatagagcaacgtccctttccaaaccattgtacagaatagagtgtggatggggtttagcgatttaggtacttgattcgctctccacttacgttgccttctctggcgatcggtttatccttttacgctaattctcatcatttctgcccttgtaacaagggaaccggaaaaggttgtattcgtgtatatcacttcgtgtgttggcctcacatcaaatatgtgcaagatgcacaagataacacaggaaatgaggaaaatttattcccctttt

SEQ ID NO: 21500 - DNA, 1474 bp, Oryza sativa
  ref <308>: DATABASE ACCESSION NUMBER: AK071778
  ref <309>: DATABASE ENTRY DATE: 2001-12-06
gacaccccaaaatccccaatcgccgcgccgcactgcgactgcgattctcccaatccccggtggatatcgatcggattcagatgaacactcgattccggcggccggaggtaaatccggagtcgattttttcgcaaatcgcaggtactctacgcaatttttgttcctaatccccaaatccccaattgccgcactgctactgcgccgcgtctcgccggccgatttggatggctgcgggtgggacgcaagcaatgaggcagttcgtctatctggtggtgaagggctgctacgatcgccgcctgcggtgttgtcgcgacagctacatggcggacaccttccacatgcgccgcatcaacgtgtcccgcttcttcttctaccccgaaccgccgccgccgccgccgctggcgatggtcgtcgacgctcggctgcctcgcccctgcatcaccttctgcgccccctgggtcatgcacttcatgctgctgggccgcaacagcgacaaggtgctcgccgtcgaccacaagggccgcaccaacatgtacgaccccgccgccaacaccatccgcgccgcgcccaccctcgcccaccccaagagactccccgccatctccctccccattggtgacgacctctacatcctcgacccgacctcctccgaccaccgctgcttcgaggccctcgtctacaagcccggcggccccgcccacgactgggtcaccacccgtggccccatcgaccggtacaacgactggcactgccaatctctcccgccgccgccctaccatccctactcctgcagcttcgtcggcgcaaacggagccatcggcggctatgcggtggtcggcggtggcggcgactcagcagagatctgggtgtcaaccaacgacggcagcggcagcggcaccttctctttcgacacggcgcggcgcgcctggaccaagcacggagactggacgctcccattccgtggcctcgccgagtacgtccccgagtacaacctctggttcgccctctcctccggctccaacaacaaccatctctgcgcattcgatctcgccggcgcagccgagccgccggcgacgcgcgatttctgccaagaactcaagccacccaaggactggaagctggtgtcatcccatctggtgcacctgggatccggcaggttctgcatcgcaagattcttcgaaaagccggtcaagattccagtgtgctgcgtctgcgacatggatacgcagacgtacggcgtcttcaccggcgtggaggtgaagaagccgggaagaggcctacggctacggatggtcaagcacagatcagaatgttatcgcttcgatgaccacattaaggaatgggtgctgtaatatttatctagtcttttttagaaagatttgtgcaaatagatgaactcagtagcattggatatgctggtgcttcaacaccttgaacactagcacaactttttatctctatcaagttttagagg

SEQ ID NO: 21501 - DNA, 1253 bp, Oryza sativa
  ref <308>: DATABASE ACCESSION NUMBER: AK071779
  ref <309>: DATABASE ENTRY DATE: 2001-12-06
gagccgcaccgccccccaccccactccgcatatagcccttcttttgttggtagcatcgccggcgaggccaaccggattcgcgacgcgagcgcgaggctcatcaccgacggcggcgcccgcaaccgcgggagcgatcccctctccccccgccgcccggcctgcggagagtagggactccctccctctctctctctccggaagtgcactggctgtagatcgtcagtcaagacaacagtttattggtcagcggagcgggctagagcaatgttctccctggcgtatggtctatggaagtacatctttaacaagacagagtttcatgttcttattctaggtgttgacaaggctggcaaaacgactttgctcgaaaagataaaatcgatttatctgaaaggagaagggcttacacctgatcgcatcgttcccactgttggacttaatattggccgtattgaagatgcaaatgcaaagcttgttttctgggatctgggaggtcaggttggacttcgcacaatctgggaaaaatattatcaagaggcccatgctataatatatgttattgatgctgccgctgcatcatcatttgaagatgccaaatctgctctagaaaaggttcttcgtcacgaggatcttaaaggggcaccgctgctgatatttgcaaacaaacaggatttgccaggggtcatcactgatgaagaattagctagatatctgcagcttaaagagctagatgagaggccgtacaagtttcaagctgtatctgcctatgatgggagggggatcaaatctggcatagattgggtggtggaacagatggaaagaagtaaacgcactgaagttctgagggcgcgagcaggctttactgggcagatttagaatgttgacccgcagttttcaacaaagatttcgagggaaaaaaaattcaaggcatttgattgaaagggcttctgttacttatgacaatatgcagcttggcggatttcagcgactacatggttcatccttccagatggcacaccaacaaaattgtttgcccttgtgcgttggtgagtgaggtgattcgtttggtttatgagcatggtattctgctctgtatctaaagatccccttaggagtcgttcatatgattgctttttttgatacatggaaagtgtccgtatagaggaaccagagatcgtgcaacctctgtaatgttctttgtgaatgggaaaaaaaaaaggtaaaggaatccattgtaattggagttccatagc

SEQ ID NO: 21502 - DNA, 1676 bp, Oryza sativa
  ref <308>: DATABASE ACCESSION NUMBER: AK071780
  ref <309>: DATABASE ENTRY DATE: 2001-12-06
gatcgctggtcgcaagccgccatttgatcgagtcgcgcgtgcatgtgcgtgtgcatgtaggcaagattacggccagcagctaggtgcgcgtcggcgtcgtgccattctgtgccggcgatggggtgcaccaactccacggaggcgcggcgggaaatggtcttggccgacgccggccggcgcgcgacacggagcttctcgctgcccaccgtcgatcggcagcggctacggtggaaggccgtgtcgatgctgagctcgctcggcatctcccagggccggcgctccggcgcgttcaagtacgcgaccacgtcggtggaggggatgatgaagagcgagaatgaccacaccgggcaggcgttgctccatgtccaggaggcggcggcgaagcgggctgtgatcaagccctgcacaccgacgctgactccgcccaacgagccagaggtgatcaatgcgtgggagctcatggccgggctcgaggacgatccgccgacgccgccgtgcgcgtcgcatgaaccaccggcggtgacgccgcagtggatgcaggctgatacggacatccccatcgtcgccttggacttcgatccggagatactgtccggcttccgggaggctcttgcggacacgtcgccgtcggagccaacgtcttgctcggtgacggaggaagaagaacaaccggcgcaaccggagaagcacgccgacgcctgcgacgcgccaacctcgctggccaccggcgacatgccggagaagcgcgccgatgcctgcgacgcgccagtatcgctggccaccggtgacatgccggagaagcgcgccgacgcctgcgacaagacaatctcgctggccaccggcgacatgccggagctctcaggcattgtccgcgcccgcatcaacgcgttccaagaaaagatagagcggaggtcgagcaagggcgcccgcgacgcgaaggtggcgcacctgcggccgccgggaggcgacaagaaggcggtcgtctacttcaccagcctccgcggcgtccgcaagacgttcgtcgactgctgctccgtgcgcagcatcctgcgcagctacggcgtgcgcctggacgagcgcgacgtgtccatgcacgccgtcttcagggccgagctcgcggagctcctcggccccggcggcttcgcgtgcgccgcgctcccgcgggtgttcgtcgacgggcgctacctcggcggcgccgaggacgtccacgcgctgcacgaggcggccgagctcgcgcgcatgctggaagggtgcgaggccgcgccggtgcgcaagctcgggtacatggaggcgtgcgccgcatgcggcgacgtccggttcgtcccgtgcgagacgtgctacggcagctgcaagatattcgtcgacgacgatgtcgacgccggcgagttccggcgatgccccgattgcaacgagaatggccttatcagatgccctgtctgctgctgctgatgcttcttgtaccgtagattaaaatcggccatgtgtttagtcgtttgtactttgtacagtgtgaggagcattgatattcagaggaaatctatacagattcaagaggattttgcttagatcctattatttctttttctttttgcccctcatatagattgaagagagggggctcaacctgtaaaaggcctcatctggattggaatgcaggaatttcaaacgaactttac

SEQ ID NO: 21503 - DNA, 677 bp, Oryza sativa
  ref <308>: DATABASE ACCESSION NUMBER: AK071781
  ref <309>: DATABASE ENTRY DATE: 2001-12-06
gatcttagctccacaccaattctgctcagcataaacggtgctaatggcccaaaacaagaccatttcggtggctctgctcctttccacccttgtggtggtggttgcggcagtagcagccaccggaccgccggatttattacaaggttggtgcgccgatgcgtgtagagaggagcaacaaaaagaccccatctacaacaagcattgcccagacttctgcgtcatctcgaccaagcagatttttagggcctataagggagccacggatccccccgtggaaagattcaacgccttgtgcgatgagggttgtagtaaggaatttaaggaggatcctgccatcagcaagaagtgtgtagacacctgcatcgtcatgtctaaggaagccaaggaatactttgcgaaaggtggcactattggtgctcccgcgggtgcatgatcgcgtagcagctgcacatctgatccttcttccatgatcgagtgacaatccccataaatggttctcacctggggaccgtccttgtatcacatttgtcctgttgttcccttttcatcttcggttgcttcattatttggtgtttataactctatgtggttgatgtgatatgttgttcttaccaatgttaccagaaacaattgttatctttatttgattaaatatatccggctgtgctttggctttt

SEQ ID NO: 21504 - DNA, 1658 bp, Oryza sativa
  ref <308>: DATABASE ACCESSION NUMBER: AK071782
  ref <309>: DATABASE ENTRY DATE: 2001-12-06
gtgtacacccctatctcacccaccaccatcccaaggcggcgcgacgacccatctcgccgccgcgaattctctctccggcgaactccaactcgaaccctccctccgccgactccgctcacgagacctaaaccctccttccctctcctctcgtctcgttcccaccaccatgctgggcatcgcgaggaggcgcctcggatccggatgcgcgctggggcaactcatgcaggcgctccgaccggccgccgccgccgccgcggcgaggacctactccgccgccgccaaggagatgactgtgcgtgaagcattgaattctgcccttgatgaggagatgtctgctgacccttctgttttcttgatgggagaagaggttggagaataccaaggggcatataagatatcgaagggtttgttagacaaatatggccctgatagggttcttgacacaccaatcacagaggctggttttactggaattggtgttggtgctgcctatcaaggtcttcgccctgtggttgagttcatgacatttaacttctctatgcaggcaattgatcacatcataaattcagctgccaagtcgaactacatgtcagctggtcagataaacgttcctattgtttttagagggccaaacggtgctgctgctggtgttggtgctcagcactctcagtgttatgcggcttggtatgcgcatgtaccaggattgaaggtcctaactccttattctgcagaagatgctcggggcttgctaaaagcagcaatcagggatccagaccctgttgttttcttggaaaatgaactgctctatggtgaatcattccctgtttctgcggaagttcttgattctagcttctgtctaccgattgggaaggctaagatagagcaagaaggaaaagatgttacaattaccgcattctccaagatggtcggatatgctcttcaggctgcagagatactttccaaggagggaatcagtgctgaggtgatcaatcttcggtcaattaggccattggatagagctactatcaatgcatcagttaggaaaaccaacagattggtaacccttgaagaaggatttccacaacatggggttggcgctgaaatatgcatgtctgttgtagaggacagctttgaatatcttgatgcgccagttgagaggattgctggagctgatgtgcccatgccctacgctgccaaccttgagaggatggctgttccacaggttgaggacattgttcgtgcagcgaagcgagcctgctacagagcagtaccaatggcagcaacagcctaattcagtgacagtttttgtttctccatcttgtcttcttcccaatggccaggagtatgtaccacagcataatggtgtcttcccaagtctcaactagtgtaagctgattttgtagatccaccatgaggtgtcaatccccttctttctttagtcgcagtcggatggctgcatccgttcatagtccaaactgaatatacacatttgaaccatgcgacttctggagattttacatgaccggttgatgtcaataacatgtatgtaatggagctccataagtcggcaaaccaaacccccattagattcaatgtttgttcgtccatgcctctgaattgaatgcactggactctacaagttcatggtcctgttatcc

SEQ ID NO: 21505 - DNA, 1341 bp, Oryza sativa
  ref <308>: DATABASE ACCESSION NUMBER: AK071783
  ref <309>: DATABASE ENTRY DATE: 2001-12-06
ggcaacgaacctaggaacaggcaggcaggcagcgtcggcgaggccgttgggcaacgcctcgccaccacatgatttcgcctgcctgttgttcttcgggcctccccttctcctccaccctgactacatcaaatttcaaccctgactccatcaaatttcatggacaaatgaagctggattacatgcacgcaggaggcgcgcgcatcggcgtaacgtctccttggcgttgagggcttgagctcgtggcaagcgatgacatcgtcgacgctgtcttcagcgctgagctccatggaggtgatgctggatgcgctcatgcagagaggagtaggaaagccggaggaaaagcccaaggaggaggcgcctccagcgctgcccacacgccccacggtgaggggcaggccgccatctctgcagaggcctggttcccctcccccttgggttcaccggtcaccatcgttaccgcctatgctggaagtggacgagaaacttgcggtcaattcggtgctggaaagaagggccacggtggcggaagaggcggtaaagcagaaggacgacgtggtgaggcagaaagatgaggagatagccgcgctgaggcaacaggttgagcactacgaatcccggctctcggaatgcgaggcgaggatgaaatccgtggaggaggagctgcggaaacagatcaccacgatgcagatcgctcagaacaacgctggaagaaccggtgaatcgacgacaaggacgcaccacaggcaggaactatcaggcactagtggtgctcctgctcagtcgtcagggtggcgagaggaggaagcatcggtgacgcggcaacaggctcgtggccgcgaatcgaacgttgctgcagtcgtcgacgaaaggaaaaccgatgccgtgagccgcttggccacggagctccggcaggagagcgaggcgttcgagcaccgcgcgcgtgcggtgaccgaagcgggaccgccgactgccaagtcggtcgacgagctcaagaagctgaagcggcagttcgggacgtggaagaaggaatacggggcccgtctgcgtaagaccaaggccgagctgaagaagctcgtccgctcggagaggggtggccacgggaaccgccgcaggtgctgctcgtggaagatcaagctgccgaagtgcaggtttcccaagtgctgcgcgttcaagcttccaagcccttcctcttgctgttcctgcagttgcttccgccgctgctgctagccacgcaagattgcagacgcttggtttgcttcttctacttgtacatcgttgtaaaattgttgggggtgatcgaattgacaaaaggaacaaaacgaaatatgaccatagctagat

SEQ ID NO: 21506 - DNA, 1841 bp, Oryza sativa
  ref <308>: DATABASE ACCESSION NUMBER: AK071784
  ref <309>: DATABASE ENTRY DATE: 2001-12-06
gtggcatcacaagatcatcaactaagcgaagaacacacacacaaacacaaacagaaaaacacaacacattaagctagctagaagaagagagaaattaaagaagctaggagctaacgatcaggatggctgctggcatggtggcgacaatggtgctactgacgtgccttgctgcaggagggctggtcgtcggagctgaggaagacggtggcggcggcggtcttggccggctggggtcgccggactacggcgacgcgctggcgaaggccatcctgttcttcgagggacagcggtcggggcggctgccggcgaaccagcgagcgacgtggcgcggggactcggcgctcaccgatggccgtgaagaaaacgtgaacctgaccggcggctactacgacgccggcgacaacgtcaagttcgggtacccgatggcgttcacggtgaccctgctgggctggagcgccgtcgagtacggcgccgccgtcgcggcggcgggggagctcggcaacctccgggcggcgatccggtggggcgccgacttcctcctccgcgcccacgcctcgccgacgacgctctacacccaggtcggcgacggcaacgccgaccaccagtgctgggagcggccggaggacatggacacgcccaggacgctctacaagatcaccgccgactcgccggggtccgaggccgccgccgaggcctcggcggcgctcgccgccgcgtacgtcgcgctcaaggacgacggtgacaccgccttctcgtcgcggctcctggccgcgtcaagatcgctgttcgatttcgccaacaactacaggggatcattccagtcctcctgccccttctactgctcctactctggatttcaggatgagctcctctgggcctcagcgtggctcttcaaggcgacgcgagacgccaagtacctcgacttcctgacaaacaaccaaggatccagcaaccctgtcaatgagttcagctgggacaacaagtatgccggagcacagatgcttgcagcacaggagtacttgggagggagaacacagctagcaaggtacaaggataacttggattcctttgtatgtgccctcatgcctaacagtggcaatgtgcagataaggaccactcctggcggacttctgtttacgcgcgattcggtcaatttacagtacacaacaactgcgaccctcgttctgtccatctactccaaggtgctcaagtcttctggctccaggggagttcgctgtagcgctgcaacattctctccaaatcagatcagctcatttgccacgtctcaggtggattacatcctggggaagaaccctctgggcatgtcatacatggtagggttcagcacaaagtttccgaggcgcattcatcaccgtggctcgtccatcccgtcgatcaaagttctcagcaggaaggtcacctgcaaggaagggttctcatcatggttaccgacaagcgacccaaaccctaacatccatgtcggagcgattgtcggtggaccagatggaaatgatcagttcagtgacaacaggggggattcatcacactctgagccagccacatacatcaatgcagcctttgtgggtgcctgtgctgctgcaatggggcagaagcaggtggtgaagctggaggagcctgcggacaacttagaatcaatggtatcaacttactagaaaagagggatgcagaaaatatatgcaagaataagatcattattatgtattcatgtgcaacttctatgtgtgagattgccttgtaacatcagtgcttacttgtaatatatcccagctccttatcagtgtgtacaacatgataataaataaataccataagttcatacc

SEQ ID NO: 21507 - DNA, 1681 bp, Oryza sativa
  ref <308>: DATABASE ACCESSION NUMBER: AK071785
  ref <309>: DATABASE ENTRY DATE: 2001-12-06
gattgctctcattgcattgtctcctcttcctactgctgctgctgctttctctctctaggctgcttgctttgcttgcccctctctctctctctatctacaaatgttctcttcttttgagagaagagaggaatagctgcaacacaaaggaaggcactgcttgcactgtgcagtgtgcaggcacagccaagttttcaaaagaacccgccatcttctttctctctctactgtcctagcaattctctctctagctccagtattaatttctttccatcctccattttcttgggcaccgtgcgagcttagctctgcactgtttgcctcagttgggttggtttggtttggttgcttcttctctgcttcaacggttggtcgacttcaatgcaagaaagcatcggcagcaattgctcctcccgttgagtttttcgtcgtcgtttgaaagcgaaggagacggcgacggcgacgaggaggaggaggagggattaatgtcgtccatggcctccaacgaagaggtcggtaatgaagatgggaggcaggaggatctgcttgttaaggaagggccaggggagcaccaagaaaacaccatcagagattccgacgaagcgaaaaatgaggattgcagcaatagcgggtcagtaaccgaagccgtcgtatcaagcgaagaacccagtgacaggagcagcactgaagaacccagtgacaggagcagtactgaagaacccagtgacagtagtagtggtggtgacagtagcagccaatctgctgattctgatggaggtagcaaagaggcgcctaagatggattcgaaggccggtaacgatgacagcagcgagtgcaccgatcagagctctcctcgcgcggtgctagacatctcggtatccggtagtgtcgactccgatgagagctcctccgttgagcagccagcggagtcgaatcacaatacgcagtggaggaacctgatcagtggattgatactcaggaggaggaagtcgatggcgagagcggggacattccctcagagaaccaagaccacagggcttaagaggtacctggagaggatgcggagcggcaagaaccagatcgattgcggcgccattgctcctgagatccttcctgagatcagcaagtggaggccatcatggagaagcttcgactacagtgagctttgtgctgcaactgacaaattcagttcagaaaatttgatcggaaaaggcgggcatgctgaggtgtacaaaggacatcttgctgatggacaatttgtagcagtgaagagactaacaaaaggtggtaacaaagaggacaggattagcgatttcttatctgagcttggaataatagctcatgttaaccatccaaatgcggcacagctcttggggttcagtgtggaagggggcttgcacttggttcttcagttctcacctcatggaagcctggcttctgttcttcatgctgaacaggcacaaagggagccctcaagtggaaggctaggttcaatattgctcttggaattgctgaaggactgctttatctacatgaaggctgccatcgacgcataattcacagagacatcaaagcatcaaatatccttctaactgaagattaccaacctcagatctcagattttggacttgcaaagtggcttcctgacaaatggactcatcatgttgtgttccccattgaaggg

SEQ ID NO: 21508 - DNA, 2151 bp, Oryza sativa
  ref <308>: DATABASE ACCESSION NUMBER: AK071786
  ref <309>: DATABASE ENTRY DATE: 2001-12-06
gatatgacccataggcaggcgacaccgcggcggcgcggcagcagagcgctgcacgacctccgcctccccaatccgccccgtctccttgcccgccgccccccgactcccgccgatctccatcctgctagcagaggtggcccggcgttctcctgctccctcactggaggcgaaagaaggagaattattgatcaatcaattcagaacgaacggctcagatattggggaggaagacacgaagcggacctatgcatgctctctccggccgccaccgctgtagccgccgtccgtgccacggcggggtcgccggcggccgtgcgcggcatgcacgcgcgcatcctcaaggaaggtctggcccaccaccctccgaaccccgcggcgctcgtctccgcctatgccaagtcccgcctcctccctgacgccctccacctgttcgacgaaaccccgcgccgggacatctacatctactcctcgctcctcactgccgtctcccactccgcgtcccccgagctcgcgctgccgatcctccgctgcatgctctccgccgacgccctccaccccgaccacttcgtgatcagctccgttgccagcgtcttcgccaggctccgtagccgccgccttggcaggcagctgcacgcgcatttcgtggtatccccatacaacggggatgacgtcgtcaagtcctctctggtcgacatgtactgcaagtgtggctccccggacgatggcaggaaggtgttcgacagtatgagtgccaagaacagcgttgtgtggactgccctggtttctgggtacgcgtccaacggccgcagtgaggaggcgctgcagctattccgtagcatgcctgggcgcaatctgtttgcatggactgcgctcatctcggggctagtgaacaccggtgagagtgtcggcgcagtggagctttttgttgagatgaggcgggatggtgttaggattgatgatgcattcgtgctgtcgatcgtcattggcggttctgcagacctggctgcttttgtgctgggtaggcagttgcatggttccacaatgaggcttgggttcctgtccaacatgattgttgggaatgcgttgattgacatgtactcgaaatgcagtgatatactctctgctagagaagtatttgaggggattacattccgtgatgtaatctcgtggacgacaatggttgttggagaggcacagcatggtcgagctgaggaggcattggctctttatgacaggatggttcttgcaggagcgaagcccaacgaggtgacctttgtcgggttgatctatgcttgtagccatgctggtcttgttcagaaagggcgacagctttttgagtcaatgaagaatgagtatggcatcactcctagattgcagcactacacgtgttatctggatcttcttagtcgctcaggccatttattggaagctgaagagctaatgactacaatgccatatgagcctgatgaagctacttggggggccctgttgagcgcatgtacgaagtacaaggatgctgaaatgtgtatcaggatttccgataaactattagagctacgaccaaaagattcttccacatatatcttgttatctaatgtttatgcagtgaacggaaagtgggattccgtagccaaggttagaaagtgcatgattggattggagataagaaaagagccagggtatagctggattgaagctggaagagaattccgtttgtttcatgctggggaagtgccacttgatgttagagaagaaattatggtttttcttgaggaaatggtattggagatgcgcaaaaggggttatgttcctgatactagttctgtgatgcatgacttggaagaaagcgaaaaggagcaccatctcttcttgcacagcgagagattggctgttgcttttggattaatcaagtctcctccagggtctgtgatccgggtggtgaagaaccttcgggtctgtgtggactgccatacagtaatgaagttaattagtgaaataacccatcggaagatcgttgtgcgagattctagtcgttttcaccattttgagggtggaaaatgctcttgtagtgaattctggtagaaggtctgctgatgtccagttgtgcttccagtcttctagaactctaggtatgacataagctattgcttt

SEQ ID NO: 21509 - DNA, 1524 bp, Oryza sativa
  ref <308>: DATABASE ACCESSION NUMBER: AK071787
  ref <309>: DATABASE ENTRY DATE: 2001-12-06
gagacgccactgcctttccccttccgagcagcagcggccgcttcgcttcgcttcgtttgcttcgttcgccggcggcagcggcggtggcggcggcggcggtgagggtggggttggggattgggggatcgaacctcgctggatatatagatgcctccatggatccaatcggcgacccatcgccgtcgtcccggcggtcggtgaagcggcggcctcccgcgcgatcgccggagctgtcgccgaaggcgtggggaggggaggcgccggagctgatccggcggctggaggagctggaggaggcggcggcgcggctgcggggcgagaaggaggccgcggaggaggcggcgcgggagctgcaggccgagttggatgcggagcgggcgtcggcggagacggcgaccagcgaggccatgctcatgatcgagcggctgcagcgggagaaggcggccgcgcagatggaggcccgccagttccggcggtacgccgagggccgcgaggatcgcgagcgtgaggtacaggaagagctcgcctcgctctccgacctcgccgcctcctaccactcccgcctccagtcccacgggatcgaccctgattccttctccgacgacggcgaggaggagcagcacgacgaggaagatggcgaagaggtagaacagatcgacacggccgcgctacagacagatggaagcagcggcggcgactcaatcggtggcatgcaggtgaaagccatggtcgacgatgatgaggaagagcaattcacccctgtggagaaggagttcgagtacacggtggatgtgaggtgcgcgagctcgacgacgaaggtatccggggcggtggttgttggggagttcatgggggagggcaatgcagctgcagggggattgtacgccagggtggaggctctggaggcggacagggcggcaatgcggagggaaatcgcagcattgcgagcagagagagctcagctggtgatggcgagggcgatggcgcggcggctgtgccgggaggtggttgctgaacagaaagccaagaaagtggctgcctcaccacgaagcttctcggtgctaggggtttgcaagtgggtgctctcgataatcttttggagaaacagaagttccacagccaggtataccttcggtctgtcaactacgttccttggcttcctactgctgctcgacagatccaccatgttgagtccctggcgtcgtctgcctagcccacggcaatgaaacgaccttcccgggcatattgtctataaatcagaacctggaatcattgtttacagcttcattgtaagtgtgtgtattgcattctttgacatgttcttcctcttcttttttttttcttttttgcccaagcacagtttttgagctgtatgtttttatttggaagctttgagcttgtcttatagtgtgtttattcaaacctaggcgtgaatagcttgtaatcaggagctaactgacatgctctgtgtagagtgtacatcatagtaagctatggaatctgatcttgtttgcgcggttgccg

SEQ ID NO: 21510 - DNA, 1352 bp, Oryza sativa
  ref <308>: DATABASE ACCESSION NUMBER: AK071788
  ref <309>: DATABASE ENTRY DATE: 2001-12-06
gaggtttacagcatctgcggcgagatggagaaggaggtagaggaggaggaggaggaggaggaggcggaggcgagtagaaagaagggagaacgcggattaggggagggggaatgcggggcgccgagtagcaagaagagagaccccgaattggagttgcgcatgaagcagaagacggcggagtggcacaggaaggcgagggaggagaccctgaaggagatagccaaggagatggccaagtaccccaacgaagactggtccgacacaccgggcgtcaaggctcgcgagtaccgcgaggactgggaataccgttggtccgccatcttcggtccctacgacacaatctcgcctataccacccatgcgctatacacaccgtaaggacgactctatgccgagacatatttcagtccgtcacactctgcagatcatctcggtcaaaataaagggaataagagggggcttacagtggccgatcaatgtgtttggtctcattgctgcgcgcgacacgattgaccgcaaccgcattatgatcttcaaccgcaccagggataactgccaaacaattactaaagaggatcgatatttattactgacaggtcctacgcgtgctgttgtggtatctgaccctgtgtattttgaggccccgctgaaagtgaagggctctgtcgaatctgaggataaagatttaagctttttagctgtcccgctcaccggtgcttctgatagaggtgaaacgcgcttggttaatagagagtacactagcaggcttagcacgctggagttgacatttggctttgttgttgagtccttggaggcctcaatcagtgtgcgtatcattgatgggtcatggaaagatggttttcgtggtgcattcactgcccatacccccagtctaaaagacaataaagtcctgctgcttgattctggatattgtgagatggtgcctgttactgctgatcgcatgatcaagctttcacgccatgttgtttccgtggaagtgagggagacctgaccgtttcagtgctggcacttggaactgataatgtgatagaagatgagaaggatttcacgcctaaggaagccggtatgagccagagctctcttgacgtgggcttttgtaaattggaagtaactgtcaactggtcacttctttccttgcttcctgatggctatacttaattaagtacattgcacagtggtatgtgaattgtgatgttcctttggatctgttgcttctgaacttctgaaatggggtgttggttttttttcttttgtttactagctagaatagcgaactcttgatggacgcggtatcctgtgtatagaatgttggcagtattgccaccgctacgg

SEQ ID NO: 21511 - DNA, 1006 bp, Oryza sativa
  ref <308>: DATABASE ACCESSION NUMBER: AK071789
  ref <309>: DATABASE ENTRY DATE: 2001-12-06
gagaagaggtggtggtggtggtggtggtggtgtgtggcctccttcccctccctcctctcgcgaggttgccatgcctcccccaagatcctagaacgcatccccacaacctcacctcgctcgcaagaatcttcttcccaccatcgccctccctcgggatcgatccaacccgatcatcaatcggggcggggaaggaggaggaggggatggaggcggacgccgggaagctgttcatcggcggcatctcgtgggacaccaacgaggaccgcctccgcgagtacttcgacaagtacggcgaggtggtggaggccgtcatcatgcgcgaccgcgccaccggccgcgcccggggattcggcttcatcgtcttcgctgaccctgccgtcgccgagcgggtcattatggagaagcacatgatcgatggccgcatggtggaggcgaagaaagctgttcccagggacgatcagcacgctcttagcaagagcggcgggagcgctcatggatcgccggggcccagccgcaccaagaagatattcgttggggggctagcgtccaccgtgacggaggcggacttcaggaagtactttgagcagttcgggacgatcaccgatgtcgtggtgatgtatgatcacaacacgcagcgtcccagaggttttgggttcattacgtacgattcggaggatgctgtggacaaggcattgttcaagaccttccatgaactgaacggtaagatggttgaggtcaagcgcgcggttcctaaggaactatcacctgggcctagcatgcgttctcctgtcggtggattcaactatgccgtgaacagagccaataacttcctcaatggatacacccagggttataatccgagcccagtcggtggctatggaatgaggatggatgcaaggtttgggcttctatcgggtggccgtagtagttatccttcttttggtggtggttatggagtcggtatgaattttgatccagggatgaaccctgctattgggggaagctc

SEQ ID NO: 21512 - DNA, 624 bp, Oryza sativa
  ref <308>: DATABASE ACCESSION NUMBER: AK071790
  ref <309>: DATABASE ENTRY DATE: 2001-12-06
gacctccactttcaaggcctcctcgatcgatcgatcgatcgaattgatcgattaatctcctcctccaccaaccaataatataatccagttgtctctgttggccgctcgttgcgaccacgccactacagtcggggcaaccatgggtgcttgtgcaaccaagcccaagacgctcgagggaaaggctcccgaggaggccactcccattgaggcagcacccaaggttgcccttgagaccacaatgatctccaataaggaggttgtggctgatcaagcacctgagaaggtagtggaggaggccaccgcgatggcagagttaccaccaaatgatgatgccattgtcatgcaagacaaggaggaggaagttgaagaaaagatcgtcgaggaggagaagccttcagccccagctgcagaggtgaacaataccgaggtggtcgaggagaccatagaggtaaagaacaccgaggtggacaaggggaccacagaggtgaagaactccgaggaggagaagccaattcagagctgataaacgaccatgtaaattcgctccatgattatatatgctcatccttatgcgtgtaatccattagggttggcatatatatctagttccatgtgacatggatg

SEQ ID NO: 21513 - DNA, 1530 bp, Oryza sativa
  ref <308>: DATABASE ACCESSION NUMBER: AK071791
  ref <309>: DATABASE ENTRY DATE: 2001-12-06
gggcggtaacagtgctagctccatggcgttcttcagcagcggatcgcgggcgctggtggaaatcctgacgggattgcagagtgttgaacgacctatgcctgttgatcataccttgtttgagtttggatcaatccgttaccatttacaggcttctattacagattcagagaacatatacttgtcaatatcaacaccatctctttcttatgaggcttcgccatccagcggcttgcctgaaatcacattacaggagacaaggaaaatgtatcacaagtttgcagagatcatcgagcctgcaaaagaaggatacactttgacactgagactgaacttctctggccttactcgaccgaaagatcgcaccaaggcgatcaaccagatatcgttgctgcaatccgtcatccttagctcgcagctcaaggacatgctggcgagcctcggctcgtccggcacgatgaagctcgtgtacaaccaaagggaccctttcttcgtcagcaaaacgccggtgaagataagcgccatattccccatgcgtttcagggacgacacggacctggccatcgcgtcgtcgttcttccaggagctacaggacctcgggagcacgtcgtccttctccagggcgccgcggtgcagctggtcgccgatcccgccacccgagctgcgcggggagtacgtgcaccacctcaccaccaacggtggcttcgtgtccttcgacatcctggcgcggcacgtgaaggggaggagggcggctaggacggcgtggatcctgctcaatttccagtcctacgtgaaataccatatcaagtgcacccgaagctacatccagagcaggatgagaaagcgtctggagatcatgacagaggtgatcgatgacgcgaagttcagaggaaacgatgagagcagcaagaagctgcaagtgaggaagagaagcaagagaagatcaatcaaattcgcgagagccaaaaagctccaaaagggtttcaaagctgtcatcgacaagatcaagcggctgcggctgaggatcagagtgaaaggcctggaccggttcaggaggcactgccagtgcttcccagtgctcaaactgaccatggcacagaggaaggagcagaagtaccagaagctggagtgaatcctaatcaactttacgactaatcacttttttttttcacagcacaggcacaagcgtggtgatacatgcatgctgactcttatcctttttccatactgatcaagtatacaaatctggtgagtgatgaacatccattcagatggagggcactaccatagaaaaaggctaacaggaggacagacagtacacggttatttaaaaaccgttacatatatctaaaaaatatcatagacgactatattaggaattgtctatgataaaaagcatctagtgtgttttttttcttttgaaaagcacgaatgtgttttttgttattttcacttgtggccaatcgtgcattggattgtggaaaacatgcattttcacttgacgtacgtcaggcagtgacaatacctgttcgc

SEQ ID NO: 21514 - DNA, 1156 bp, Oryza sativa
  ref <308>: DATABASE ACCESSION NUMBER: AK071792
  ref <309>: DATABASE ENTRY DATE: 2001-12-06
gtgggcatcacttgcccgcaaaattgcaataactcaccataatatttcaaaataattcgacggaattcattcgctcgcgccgtctccgaaaccgaatccatttcctgatccagcaaaggacacagagagagatcccatctcgtcctcgtcgcctccgcctcgtgagctccactcacctaccccacttcctctcctcgcttcggccgcggccccaaaccctaaccctccccgcggcgatcccgatggccaccacctcccgccgatccctccacgccctcctcggcggcggcgcagtcgccgacttggtgctgtggcggcggaggaacgtgtccgcggcggccgtggcgggcgccacggcggtgtggttcctcttcgagcgcgcggggtacagcttcccgtcagtcatggccaacgccctgctcctcctcgtcgccatcctcttcttctgggccaagtccgcctcgctgctcaacaggcctcttccaccactccctaaactagaggtctcagatgtggttgttgagaaagctgcagatcgggctcttgtatggatcaacaaggtgttggctgttggccatgatattgccatcaagagagataggagtgtttttataaaggttatattgattttatgggtggtttcatacattggaatgctcttcaacttccttacgctcatttacattggtgtaatgttttctctgttagttccaccattgtatgagaagtaccaggaccaagtcgatgaaaagattggtatggcgcacagtgtactatcaaggcacttagataccatcattagcaagactggagaatcaaccaagcaaaagaagactgagtaaccggtgtttttgctacattgggaacctcttttgtcatatgtggttggtcatgaacctcgtcagttactctccatacctgtgaaccaccactggaaatattcttggatatcgaagatgtcatgtttgactgctgatgtagtttacatgcactctgttcaatttgagaaatggaatgctttgtatattttttcaagtaacatgacacatgctgaggtttatcatgggcacatatcttgtggataatgatatatacttttcccctgaaatcattttctgtagccggcatatacaaatatgttggttgctggtgcacc

SEQ ID NO: 21515 - DNA, 1024 bp, Oryza sativa
  ref <308>: DATABASE ACCESSION NUMBER: AK071793
  ref <309>: DATABASE ENTRY DATE: 2001-12-06
gacccgccacacgtaacttttcccccacttgcctactcttcgtctcttcctttccttttccccttctccgatcgcgcggccatccccaccaaccatggagatctccgccgccgcgccctcctccaggccgccgccgccgccgctgtcgctcctcctcctccgcccgctcgcctcctcctcgcccgtcccccccgccaccgccacctcctcctccaccaccatcatccgccgccgcccttccgcctcggccaccgccaccgtccgccgccgcgcgcgcacccgcccccgcacccgccgatccaagcctccctccgacgcgggcgggcccttctccggggacgacggcgacagcttcttcggcccgggcggtggcgggggtggaggaggaggaggggggtggtggtggaaccgcgggtctgggtcgggggctggatgggaggactcgtccggcgagcccgacgtgcccgcgccgcggaggtccgcggcggaggcggcgctcggggtggtgtacgagctcatgtgcctcatcgcgctctccaactgcacccagttcgccgtgcggaggctcgcgggcctcctcgccgcgcgcgtggcggcgctgcgcttcgtccccaccgtctgctgagggtgggtggggttcgcacggttcggtctcctcctgccttgatcccgtctctggtgtcggcggattcgtcactcttgtctgaaatccgctgccgcttctgtatatatgtacctgcctgtgattctataggttggggggattgggatctctgttccgtggtactcgcttctggcgaatcgtggaacagccacaaattcgtcgaattgaaactgaagaacaattgaacatgaccttttatcttcgtttgttggactcaagattgcttgcttaatgcaaattactttaggatgtagcctgatggctgatgcagtctgaattcttgtacatagtagtattctgtaatctccattgcagctactggcatttgggcatgcttaaaataattcagaagtgtgattt

SEQ ID NO: 21516 - DNA, 1396 bp, Oryza sativa
  ref <308>: DATABASE ACCESSION NUMBER: AK071794
  ref <309>: DATABASE ENTRY DATE: 2001-12-06
gagaattcagcgagagagagcgaatcagccactgcacttcttgttcttgttctcttcctcctccggaatccgatccatccattggccgccgccgccgccgccgcctcgtgcgtcgcgtgttcgtgtccagagacgatgggcagcctcgccgccgagaagaccgtcaccgggtgggccgccagggacgcctccggccacctcaccccctacaactacaccctcaggaagactgggcctgaagatgtggtggtgaaggttttgtattgtggtatctgccatactgacatccaccaggccaagaaccaccttggtgcttccaagtaccccatggtccctggccatgaggtggtcggcgaggtggtggaggtcgggccggaggtgaccaagtacagcgccggcgacgtcgtcggcgtcggcgtcatcgtcggctgctgccgcgagtgccatccgtgcaaggccaatgtggagcagtactgcaacaagaggatttggtcctacaacgacgtctacaccgacggccggccaacccagggcggcttcgcctccgccatggtcgtcgaccagaagtttgtggtgaagatcccggcggggctagcgccggagcaggcggcgccgctgctgtgcgccgggctgacggtgtacagcccactgaagcacttcgggctgatgtcgccaggtctccgcggcggcgtcctggggctcggcggcgtggggcacatgggcgtgaaggtggccaagtcgatggggcaccacgtgacggtgatcagctcgtcggcgaggaagcgcggcgaggccatggacgacctgggcgccgacgcctacctcgtcagctccgacgcggcggcgatggcggccgccggcgactcgctggactacatcatcgacaccgtgccggtgcaccacccgctggagccgtacctggcgctgctgaagctggacgggaagctgatcctgatgggggtgatcaaccagccgctgagcttcatctcgcccatggtgatgctcggccggaaggccatcaccggcagcttcatcgggagcatggccgagacggaggaggtgctcaacttctgcgtcgacaaggggctcacctcccagatcgaggtcgtcaagatggactacgtcaaccaggccctcgagcgcctcgagcgcaacgacgtccgctagcgcttcgtcgtcgacgtcgccggcagcaacatcgacgacgccgacgcgccgcccgcctgatcgccgccgtgcaccctcatggcagcatccgtatgatccgttcttgaacttgtttgtgtgagactctgacgacttgtccatgtaacgtccgtgtgcctttccggtataaattcggcctcgcaatatatgggccattttgcatttccgatcaaaatcatgcttgcgttcc

SEQ ID NO: 21517 - DNA, 1731 bp, Oryza sativa
  ref <308>: DATABASE ACCESSION NUMBER: AK071795
  ref <309>: DATABASE ENTRY DATE: 2001-12-06
ggtatataacagattaagatcgatcgatcggacaattaattaatggagagcaacggcggaggaggaggatctcccaaggaggcagcggtggtggtgccgtcctccggcgacgccaccctgggcgggcacctggctcggcgcctcgtgcaggtgggcgtgagcgacgtgttcgccgtgccgggggacttcaacctgacgcttctggaccaccttctcccgcgacccggtgccctacttcctctccccgaggctctccaaccaggccagcctccacgccgcgctcgacgccaccctcgccttcctcgacaaggccgtcaagcccgtcctcgtcgcggggcccaagctccgcgtcgccaaggccggaggggccttcgtggacctcgccgacgccagcggccacgcggtggccgccatgccgtccgccaaggggctggtgccggagacgctgccgcgcttcatcgggacctactggggcgcggtcagcacggccttctgcgcggagatcgtggagtccgcggacgcctacctgttcgcggggcccatcttcaacgactacagctccgtggggtactcgtgcctgctgaagaaggagaaggcggtggtggtgcagcccgaccgcgtgaccgtcggcaatggccccgcgttcgggtgcgtgatgatgagggacttcctgtcggagctggccaagcgcgtccggaagaacacgacggcgttcgacaactacaagaggatcttcgtgccggagggacagctgccggagtgcgaggccggggaggcgctgcgggtgaacgtgctgttcaagcacatacagaggatgatcggtggcacggagatcggggcggtgatggcggagacgggggactcgtggttcaactgccagaagctgcggctgcccgagggttgcgggtacgagttccagatgcagtacggctccatcgggtggtcggtgggggcgctgctgggctacgcgcaggctgtccaaaaacgggtggtggcttgcatcggcgacggcagcttccaggtgacggcgcaggacgtgtcgacgatgctgcgttgcgggcagcggagcatcatcttcctcatcaacaacggcgggtacaccatcgaggtggagatccacgacgggccgtacaacgtgatcaagaactgggactacgtgggcctcgtcaacgccatccacaacggcgaggggcggtgctgggccacccgggtgcggtgcgaggaggagctggaggcggccatcgcgacggccacgggggacaaggcggacagcctctgcttcatcgaggtggtggcgcacaaggacgacaccagcaaggagctcctcgaatggggctccagagtctccgccgccaactccaggccgcccaacccgcagtagtaccgccattaccattcatcctcgatcccggccccatttgcacctacctgctgccttttatatataaatttcgataatattagtatactatatatatagatcatatagaatcatcgtacgaataaatgatggagtgaataaagctacaatttttaattattagaaaaaaaatccccgtgcgttgcaacgggtgaatgctattttaatcttattattattattattattattattattattattattattattattattattattattattattattattattattattattatatggtttatttaaggtgaaatccactgtgttaaattcgcttggatatattttttgtt

SEQ ID NO: 21518 - DNA, 1132 bp, Oryza sativa
  ref <308>: DATABASE ACCESSION NUMBER: AK071796
  ref <309>: DATABASE ENTRY DATE: 2001-12-06
gatctcgttcctcctttccccaaaccctcgcgctcgcggctctgatccagcgctcgctgacggccgcgtcggcctcggcctcctcggtggcggcggcgccgggcgtgggccgggtggagccggccgtgacgctcgaccaggtgccgtggtggagcgaccccgaccagcgcctctcctcctcctcttcccgcactgccaccggattcgtcaagactccctccccccccaccgcgtcctcttcggtttcaccaccaccaccagcaccaccacccagcagaacagcgcctccaccaccaccatcgacctctcctccgacgagagccgccgtcgcctcatcaacaggctgctttacaggagcaagcagcgggggttcttggagctggcctcatacaagcagcgaggacgacggcaagccagacctcggcgtcaccggcaccggcggcggctgattactgctgctgcttcaccatgtcctctcttgcagcagcctgtctagatttcttggctcatctaaactctggatctctgcatgctgacgaggttagtaggttgctcaagtaactgagcatggagatgaagaccaacaaagtatgcttcagagaaaagcgctggtgtccggcagcacggctacgcggcagggacatgcgcgtggcaagtggcgaggcagcaggcagcaggcgcgatgcagcaggcggaaggcaagcagcagcagcagcatgattctatgtatatctatcctccctgattcatatatgtgatttattgctgaaacttcattacttgaggggttcctgagcaagctgaggccggccctgccgcagttcaagcacttcttgtccctgtccctgccgcagttcaagcacttcctatccctgccacagttcaaacacttcccacgagtggccaaccagttgatttgctgatttgctgtgttgtaaattttgtgttgtattggatgtttgtcgggttgtgttggatgctaattgggctgaaacctttgtgctatatgggttgttattatgtttgattgttgggcctatatgggttgttattatgtttgattgttgagcctatatgagcttagcccacttgttatttgatactaatataatgaatataatatgacgggctg

SEQ ID NO: 21519 - DNA, 1147 bp, Oryza sativa
  ref <308>: DATABASE ACCESSION NUMBER: AK071797
  ref <309>: DATABASE ENTRY DATE: 2001-12-06
gacactacagtctacagtgcagtgcagtactccctcagattgatcgatcgatcagatggtgtcgtgacacaactggggtgcggaggcatggtagtgtgtacagccatcagccactgcgtctgcgacggcatcgcaaccgccaacttcctccacgcctgggccgccttcgccgcagccgacctggacctcgccgccgatcgtgacgacgacctctccgtcgtcctccatgaccgccgcgccttgcgcccgcgctgccctccgcgcgtcgccttcacgcacccggagtaccacaccagcagcagcagcagcagcctcctcctcatccagccccagctgatgccgctggcccccgtctccctgaccttcacagcggcccacctccggcgcctcaaggcccggtcgctccgcagctgcacctccttcgaggcgctggcggcgcacgtgtggcgcgcctgggtcctctccctcgccccgccgcccccgcccgacatgcgcgtcaagctcctcttctccgtcaacgtgcgccgccgcctcaagccggagctcccctggacctactgcggcaacgccttcgtgctggcctgcgccgaggccacgccgaccgagctggcggcgggtgccggggtgcggctggtgcaggaggccaaggactgcatcgacgacgactacgtgcgatccaccgtggacctcctcgaccagcggcgcggcgccaagccggacctggcggcgacgctggtcatctcggcgtggacgcggctggggctggaggacgtcgacttcggcaaggggagggcggcgcacatgggccccctcaccagcgagatttactgcgtcttcctccccgtcctcgccgaccccaacgccgtcaccgtcctgctctcgttgccgcaacccgccgccgacaccttcgagcaccattgctgcagctgcttcctcctcgacctcgacgacgaccagcccgccgtacccgtactagtggacaagcaggaccacgacaaccagctcgtgcgtgcccatcatcaacatgacatcctcgcctagtagcttcttaattaatgcactactaattaactactatttccatcccaaaatataataatttttactacctccgttccaaaatacaattatctctgctttacaactc

SEQ ID NO: 21520 - DNA, 1064 bp, Oryza sativa
  ref <308>: DATABASE ACCESSION NUMBER: AK071798
  ref <309>: DATABASE ENTRY DATE: 2001-12-06
ggtcggcgtccccaagacgatcgacaacgacatcgccgtgatcgaccgctcgttcgggttcgacaccgccgtggaggaggcccagcgcgccatcaacgccgcccacgtcgaggccgagagcgccgagaacggcgtcggcgtcgtcaagctcatggggcggaacagcggcttcatcgccatgtacgccacgctcgccagccgcgacgtcgacctgtgcctcatcccggagtcccccttctacctcgaaggcaagggcggcctcctcgagttcgccgagaagcggctgcgcgagaacggccacatggtgatcgtcgtcgccgagggcgccggccaggacgtgatcgccaggagcatgcgcctcgccgacgcgcacgacgcgtcgggcaacaaggtgctcctcgacgtcggcctctggctgtgcgccaagatcaaggatcacttcaagaagaaggcgaatttccccatcacgctcaagtacatcgaccccacgtacatgatccgcgccgtgccgtccaacgcctccgacaacgtctactgctcgctgctcgcccacagcgccatccatggcgccatggccgggtacaccggcttcaccgtcgcacccgtcaatggccgccacgcctacatccccttctacaggatcacggagaagcagaacaaggtggtcatcacggacaggatgtgggcgagggtgctctgctcgacgaaccagccgtgcttcctcagcacggaggacgtcgagaaggcagggcaggacgacgaggagccgatcgtgccgctcgtcgagggcgagaactcgctcgtcaaggcgccgccgctgctggccaacgccggcgatcgcgccgccctctgcaacggcgccgcctgaagcttgaagaagtagctacacgaagaagacgatcacacggccatgtttggtagtgcgaaattcacagaaatgtttatgtaattgtaggatttttttttctttagattctttttgctcattcatttttcggcttgccggtatagaggaagtattgacaaaatgagaataattgaaagtttatgtggcaattgtttgc

SEQ ID NO: 21521 - DNA, 872 bp, Oryza sativa
  ref <308>: DATABASE ACCESSION NUMBER: AK071799
  ref <309>: DATABASE ENTRY DATE: 2001-12-06
gatctagaaacgcgtccacgcagatcggagagaccgaggctgcttcttcctcttcttcttcttcccccagccgcgtcgtcgagaaggttctagagggttcgagagagggtgggagggaccgcgaaagcgacggacgatggcgctgcagtggatgatcctggcgtgcgtggtggcggcggaggcggcggtggccgtgatgctcacgctcccggcgccccgcgccgtgcggaagcagatcgtcgggctcacctcgatgctcctccagccattcgccgggatactccccttcgcggccttccagctcctcgatatctactggaagaacgagcacaggttgatgtgcacctccgagatttgcaccgctgacgagcgtatccgctttgagaaatccatcttcaaggcccagaggaatgtcattctttgtgtttcagcatgcctcctttactggtgcattttccgtatttgcaagtacaacaaggatattaaggcattggaggagactgagaaacgcctcaaggaagagtagattaatcacacttacaggtggattttgtgctattcctgtccttcagatgtatgcagatagttatgtgggattcccagtgtatattgttcgccttgaggcaaagaaaatgttacgctgtttcggcacatgattttcagtacgatttctcgtttaattgtaagtcgtccggattctctttttttgtgttttaacttgggatgatgtcagtacgatttctcgtttaattgtaagtcgtccggattctctttttttttgtgttttaacttgggatgatgtctaccaagaatacatgagaaccactgaaccctggtcatccttcaattcaaccgtttgaacatttgcctgc

SEQ ID NO: 21522 - DNA, 1235 bp, Oryza sativa
  ref <308>: DATABASE ACCESSION NUMBER: AK071800
  ref <309>: DATABASE ENTRY DATE: 2001-12-06
gaggaagaacactgggggagaagaacacaagtgtgcagcgtgcgtgtgtggaggcgagaggaggaagacgaaggcgaggagggaggaggtagctgcgcgcgggcgatggaggtggggttcctggggctgggcatcatggggaaggcaatggcggccaacctcctccgccacggcttccgcgtcaccgtctggaaccggactctctccaagtgccaggagctcgtcgcgctgggcgccgccgtgggggagacgccggcggccgtcgtcgccaagtgcagatacaccatcgccatgctctccgaccccagcgccgcgctatctgttgtattcgacaaggacggcgtgctcgagcagattggggaagggaagggttatgtggacatgtccactgttgatgccgccacttcttgcaagataagcgaggctataaaacaaaaaggtggggcttttgttgaagctccagtttcaggaagcaaaaagccagctgaagatggccaattggtcattcttgctgcaggggacaaggtattgtatgatgatatggtccctgcatttgatgtacttgggaaaaagtcgttctttttgggagagattggaaatggagcaaagatgaaactggtggtcaacatgatcatgggaagtatgatgaatgctttgtctgagggactctctctggctgataacagtggtttgagcccccagacacttcttgatgtcctggaccttggcgccatcgcgaatccaatgttcaagctgaaagggccctcgatgctgcaaggcagctacaaccctgcatttcccctgaaacaccagcagaaggatatgaggttggcacttgccctaggagacgagaacgctgtctccatgccagtggcagctgcttccaacgaggcgttcaagaaagcaagaagcttgggactaggggacctggatttctcagcggtttacgaggtactgaagggcgcaggtggctcaggcaaggcgtgaaactctgaacgctagaatccattcttcagaatctgcccattgccgtgcaggtttgctacagtgatcggcatcgaaccacgcagcatatgtcatcgtattgatactactgggtaaccagtgtgaacgatgtagttgcaggttaagtactacagcttgcgtgaacttcatcccaataataaagatatatatagctctgttatgcgatgcaactgtgtagtcacccaggttaagtacgttttttagtgccc

SEQ ID NO: 21523 - DNA, 1787 bp, Oryza sativa
  ref <308>: DATABASE ACCESSION NUMBER: AK071801
  ref <309>: DATABASE ENTRY DATE: 2001-12-06
gacaactcacacacagctcgtattttcctagcccagtagcccactagccggcatggagaagaagcgggtggtcatcgtcggcgccggcgtgagcggcctggcggcgtgcaagcaactgctggagcgcggctgccggccggtggtgttcgaggcggacaccggcctcggcggcgtgtgggcgcggacgccggagtgcaccgcgctgcagacgccgcggcccatgtaccagtactccgacttcccgtggccggagacggtgacggaggtgttcccggaccaccgccaggtgatggactacctcggcgcctacgctcgccgcttcggcgtgctcgactgcatcaggttcggccaccgggtggcggggatggagtacgtcggcgtcggcgaggaggctgtggcggcgtgggatgagtgggctgggaacggcgacgctttcggctccggctccggcgagtggcggctagaggtggtcgacggtgagggccatattgagacacacaaggcggattttgtcatactttgtattgggaggttcagtggagtgcccaacataccaacatttcctccaggcaaaggtccagaagcatttgatggccaggtgatccactccatggattactccaagatgggcaccaagaattctaaggaaatgatcaagggcaagcgtgtcacgatcgttggctacctcaaatcagcacttgacattgctgcagaatgtgcagaagtaaatggtactgagattccatgtacaatggtggtccgaacaaagcattggatcataccagactattttgcatggggcgtccacatctcaaagctgtatcttaatcggttttctgagcttcttattcacaagcctggtgaaggcttactccttagcatcttggccaccctcttgactccattgagatggatattttcgaagtttgcagaaagctattattccattccaatgaagaagtatgacatggtgcctgaccatagcctatttgaggctttgattacatgcttggttgccattacacccaaagaccattacaagagattagaagaaggcagcattgttctgaagaaatcaaagacattttagcttttgcaaggaaggtgtgcttgtcgaaggccaatcttcgccgataaagagcgatatagtgatctttggaactgggttcagaggggatcagaagatcaaggagatgttcacttctgaatactttcagagcattgcagtaggctctgcatctacaactgtacctctctacagggagatcattcacccaaagatcccgcagctcgcggttatcggctattcagagagcttggcaaatctctacacatcagaattacgggccaagtggctggcacatttcatggatggtggcttcaggttgccaagcatcagtgtgatgcagaatgatgtcctggaatgggagaagttcatgaagcgctattctcgtggttactttcgcagatcctgcatcggaatccttcacatctggtacaatgatcagctatgccgggacatggggtgcaatccgaggaggaagaacggattctgggctgatttattcgacgtttatggccctagtgattatattgatcttttccccaagaaagagtagtactttcgactcggagtcgtgtggaataaatttatcgcctgatcatgcttgttttaaggttgtcactacctggtttcttggatttctgctgttttgcatagtgcaaattcagtaaaccgtgtgaagtgtaaggtacagttgtgtaatataaggagatggattttaacc

SEQ ID NO: 21524 - DNA, 1613 bp, Oryza sativa
  ref <308>: DATABASE ACCESSION NUMBER: AK071802
  ref <309>: DATABASE ENTRY DATE: 2001-12-06
ggtccttcatcaagatgttattccgaagcataagccacaggaagatgtcaactttcaaagcaaatttgagtgagaaggggatttgcattcttttgcagatgcgaggctttccttataaaatgatgattccacagagaagttacgtacagtccttggtaaaaaaaagacccccaaatcaaatcagtgcatcatcctcattgttgagccttggcattggcattcctctttgagcttattgcacaattaaattgatcacctcagtgacagccttgttccaggatcccacctacaatggcaatggcaatgaatcgatcagggcttctgcagcagggcggtgaggtagacgtggtcatgcttggctccgggtggcgccgtgggcgtgggtgtggtcttgtcggcgacggcccacttgagggtcttgtagccgaggcggcgcagcatgggttggtagacggcggcgaggtcagggcggcggcaccagaagtggtcgacccagagcaggccgcgggggcgcagcaccctgtccgcgtcgtaccacaggaactccagcgccgcctccgggatccagcggttcacggcgtgccccgcccgcaccaggtccatggtggcgtcccccaccgggaagcgctgctgcagcggcgcgtgcagcggcaccaccccgcgcgccgccgccgcctccgagtagggcgccccgaggttcatagtggtggtgagcacggtggcgttggccgcccgcttgaggcgcgccgccagcgtccccgtcccgccgcccacgtccagccccagccggatgggccccgcgcggctgagcgatgccaggcgcagcagctgcggcaccgtgaggtcgaggggcccctccgcccgcaggaagcgcgcggcctccgtgcgcgcgaggtcgaagccgagcgagggcgggaggcaggagaaggaggtgcatttggcccccggaggccagcggacggcggagtccgggagcggggagaagggatcggtgggcagattattcaggttgtgagaagacgagatcgaagatgatgagaagcaccttcgcctgggcagcgggtggcagccgcggaggaggaggggctcggcgagggagagggcgtcgtcggggcagggggagaagggcgtgtaggacatgaatcggtggaggaggtccgggtgggctgagcaggcggaggcgaggggcgccaggcgggagtagaggaggagctccggtggcggcggcggaggcgggggcgtggaggagcggaggtggttgagttgggagacggtggcgcggatggcggtcagctggcggaggagctgctcgtcctgggcctgggcctggtgcgccgccggcaagaggagcggcggtgcggtggatgcgcgggtggagaggtggtagagggacagcaggttggtggcaaccatggagagtaggaaggcgatgttgaggctgctggagctggagaccgtcgtcttcctcatcgccggcaccccatccagatgtgaatccgccatgcccatgcccagagtgagttgtcggtgaatacaagagtgtggcacctctctctgctttcttgatctgctctgctctgctaataataataaaatcactttgacttgtgttg

SEQ ID NO: 21525 - DNA, 2047 bp, Oryza sativa
  ref <308>: DATABASE ACCESSION NUMBER: AK071803
  ref <309>: DATABASE ENTRY DATE: 2001-12-06
gtggcacagagactcctcgcctctgctccgctgctgcttccctgttcacccgccattagcgcgaccgagctcgctcgctcccggtgcaagttgcaccgcctaccggcggcggccatggaggacggtgcggcggcgcgggaggcggagaggtgggaggggtacgtcgactggaggaaccggccggcggtgcgcggccggcacggcggcatgctcgccgcctccttcgttcttgtggtggaggtgctcgagaacctggcgttcctggcgaacgcgagcaacctggtgacctacctgatgaatttcatgcactactcgccgtcgcagtcggcgacgacggtgaccaacttcatgggcaccgccttcctcctcgccctccttggcggcttcctctccgacgccttcttcaccacctacgccatctacctcatcagcgcctttgtggaattcctggggctggtggtcctgacgatccaggcgaggacgccgtcgctgatgccgccggggtgcgccaaggttgccggcgcggcgtgcgagccagtgtcggggccgaagaaggcaatgctgttcgcggggctgtacgtgacggcgctggtcatcggcggcatcaagggctccctcccgtcgcacggcgccgagcagttcgacgagcacgcgccgcgggggcggaaggggcgctccaccttcttcaactacttcgtcttctgcctctccgtcggcgcgctcatcgccgtcacgttcgccgtctgggtggaggacaacaaggggtggcagtgggggttcggcatctccaccatcgccatcctgctctccatcccggtgttcgtcgccggctcgaggctgtaccgcaacaaggtgcccacggggagcccgctcaccaccatcgccaaggtcgtcctcgccgccgcgctcgctcgccgcggcggcgcgcagagcgccagcaacggcgctgtcatcgaccgcgcgcccagccccacggggagcacggacatgaaggagtactgcaagcccggcgacatctgcggcgtcgccgacggcgccgccgaggtggctaccgagccgtcgcaggagctggtgttcctgaaccgggcggtgcagcggcagccgcggtgcggggcgctgtcgtgcacggtgcaggaggtggaggacgtcaagatcgtgctcatggtgctcccgatcttcttctccaccatcatgctcaacagctgcctggcgcagctgtccaccttctccgtggagcaggcggcgacgatggacacccgcgtcggggggctcaaggtgccgccggcgtcgctgccggtgttcccggtcaccttcatcatcctcctcgccccggtctacgaccacatcatcatcccgttcgcgcgacgcgccacgggcacggagatggggatcacccacctgcagcgcatcggcacggggctcgtcctctccatcgtcgccatggccgtcgccgccgtggtggaggtgaagcgcaagaacgtggcgtccaacgccggaatgctcgacgcggcggcgccgctgcccatcaccttcttctggatcgcgttccagtacctgttcctggggtccgccgacctgttcacgctggcggggctgctcgagttcttcttcagcgaggcgccggcgaggatgcggtcgctggcgacgtcgctgtcgtgggcgtcgctggcgctggggtactacctgagctcggtgctggtgacggtggtgaacagcgcgacggggcgcggcgggcggcgggcgtggctgcagggggagaacctgaaccactaccacctggagaggttctactgggtgatgtgtgtgctcagcacgctcaactacctcttcttcttgttctgggccatccggtacaagtacagaaacgccggggtcatcaagggatgatgatcaatctgtaatgcagggttaactgtttaattatctggcaaggtaaaaaaaggagggaggttaatttggtggtcttgaggatgctcattgctgtgtggaattggttggctggctgtggccgatgaatgaaaagaagcagcgattaagcaagttgttc

SEQ ID NO: 21526 - DNA, 1869 bp, Oryza sativa
  ref <308>: DATABASE ACCESSION NUMBER: AK071804
  ref <309>: DATABASE ENTRY DATE: 2001-12-06
gaggagtcaagtcgccgacttttggagttctcctcgccccagctcggtaaattccttcgctttttctccgctggttcggagatttccatgttcacttttgtttttttttttaattaagggctttgctttgatggaagggttgggtactggttccttccctccggatcaatcttgcttcttgcgctcacccaacctagtaattttttcctctcccgatttgtttaatgctaatctaggtggttgatgatgcttgcgagccaggcattgattcggctttaagcttgcctgcttgcttcgccgtcttgttctttgagttcttggttttcatggatccttgatccgatttaggggttgctgctgctagccgtggttggtgagacggttcttggagaagggggatttcttgaggtgcttttctgggaggtgtaaccaactaaattcctatgctaccttctggttgatggccgtccctcctgttgaatcagaaacaagaagtgaagaaacagataatttccctttacttgcagaccacatggaaaatactggacatcatgcacatgcagttgatatcccatgggattcttcaccatcgacatctcgccgagataatcataatggatttgatcaattacctcgtatcttagaaggttctcctgggacatctactccatctaactctcagaatggtcctctagcaagaagagatgataatcgtggtcgtcgtcagcctagtcccttgaattctggttgctggatctcagttgagctagttgtaaatgttagccagatcatagcagctatttgtgttctgtcagtatcaaggaatgagcatccacactctccgttatttgagtgggtcattggttatacagtaggttgtactgccacgctgcctcatctttactggcgctatctccatcgcaacctcccaaccactgggcaagagccaacagttcagaatatccctccaaacaacacccctgaagctaattcatatggagtaaccggcacaaatggagtctcaagaaacaatgaggcaacagtaaatccaaggttccaagcttttgctgatcacttcaaaatggctctggactgtttctttgctgtgtggttcgttgtgggaaatgtatgggtatttggtggacattcttctgctcacgacgcgcccaacttgtacaggttgtgtattgccttcctcacattcagctgcatcggctatgctatgcctttcatcctctgcgcattgatatgttgctgcctaccctgcataatctctatcttgggatttcgggaagatctaaaccaaaacagaggagctagtgcggaaacaatcaatgccttgggaacatgcaagttcaagtcaaagaaaactcgtgatggagatggaaacgaagttggtgtcggtgttgtggctgctggaacaaacaaggagcgagtcatttctgcagaagatgctgtctgctgcatctgcttggccagatatgtcgataacgatgatctccgagagctcccttgtgcgcacttcttccacaaggattgtgtggacaaatggctcaagataaacgcgctgtgccccctttgcaaggctgagatagatggtgtctccacaagtgctccagccattggctttgggcgtcgccacagcgacaacagggtaggaaacgacattgaatcacaactataactctcttcccacttcgttggcagcgtggatcacgcctttgatgaggccttccacacatcaacctgtaaattatagaggtagacatcaagatgtaaagggtcctcttacgatccaacaaagttcttttctgaatgactactgcctccactgtcagtatatattgcttccagcatttgtttcttctc

SEQ ID NO: 21527 - DNA, 1070 bp, Oryza sativa
  ref <308>: DATABASE ACCESSION NUMBER: AK071805
  ref <309>: DATABASE ENTRY DATE: 2001-12-06
gcccgccgcccgagcttatctccatcctacgagcagcggcgccggctccggcgtcggcgtccccctgctccttccgccgcctcctcgctctcgccggcccgtccctggggaatgcccagctgaattcaatggctcaagttactgcgaccgcgaatgctcgggtgctcggttttcctgccgccagccgccatggtggccctgtaggatcgcgtgctgggccggcgtttctgaatctgcgtgctcccgcacttcgtcatgacagtaaaaagcatcctttgagagttggtgctgcctcttcattattcacaaagtatgatcctatcaaaggcatcaaaccattgctgtcaattgacaagttacgtcctagaactcaagttggctgtcgagcatctttatcatcattcagcttccctgagttggagaccaaacctagatggtggtggaggaccttagcgtgtgtcccctatcttctgccgctgcacaacatgtggtcctttgcagatgctgtgtaccagcttcatccatacttgcagcagtttgggttgttctatgcattcatcgacacaatggcgttagtcccaggatggctctttctgatgatcttcatgaccgtctacttctttgtggtcaggcggaagtggttgccacacttcttgcggtatcacgtcatattggctattctccttgatactggttctcaagctctggcgaccatgtgcaactggaatccaagcattgtttatcagggtaaaccaatggtgtttttctggatgacgattgccttcattcagatatccacagttcttgagtgcatgaggtgtgctctggcaggcatgtatcccagcgttccgtttgtatctcaaacggctttcatccactctgatatgagtatgttcaggtagttggttagtgcaatatgcatctttgaatataagaagcattaagggatttttatacgagagatttgaaactgctgagacagtaaaatgttgggaattatgaggtacaagaggtggggatgcaaggggatgaaatcagaggcaatgcttatttgcagtgttggcacttct

SEQ ID NO: 21528 - DNA, 2088 bp, Oryza sativa
  ref <308>: DATABASE ACCESSION NUMBER: AK099193
  ref <309>: DATABASE ENTRY DATE: 2002-08-28
gaaccaaccaacctcaaatcaaatcaagaacagctcgtgcttagatcgctctctcgcttgctgttcttccaatccactcctcttgtttgtggcaaagatctgggttctttttttttctttttttgccgggtttttttggagaggttttgtgagcatggagggtttaaggggcggcggccatggcgaggcggcggtggacggcggcgacgagaggtgggtggaggactcgtcggtggattaccaagggcggcctcctctccgcgccgccaccggatcatggaaggccgcaatgttcatcatcttgattgagttcagcgagaggctgagctacttcgggctagcgacgagcttgatgatctacctgaccaaggttctccaggaggagatgaagttcgccgccaagaatgtcaactactggaccagcgtcaccaccctcatgcccctcgtcggcggcttcctcgccgacggctacctcggccgcttctccactgtcctcttctccactctcatctacctctcggggttgattctgctggcgatatcgcagctgtcgccgaggctgaaacccgagcgcaacctgcacctccacgagacgctcttcttcgtggcgatctacctggtgtcggtcggcaccggcgggcacaagccggcgctggagagcttcggcgccgaccagttcgacgacggccacgcggcggagcgggtgcagaagatgtcctacttcaactggtggaactgcgcgctctgcgccggcgtcctgctcggcgtcaccgtcatcgtctacctccaggagaaggtcggctggggcgccgccgccgtcgtgctcgccgccgtcatggccgcctccctcgccgtcttcctcgccggctggcgccactaccggtacagggtccccgagggcagcccgctcacgccgctcgtccgcgtcctcgtcgccgccgcgaggaagaggcacctccacctccccgccgacgccaacgagctctacgaggtgaagccgcagaatatcaagaggcggctgctctgccataccgatcaacttaggtttcttgacaaggcggccgtagtggagcacgacggcggcgaggagcggcgcggggcgtggcggttggcgacggtgacgcaggtggaggagacgaagctggtgctggcgatggtgcccatctgggtggcgacgctgccgttcggcatcacggcggcgcaggtgtccaccttcttcatcaagcagggcagcgtgatggaccgccgcatgggcccgcacttcacgctgccgccggcgtccaccttcgccatggccgccatcggcatgatcgtcgccgtggccgtgtacgacaaggtcctggagccgtacctgcgccgcctgaccggcggcgagcgcgggctcagcatcctgaagcgcatcggcgtcggcatcgcgttcaccatcgtggccatggcggtggcggcgacagtggagaggcagcgcctccgcagcgcctcgccggcgtccatgtcggtgttctggctggtgccgcagttcttgctgatgggcatcggcgacgggttcgcgctggtcggtctccaagaatacttctacgaccaggtgccggacagcatgcgcagcctcggcatcggcctctacctcagcgtcatcggcgccggcagcttcctgagcagccagctgatcacggcggtggaccgcgtcacctcgcacggcggcgccgccgccggctggttcggcaaggacctgaacagcagcaggctggacctcttctactggcttctcgcctgcatcggcgtcgccaacctcgtcttctacgtggtcatcgccaccaggtactcgtacaagaccgtcatggccggcggcaaggtcgtcgacgacaaggccggcgacatcgagtgcgccgccgccgcagctgctgctgcctactgatcaatatcaagcagtagctgatcgattagctagctagctagaaaatcatggtaagaaagaaaatggcatcatcatgtattatgatctgctttcgtggtacgtgacaacaacaaaaaaattgtaaggattatgtcgttcgtccatgtatatgcttaatctgcttgtgattgccatct

SEQ ID NO: 21529 - DNA, 1925 bp, Oryza sativa
  ref <308>: DATABASE ACCESSION NUMBER: AK071806
  ref <309>: DATABASE ENTRY DATE: 2001-12-06
gaagtcgacacgaataggggctgaacacacagagagagaaagaaagaaagaaagatgaagaggtcatcgccatggcgtaagctcaccgaggccgaggacgccgtcaaccgcgccgtggcggcgacacgcgtcggcaggtacttcaagctggaggcgcgcaagagctcattcaccaaggagctccgcgccggcgccgccacgttcctcaccatggcgtacatcatctccgtcaacgccgccatcctcaccgactccggcgggccgtgcaccgtgagcgactgcacgccggtggtcgtcggtaactccacggccgtgcccggccccgagtgcacggttgggtctaaccccgggtacgagcagtgccttgggcgcaccaagagcgacctgatcgtcgcgacggcggtcgccgccatggctggatccttcgccatgggcgcgctcgctaacctcccgcttggtctagctcccgggatgggcgccaacgcctacttcgcctacaacatggtcggcttccatggctcgggttcaatcccttacagcacggcgctcgccggcgtgatggtggagggcattgtgttcttcatcctgtccgccgtcgggctccggtcgaggctcgctcggatgatcccgcgcaacatccgcctcgccacggcggtcggcatcggcttgttcctggcgttcacggggctgcaggcgcaccagggcgtcggcctcgtcggcgccagcccgtcgacgctggtgacgctcaccgcgtgctccgagaccgaccctgccaccggcgcctgcctcggcggctccatgcggagcccgacattctggctcggcgccgtcggcttcctcatcacggccacctgcctcgccagggacgtcaagggcggcatgatctacggcatcgtgttcgtcaccgtcgtgtcgtggatcaggggcaccgccgtgacggtgttcccggacaccgcggcgggcaatgccggcttcgactacttcaagaaggtggtggacttccacacgatcacgaccaccgccgggcggctcagcttcggcggcctccgccacggcaacgcgctgctcgccgtgttcacgctcctctacgtcgacgtcctcgccacgacggggacaatgtactccatggccgagtacggcggattcacggacggcgccgtcgaggggttcgacggcgagtaccgtgcgttcctggtcgacgctgggtcgacggtgctgagcgccgcgctcgggagcaccacggtgacgacctacgtcgagtcgacggcggggatacgggagggcggccggacgggggtcaccgccatcaccgtcgcggcgtgcttcctggcgtcgctcttcttcggtcccgtgctgacgagcgtgccgccgtgggccgtcggaccgtcgctggtgctcgtcggcgccatgatgatgcgcgtggccaaggacatcgagtgggcggacatgaaggaggccatcccggcgttcgtcaccatggtgctcatgccgctcaccttctccatcgccaacggcatcatcgccggcttgggagtatacatcgcgctgcactgctacgactgggcaaggatcgcttacctcaaggcgagtaaggtgctcgacgagcgccggaaccaggtcgctgcttcctcggccggcgaggccagcggcatcacggcgacgaccgcgacggcggcggcggcggacgaggtgtgacacgttgacgacgcttgggttgttagctgttggtcagctgcacgtagtagactactagtcagttgttagtctctgtacttgcgttgttgccagatccctgatgaatttggacagggcataattctgtgcttggaaaaagaaatgggaacgggctctggccgattcttgatatgtagtaatgagatgtctgtactttgaccatcatatcaaagttcccatttgattcccct

SEQ ID NO: 21530 - DNA, 1001 bp, Oryza sativa
  ref <308>: DATABASE ACCESSION NUMBER: AK099194
  ref <309>: DATABASE ENTRY DATE: 2002-08-28
gacagttcaccgattttctcctcctcgcacaccgagacaggtcggagaaagaataggcgaaggaaatttccgtcgtcgtcgtcggagaagatgaggagcggcgaggggagcaccgcggcggcggcggcggcggaggaggagaaggtgaaggtggcggcgccgttcaggctggcggagctggggctccgggtgtgcgcggtgccgctcgccgtggcgtcggtgtgggagatggccaccaacaagcaggtggacgagacctacggggaggtcaggttctccgacctctccggcttcaggtatttggtctggatcaacgccatcacggctgcctactcggtggcctccatcctgctgtcatcctgcaggttcatcactcgctttgattggctcattttcctcctggatcaggcgtcggcgtacctgctgctgacgtcggcgtcggcggcggcggaggtggtgtacctggcgcgggagggcgaccgggaggtgtcgtggggggaggtgtgctcctacttcggccgcttctgcggcgccgccaccgtgtccgtggcgctcaacgccgccgccctcctctgcttcatggcgctctccctcatctccgccttcagggtcttcaccaagttcaacccaccatctcaatccaactccaagcagcagctgtcgcaggagcaaggcaagcctgtagtttcaggctagttagtggctctcccaagtctgaactttcagttagatggtacttttactgtgttcagctgtttacggtgtgttcaggtcttgctttgtgtagatgtcactacactctaatgcgtgttgtctgaaaagaaaaaatggttgtgtagatgtaacctgtataagtgctcaaaataccatgaactagaattactatacatttacaattttatttagatgtactgtatgtatgtatacttgaagctgatcttcagagttcagactcggggtcgatactgaagtgtgaaaaaactgaactactattctctttc

SEQ ID NO: 21531 - DNA, 2197 bp, Oryza sativa
  ref <308>: DATABASE ACCESSION NUMBER: AK071807
  ref <309>: DATABASE ENTRY DATE: 2001-12-06
gacgcgtgaacgggaagcgagagagaagcatggccatccaccatgtctgcatctgcatggccaaaaaggggaggaagaagaaatgagatgacaatgatgatgatgatggtttcatcacccaaccctcccttcaatccaacttcacctccacaaaaatcctatccattatccaccaaacactcgaaaatttccatcttttccagttaaaaatcaaaaatcccctatccttgtttgcttccatttcgtcgcggatttggaccacgctgcaaccaatcccccatccagaacgatcccaatctccgatgggaagattctaaatttgcaatccacccaagaactccactacgagagcttccccccaatcataactccctcgctcgctgcatccccagttccccaccacgacgacccaagaaacgcctcctgaattcgtccctacccgcgccagatcggagctcgtagcaataatcatcgggagagagagataaagaggaagcaatgacgacggaggtggcgctcctccgtggcccgaccaacctcgcttcccccacaagctccaccctgcgctatttagccaatggcgacagcgatgtctcgctcccaaggagaagcagccgcgaggaggagagccctgcaggactccaagaggaggaggaggaggaggaggaggagaggtggtcgttcttggcgctgctgcttgagctgctgcggaagtcgctgctccggtgcagtacggtgcaggagggcggcggcgagtgcgggatggagattgggtggccgacggatgtgcagcacgtggcacacgtcaccttcgacaggttccatggattcctcggcctccccgtggagctcgagcccgaggttccccgccgggctcccagtgcgagtgcaagtgtctttggcgtttcaacagaatcaatgcaatgttcctacgattccagaggaaacagtgtaccaacgattctcttgatgatgcaaagacgtctttatgaacaaggcggtcttcgggcagaaggtatttttcgtataaatgcagagaatagccaggaggagtttgtgagagatcagttaaatagtggaattgtgccggatggcattgatattcactgtttgtcaggtctaatcaaagcctggtttagggaactgccgagtggggtgctggattctatcccacctgaacaggtgatgcaatgccaatctgaagaggattgtgctcgagtcgccaaatgccttccaccagctgaagcagctttacttgagtgggcagttaatttaatggctgatgttgtccaagaagaacagataaacaagatgaatgctcgtaacattgctatggtttttgcaccaaatatgactcagatgtcagatccattgaccgcactgatgtatgcggtgcaagtgatgaattttctcaagatgctaatacagaagaccctcaagggtagacaagagtccaatctggaggacacatctctgccccataaggacccatctgatgaaagtggacaccataaaccctgtctcacacttgagtctctcctcgaggaagaatccaggcgtccctctttcgtcgaagaggagcccattctgaacagtcccgcacatggcaccggctacaatcctattgaggttaatcctgtccaaggaaaaactgctgcttccattgcacagacaagtgaagttcagacgatcatagagggctccagtagttgctcccgaccttctctgactgatccgcctgctactgctgatcctgtctgtgctgaagctgcgaactcgcttcaacgaaagggaagccgaagcctgaatagtaggaggacaagaaagggcaagggcagtctggaacgagtgccacttcctcagctgagaaatcaaaaggcacgagcattgtaagccggataaactccaagattgaacgaattgaagcatggaggtgaaatcaattgttattgccccccttattgtcatgtaatcgattacccaatgtttccttaagaccgagttcggtgttcttgcacatttttcaattttgttatgcttattgtttcttgttggatcatgatcatgttattttgatacggctaacttattttgtcttgtctgtgagtacatgaggttgtctgtgaatgcaacaaagaaattttgattccttcgtacatagtacatttctttattgccaggtgtatggaagttcagg

SEQ ID NO: 21532 - DNA, 624 bp, Oryza sativa
  ref <308>: DATABASE ACCESSION NUMBER: AK071808
  ref <309>: DATABASE ENTRY DATE: 2001-12-06
gaccacccacggcgcctcccctggccgcgggcaccctttttttctacgcctcctctctcgccacaatcctctctctcgcctcctctccgtctcttcaaatcctaagcggcggcagctactcccctccccggcgtggcggcagctgctcctcccctcccggcgtggtggcagcggctgccccctccccttcccacgtggagccaacggcggctgctactccccctcctcggcgtggccgcagcggcggcgacagcttccctccacggttgccccctcacctccccgaagttgagccgacggcagttctctccggcgtggtggcggtttgatttgtgaatatttttgaggattttgtgatttgggatattgatgtagcaagttcatgagctaattggttttttgtgctatttttggttgtctcattgtttgatttatttgacgatcaaggggggaatttttatggacttggactcgactcctatgagcgacaatctcagttttaccgcttccaatcagaatattattggagttcaagatcttaaattttgaagggcctagaagttgttatttggatatgatcgagccaattaatttggaaatttcatatgcatatatcaagtgacg

SEQ ID NO: 21533 - DNA, 1266 bp, Oryza sativa
  ref <308>: DATABASE ACCESSION NUMBER: AK071809
  ref <309>: DATABASE ENTRY DATE: 2001-12-06
ggcttattacaacttaccaagagatttctttttcttttttctcattcgtaaaatgttcttttattaaacaatctaatctctactcccaatgactgtacaatcaagaatcggcgaagataataaatccggacaatattcatcgaaagaacttgatacctggattgaacaattgaaagaatgtaaaccattacaagaaaatcatatcaaatacttatgcgaacaagcaaaagatattttatcgaaggaatctaatgtacaagaagtcaaatgtccggtgactgtttgcggcgatgtacatggtcaatttcatgatctcatggaacttttcaagatcggaggcaacgcacccgatacaaactatctcttcatgggagactatgtcgatcgtggttaccattcggttgaaactgttacattactggttgcgctcaaagttcggtataaagatcgcatcaccatccttcgtggtaatcatgaatctcgacagatcactcaagtctacggattctatgacgaatgcttgagaaaatatggcaatgccaatgtttggaagtattttactgatttgtttgactatctgccgttgacagcaatagtcgataatcaaatcttctgtttacatggaggacttagtccatcgatcgacacgctggatcacattcgagcactagatcgaattcaagaagtgccacatgaaggacccatgtgcgatctcttatggtcggaccccgatgatcgtggtggctggggcatttcaccacgcggcgccggctatacatttggtcaagatatttccgaaacattcaatcacaccaacggtctccaattggtctctcgtgcccatcaattagttatggaaggatacaattggtcacatgacaaaaatgttgtaacaatcttttcagcacccaactactgttatcgttgcggtaaccaggcagcaattatggagctcgatgattcattaaaatattcctttcttcaattcgatccagctccgcgccgtggcgaaattcaagtaacacgcaaaatacctgactactttttatgatcgatatgaataggatttgttctctcttatatatagtacacgcgtgctgattaataaatgagtttgtgcgaaagagaaccagagagagagagtgtgtgtgtgtgagtgtctgtgcgagagtgagagagtgcaaaaaaaacacatttatgtcattgacacattttcttattatacattaaaaaatcaacataaatattacttccttgtcactcttc

SEQ ID NO: 21534 - DNA, 1843 bp, Oryza sativa
  ref <308>: DATABASE ACCESSION NUMBER: AK071810
  ref <309>: DATABASE ENTRY DATE: 2001-12-06
tttggcatctacatatctgttcagtacttcttccaggcagttgttctgtatcctcttcttgttgcaacaattgtcttggctgctgtctttatagtattcactcatctgccatctgaatccagcacaagggttttgccatgggtgttctctttcttggtagttctatttccaatcacatatcttcttgaagggcatctaagagctaaaaattttgtggatgatgaggaagcagagaacttcaccaacatgttggctatagaaggggccagaatgtcacttttgggtctatatgctgccattttcatgattattgcattagaaattaagtttgaactggctttgctattgcgtgagaaagctgcagacaaaggtgtaacacatggtccacctggtcggagttctgcctttccaccaaaggcaaggctacttcagcagcgaagagctcatgctgcgccaactttcactatcaagagattggcagcagaagcagcttggatgcctgcaattggcaacttttcaactgtgctgtgcttcatcatctgccttatttctcaacgttactcttaccggtggctcaaatcgtgctattttcttcctggcacctatccttctgctcttgaaccaggattcagatatcattgcaggatttggtgacaggcaacgttacttccctgtaacaatctccatttctgtttatttagtattgacagcattgtatcgtttatgggaggagacttggcctggcagtggcgggtgggcacttgatattgggggcccaggctggttctttgctgtgaaaaatgttgcccttctcatgatgacattacctaatcacatactcttcaatcgcttcatgtgggattatgtcaggcagacagatgcgaagctacttctgacgctgcccctcaacttgccgtcaattataatgacagacatacttactgtgcgggtactaggactgttaggtgctatttattctctatcacagtatgttatatcaaggcggataagacttgctgggatgaaatacatttaaactaggacatgcaacttcttttgaggtaaatcttgtatgccctgcgtcaatggttgtgaataagagtctccagcttctgatgctaatatttcggtgcttgcttgcaggctttcaaccatatacgacggcgattgctttcaaaggctcttgcttgaagtcacatttgtctggtgaactgtgaacaaaattgcgccttgaagtagagaaacaatggtcagtagtcaccagttttgcccttagatgatctttatactggtaacctaaggtgttgtagtataaatgttactgaactcagctcgtacagcacatcaccttgggtcctcagaacctgtgaccatacagcattttgtgtcagatactttcttatataagcctcaccagaactgacatatgctgagtctgcatagattcttttgttgtccaagtgactaattctgaatggcaatgttctccacggagctgtctggttctgtttgcttcctatattaataccttttcaatgtacattatatatgatagggtatatgctgaggtcttggagagttggagtgactgatcttctgtttgtcagtaatcagtcagttttttcccaaaaaaacttttgatttcatgagatagttttaggatctgctttctgacttgtgaggctgttctttggtactacatgaagatttgcttcgtattcggaagtgcacgagtttcttcaggtcgcagtgatagacacgggatattctaaactaccatgtttgatgtttcatcagaacattgtctatgcaattttccgcttcaatgcatttacttatctcg

SEQ ID NO: 21535 - DNA, 1193 bp, Oryza sativa
  ref <308>: DATABASE ACCESSION NUMBER: AK099195
  ref <309>: DATABASE ENTRY DATE: 2002-08-28
gaagctcagcctcagcgatcgacaagtaagtagatccaaatccatccatggaagccaccggcacacggctgacgcgctccgcctccctctccccacgcctccgccgctcccccacagccttgtgcgtctccccgcgcagcatgcatcatcatcatcagcagcagcagcagagcctccgccgcgccacctccgacgccgacatcgccagatccgcgcccgcgacggcatcatcgccgctgcccctcctcctccgcgacatcctggaggaggacgtggtcgtggtggtggacggcgccgggcgcggcaagggcaacgacgacgacgacaagacgtccgggcgcggcggaggcggcggcgggcacatggacatgggggagtactaccggcgggttctgagggtggagccggagaacccgctggtgctgcgcaactacgggaggtacctgcaggaggtggagggcgacctgggcggcgcggaggagtgctacgccagggcgctgctggcctcccccgacgacggcgacctgctcagcctctacggccagctgctgtgggagacgagtcaggacaaggaccgcgccgccgcctacctggagcgcgccgtccaggccgcgcccgatgactgctacgtgcttggatcgtacgcgagtttcctgtgggacgcggaagaggatgaagacgacgaagcagaggatgagatgaaaccgccgctggtgccggcgtcctgctaacccaacccggcgtttgcctttgcttgtgtacatatgagagcttgcttttgtcaaaggcagatcgagacacgatccatcctggtgtgcctgcctgcctgcctgcgcttgtacaaattaattactagcacatcgatccttgctccatcagtttgcttcttctgtacatactccagtagctagcgccttcttgatgatggatcgttggctacatccatcgtcaatacacacactgatgaacaccagagatcaattcaactgcagtgcaagccagggcgcgcggcggcgagcagatcgagcaatttggaagatgcaaatcaggccgccgagcagagcagagcagctcagttcaagtgcggacggacggctggatgattcatccacaccgtaccacactttgcacatggataaccagacttgttgcttctttatgtaacacctcataataaattcactctgctaatt

SEQ ID NO: 21536 - DNA, 1417 bp, Oryza sativa
  ref <308>: DATABASE ACCESSION NUMBER: AK071811
  ref <309>: DATABASE ENTRY DATE: 2001-12-06
ggggttttggactgtagctgctgccccgacgcgctgctcgctgccccactctctccccattcccctccacgccgccgccgccgccgccgcgtggatggccggagtttccgccgcctccgccgccgggaagatcgggagcttcctctccaagaggccgtacgcgccgccgtcctgggcctcgcacctgtcccccgccccctcgcagaccttctcgctcggccatttcccgacgccgatccacaagtggaatctgcccaatttgccgaatggcacggaggtgtggatcaagcgagacgacatctcaggcatgcagttgagcgggaacaaggtccggaagctcgagttcctgatggcagatgccgtcgcgcagggcgctgactgcgttataactgtaggtggcatccagagcaatcactgccgtgccaccgcagtggctgcaaagtatataaatcttgattgttatctgatactgcgcacatccaagcttcttgtggataaggaccctggtttggttgggaatctccttgttgagagattggtgggagcgcatattgatcttgtttcaaaagaagaatatggaaaaattggcagtgtggctttagcggacttgctgaaaaagaagcttttggaagaaggccgaaaaccatatgttattcctgttggtggatcaaactctctaggaacttggggatatatagaagcaataagggagattgaacatcaaattcagatatcaggtgatgttcagtttgacgacattgttgttgcatgtggcagcggtggaaccattgctggtcttgctttaggatcaaaattgagtagcttaaaggcaaaagtccatgctttctctgtttgtgatgatcctggatatttccattcctatgttcaagacctgattgatggacttcattctgatttgcgttcacatgatttagtcaacattgaaaatgctaagggcttaggttatgccatgaacacagctgaggagcttaagtttgttaaagatatagctacagcaacaggcattgtccttgatccagtctacagtggaaaggcagcatatggaatgctgaaagacatgggtgctaatccagctaagtgggaagggcgaaaaattctttttgtacatacaggtggtcttcttggtttgtatgataaggttgatgagttatcatctttgagtgggagttggcgcagaatggatcttgaagaatctgttccacgcaaagatggaactggtaagatgttctgattgctatgctccaaaattgcttccattgttgttagaggtttcagacatctcattgtctaaaaagagtattcgcctcaatttgtacgacaaaattcaaagcagatggttaatgtaaaacactgtttgttatatttaaagaataaagcatatatttctgccatttgg

SEQ ID NO: 21537 - DNA, 1404 bp, Oryza sativa
  ref <308>: DATABASE ACCESSION NUMBER: AK071812
  ref <309>: DATABASE ENTRY DATE: 2001-12-06
ggaaacccaagcaaaccagcagctactaagcaaagcacaaccaaagcttaagcttcctccaaatcctcacacaagaactcgctcttcttaaccctcccggattttctccgacgagatcgatggctcctccccagcttgccggcaagatgaccgccaaggccgccgcggcggtgaagcccgcgacgagggcgtacgtgacgttcctcgcgggcgacggtgactactggaagggcgttgtcgggctggccaagggccttcgcaaggtgggctcggcctacccgctggtggtcgccgtcctccccgacgtgccggagtcccaccgccgcatcctcatctcccagggctgcatcgtccgggagatcgagccggtgtacccgccggagaaccagacgcagttcgccatggcctactacgtcatcaactactccaagctccgcatctgggagttcgtggagtacgagaggatggtgtaccttgacgccgacatccaggtgttcgacaacatcgacgagctgttcgagctgcccaaggggcacttctacgcggtgatggactgcttctgcgagaagacgtggagccacaccccgcagtaccagatcggctactgccagcagtgccccgacaaggtggcgtggccgaccgccgagctcggcccgccgccggcgctctacttcaacgccggcatgttcgtgcacgagcccagcatggccaccgccaagtccctgctcgacactctgcgcgtcaccacgcccactcccttcgcggagcaggatttcctgaacatgttcttcagggagcagtacaagccgatcccactgatctacaaccttgtcctggccatgctctggaggcatccagagaacgtccagctcgagaaggtcaaggtcgtgcactactgcgcagcgggatcgaagccgtggaggtacacgggcaaggaggcgaacatggacagggaggacatcaagatgctggtcaagaagtggtgggacgtctacaacgacggcagcctggacttcaagggcctcccgcccatcgcggccgccgacgacgccgacgaggtcgaggcggcggccaagaagccgctgcgcgccgcgctggcggaggcccgcaccgtcaagtacgtcacggcgccatcggccgcgtgatcgtacggccactgtcgcttccctccggtgcccgggcgtccggctccggcggcgtacctctgcatcccgtatcttggtatttttttaggatgtccaatttgggatcagtatgttccttctagtacacttcacaaatgtaacgaggcttgtttagaatacgtatgctgtggattttgtgaatatctgttccttttgagtcaaaactcaaccagtgtgatctttgtattttgtggaaatcgatatatcataggaagttgct

SEQ ID NO: 21538 - DNA, 1305 bp, Oryza sativa
  ref <308>: DATABASE ACCESSION NUMBER: AK071813
  ref <309>: DATABASE ENTRY DATE: 2001-12-06
gctcccacatatatcctccacaaactcccaacgcctcgctcatctcgatctccatctccaaattaaacagaaccatttttataaattttagttgctgctcgttcctccgttgaagagatcgatatcaatatccgcgccatggccgccggtcaccggacgctgctgctcctcgtcgccgtcctcttcgcggcggccgccgtggcgctcgccgacgacgccaagccgacgatcctcacccccgtggcgaacaccccgctcggctccttcgacggcgactcgccggccgacgacgccatggacgacgaggacgccgcgccggtcggggcgcccatcggcaccaccatgaccgagcccaagcccgagctcaccaccacgccgggcgccgccggcgaggcggcaggcggcgccagcgccggttactcccttggtgttgcctctcacgtcggcgccgccgccgcgttcgtcgccggcgtgttcgccttctgagggcgaggatgctgggaacgagagaaacctccagccttgtgttgtgtcaatatatactgacaatacatacatacatatatacatacagcagtgctaatttgatgatgtacaattttcgttcttttcttcatccttgtacgataatgagcaaacattgcaaaagtttgcctcaaattctttcatgtaacagggcaccgtgcatttcaagattactggtagtttgcgtaaaatgctaaatgttgagtcgatcagaatgtggtcaaaatcaggcgaggaagacatacatttacagccacctttgcatctgcatcatggggggtcaacaaaatccttattacttcctcgaggacaatctacaagctacgctcttctacatcctgagtctcctaaaggcagaaaaagcacaatgctagggcattgtttcaaaaagattatgccgcctactatcttcttgtaagaatcgactcctgtagctgtatcctgtctgtctgaagctcgcaactagcacgtatggtcaattgcctatccttgggtgaacatgctgaagcagcagataggcatgaattggtgatcctccataggcacattatagcagcagataaggctagacccaccaccaccagtttccatttactacactgcagatttgtccattcgtccattctctacactgcatcttgttcgttctcttcgtccctcgatttatgagcgtcatgtgacgtagggtcgataactgaagaatggctgtcagttgattcctgaattatgtcctacaatatagaatggttatattagaatctaaatacctttgattgattg

SEQ ID NO: 21539 - DNA, 1959 bp, Oryza sativa
  ref <308>: DATABASE ACCESSION NUMBER: AK071814
  ref <309>: DATABASE ENTRY DATE: 2001-12-06
gttcgtttctacacggatagagtttctgcttggcccggccatcgcacgccctgcccctccagctctgcttccaccagacgggcgtcgagtcttgcacgtgtaactctccagtccagtcccgggctgtctcaccaccaccaccgcgacaccatgtcgtactcgtgggtgggcgcccccgccgagttcaatggcacgaaccaggagaccggcggtgattccaccaccgagaacctgaaccaatggtaccagtcgggagaccaggccttcatcctcgtggcctcatgcatggtcctgatcatggtacctggtatcgccttcctctactccggcctctcacgaagaaagtcggctctgtctttgatctgggtcgttatgatgtccttcagcgtcgtcgtattccagtggtatttctggggttactccctggccctcagcagcacggcaaccaacgggttcatcggcgacctgcaccactttggcctccggaacaccctcgccaagccctcgccgggctccgccctcatccctgagctgctctactctttttaccagatgcaattctgtgccgtgaccgcagcgctcgtggtgggcgcgaccgccgaacgaggccgggtactccccgccatgattttcgtcttcttctgggccacgctggtctactgccccatcgcctgctgggtttggaacgtcaacggatgggccttcaaatacggcgtgctcgactacgccggtggcggccccgtcgaaatcggctccggcatgtcggcgctggcctactcctggatcctcggccgccgccacgaaaagatgatgctcaacttccggcctcacaacgtgtcactcattacgctgggaaccatcctcctgtggttcgggtggctgggcttcaacggcggctcgacctttggcgccaaccttcgtgccaccatggcttgctggaactcgtgcctgacggccatgtttgccgccatgacgtggtgtctgctcgattttcgcctggccaagaagtggtccatggtcggctggtgctctggcgtcatctcgggtcttgttgctgctacgccggcctctggattcatccctccctgggcttcgattattctgggcgtcgtgaccggcgtctgctgcaatttcggcaccaagatcaagttcctcgtcgggattgatgattctctggacgtcttcgccgagcacggaatcggcggtattgttggcctccttttcaacgccttcttcggagcaagctacattgtcgggttggatggtgtcaatacgggcgccgccatgggtggctggttggaccacacctggaagcagctgtacatccagattgccttcatcgtcgcctgcagcgcatacacgtttgtcatgtccgccatcatcgccaagctcatcgacatggtccctggtctgcacctccgggcgagcgaggaggccgagttgctcggcatggacgacaccgagctgggagagtttgcctacgactacgtcgaggttcgccgagatttcttggcctggactccggccatcgaagagcccatgacgcacggtgcgcgcatcgtcccgcaacacggcatcgaggagcacgccaacatggccaacacgaacggcacctcgctcgagtcgcaggaggagaagattggcgcctcagcgcgcgccccggcgaagcaagaggcggccgagaaggcggccggcgcggccccagacagtgaggccacgcagtagagggccggccggctgcgtgttgatgaaagtgacccaagtcaggggaagaagagattaaatcatattggaagatattggattggattgttgggatctgtactaataccccgccgttgcgcggtcctgccggtaaaccggcgtgatgctcggttttaccctcaaaaagggggtctagggagcgaggagttgacaaggagtttaccaaatcaagataccatgttttttcttctgggc

SEQ ID NO: 21540 - DNA, 1169 bp, Oryza sativa
  ref <308>: DATABASE ACCESSION NUMBER: AK071815
  ref <309>: DATABASE ENTRY DATE: 2001-12-06
gatgccccggcggcgccgcccagggccgggaaccaggcggtgtcgctccgcgaggagagctccgggaagacgcgcgctgacgcggcctccctgctgagggtccagcacctgcaacgccgaggcggccgggatacctctggccgcctccaccttcctatgccagaggtgtgaaacagtcttacagccaggcttcaactgcacaatccgcataaagaacaacaaaagaaaagcaaagcgacgcaagaagttaaacacttgccagaacagcatttcttacctgtgccatttctgtggagaccaaaacctaataaggggcagcggaaagaatattatgaagggcttgttatcatcaagaaagccagttggcatggatgtaaccagcataaagttgaaaggggacagtaataacaagagattagtaactataaaagagggctttgaatattctcaggcagcggtctcacaactagagtcaacatctgggttgaaacaacaaaatcttgaaaagaatgagtatgaggaaagtccagtacccaatcttcttgacgaatctatggaaaaggaggtagcgtgttcatcggtggaactgaatcagtcagcatcagctactgatcaggagaatgtctcacagaaaatagtggtaacaatcacaagtgaaaaaggtatgcatgaaactgagcctgtttctgctaacaaaattgcaatatgccaacccgattttccttcaaaagcagaatttccagtcggatcaagttttgttactcctcgaaagaacaaactggtggatgtgacggaccataaggattctgcagaactggtcaagacaagaagcattcagaacaagaaaggggagatgccaagttcagttactggcaaggcccctacaatgcctaccaagtcagctccaaaggaccgtgtgaaaaataaatctgtagcaagtggttctgctcagatgtctggtagttcaaggaagcgggcaagaaaggggtggactacgctgaaacagattgctgaaaaggaagagcttgagagaaaagagaagatgggtaactttgtaataccattctttatgcaataagagatgttacaactcacgctgattgtaagctttattcttggtgtatttgttgagaatagcatacaaaattttgatcatattttgagttact

SEQ ID NO: 21541 - DNA, 1921 bp, Oryza sativa
  ref <308>: DATABASE ACCESSION NUMBER: AK071816
  ref <309>: DATABASE ENTRY DATE: 2001-12-06
gagccgtctgtctcatcgatcgattgattcctcgtgtctccgtatattcgatcaccgcgattcatccttcttgcagaagaaagaatcatggcatgtgctgcttcgagtgtaaaaggttctctcaacgttggaggagctaaggcattcagcaataatttgtttcgtgattacttgaaatcttcggtgtcttatcccgtttcagagatttcttctcccatcagagcgcaacatgtagcatatggttcgaatctcattgttaggggttctaagagcagggactttagctcgaagctcgcatcgacaaacggcagctcgaagatttctgaagagagggtaactgtattggtcattggtggaggaggaagggagcatgctctttgttatgccttggagcgctctccatcctgtgatgcagtcttctgtgcccctggtaactctggcattgctcaatctggagatgctacatgtataccggacctggacatatcgaacagcgacgcggtcatctcgttctgtcgcaactggggagtcgggttggttgtagttgggcctgaagcaccccttgttgctggccttgcaaatgagcttgtcaaagctgggatacctacttttggtccttcatcagaggctgcagcgttagaagggtcaaaagacttcatgaagaagttgtgtgataagtaccacattcccaccgcaaagtaccaatctttcacagatccttcagatgctaagaaatatgttgaggagcaaggagcccctattgttgttaaagccgatggattggcagctgggaaaggtgtagttgttgctatgactttggaaaaggcatttgaagcaatagactctatgctggttgaaggttcattcggttctgctgggtcacgggtaatagttgaagaatatttagagggggaggaggtttctttctttgctctagtggatggagaaactgctttgcctcttgaatcagcccaggaccataaaagagttggtgatggcgatgttggtccaaatacaggtggtatgggtgcatactcccctgcaccaatagtgacggaaaaactcaagtgcaaagtgatggagagcatcattgtcccgactgttaaaggtatggcaactgaaggatgcaagttcgtcggtgtgttgtatgctgggatcatgattgagaagaaatcgggactgccaaagcttattgaatacaatgtgcgatttggtgatccagaatgtcaggttctgatgatgcggttacaatccgacctcgcacaggtcttgcttgctgcatgtaggggagaactggggtcagtctcactaacctggtcgcctgaattggcaactgtggttgtgatggcaagtgaaggttaccctggtgtttacaagaaggggacagtaataaaaaatatcgatgaagctgagcaggtctctcctgcagttaagatctttcatgctggaactgccctagatcgagatggaaacttcgtcgcggcaggaggccgtgttcttggtgtaaccgcgaaaggtaaggacattgaggaagcaagggcaaaagcatatgacgctctcgacgttgtcgactggccagaaggatttttcaggcatgacattggttggagagcacagaaatatcggcgcatggttgcacactgataggcatgtactgtaaatctgtaactatgttatgtttgtgatgttaatgggaatacagcgacaggggaatgggcataatatttaagtagtggatgcatggagatggaagtaattggcagcttggattagttccttgatcgaggaacacgttcttctcatcactagtttctttttggtagtacatgtgtttatattttcaccttctgtattgtaataagaactggtgtggaccaatgatgaatgcaacttgcttatcaatatactccctccctttttt

SEQ ID NO: 21542 - DNA, 943 bp, Oryza sativa
  ref <308>: DATABASE ACCESSION NUMBER: AK071817
  ref <309>: DATABASE ENTRY DATE: 2001-12-06
gaatctataaacaaacactcaagacaattaacacgacaaatcatggagagatcagccaccgtctttgtagcgctcaccttgctcgtcgccggcagcgtcgtcgtcgtcgtcgtcgtcgacgcctgcgacggcgtgccgaggatgtcggccgtggaggcgtgcaagcaggcgagcgtgggcccggccatgtcgcggacgtgcgccgagacgctgggaacctcggcggacgagcagggggcgacggacttcatggtggccgccgcgaacgccgcgacggagtcgtacaaggctggcaaggaggccgtcggcaaggtgctctccaacccgctggcgcccgacggcgagcggctgccgtgcctcgtgtgcgcgaacaagtacgacgacgcgtcgatgctcgtcgccagcaccgccgacgacgccaagcgctgcaagctgagcgccgacagcctccccgacctcgtcaccgccgtctctgccgtcgacgagtgcgccacgaagatgttcgaggagagcgggaacacgacgtcggtgtacgccacggccatcaccaatcgggattggaccgtgctcgttctgcgcctcgctacgttggttgtgccgcgccagcaactcagctagttctgccatgcatcaccaatcgtgcgattggattgctggtcgccctcccttgtccttcctcgttctaaggccgtgttttgtttccctcatattcccaactttccatcacatcaaaagctttcctacactcataaactttcaactttttttccaaactcccatttctttaaactttcaactttttttaggaactaaacacaccctaaatatggctgatatcaagcattaaaaactttagctatgaataaattttaaaatacttacgttagaaacgttgagaccatatgtatagaccaaatttttaatatatttgttgatgtttttt

SEQ ID NO: 21543 - DNA, 1794 bp, Oryza sativa
  ref <308>: DATABASE ACCESSION NUMBER: AK071818
  ref <309>: DATABASE ENTRY DATE: 2001-12-06
gcttcttcttcttcgcgaaaacgaaagaaaaggagaggcaagaacaagaacatctcatccccaattcccctctccctaaaccctaatcccgtccgattcgcccccaccggcctccaagatcgaagctctttcggcatctccggctggtcggagaggagctgcgcgtggagggggggactctcgattccggtgagaaaacggcgcgacccttctcccgatttcgcgatttcggtaccgtacggttgctcgtcggcgtcggatccggacgcgtgtgggcggcgaaaggttggccctcgcggttgatttggtggtggcgcggtgtctgagatggttgcgtgagccattcggagaggacaaggtcgaggaggagcagcagcttctgttcgtggcatttctgttgcaaagattagtgctccatttctctgcaacctcgcgcgggggggagggggggagggcgtttgatccatttctccatttcgggtggtttccaatggctcgaatccatgccgacccggtgctggaggccgaccaattcgaccggctgccggactcgcttgtgctggtgatcctcaacaatgtcgaggatgtgcgctcgctcggccggtgctccgccgtgtcgaagcggttctacgggctcgtgcccctcgtccatgatgtctatgtcaagatcgaccgcgtcgtgacggtcgacggcgaagctgaggacgcgcttaacctgtcctcgccgaagccgaggaacatcctctcgcatttcctcaagatgatgctgttcacgatcatcaagccgttccacagcatgcgcggcccgaacggtgctgggcggccgctgttcccgcagctcgcgcagcactcgccggcgcaggtgctccggaacttcacgcacatccggaatctgcgggtggagctgccctcgggggatgtggggactgaggagggagttctcctgaaatggcgagcggagtatgggagtacgcttcagaattgtgtgattcttgggggtactcaggtcgaccgcaagcctgttggtgcagagcatgagctgtattcggaggacaatggaagcatgccggaatccttctataccaatggagggttgaaactccgcgtcgtgtggacaatcagctctctgattgcggcatcaacgagacattatcttcttcggtcaattatcaaggatcatcccactcttacaagcttggtactgaccgatgctgatggccagggcacattgtccatgggagcggagcagcttaaggaatttagggagaaccagttgtcggcctcagcatgttctaacaggactcaggttccagcatgcaacatgaagctcaaatacgctccatatcttgagcttcctggcggcattgcgttgcaaggtgcaacgttggtcgctatcaagccctcacccgagggaagcaatggcggtcatactagccgcaaggaaacggatgcatttgtctccggagcatttgatggaccattcaagtttgctgtgaaggcgctgatgaagaggcgaacttaccttctggagatgaatggcttctagatatcttgtgctgttactgggtacctagcttgttggtccaggcagtcatctagttacttttaacttctggtctatgtaataggttgtgctttgctctctgttgtattagctctctgtacagtggtgacattctgttggttatatggaaatcatatcaagttagtgtatctttctcattgctctcccaatgccatgtcatgattttatgcaactaacatcatgcaagctgattgtttgctctttttgtc

SEQ ID NO: 21544 - DNA, 1727 bp, Oryza sativa
  ref <308>: DATABASE ACCESSION NUMBER: AK071819
  ref <309>: DATABASE ENTRY DATE: 2001-12-06
gactcgtctcgacgcatccgagattctatacctgctcgagtgctcgatccgtcacggactgatggacgccggcgacgcagccaccacgagggcccggaagccggtcgtgctctacccgtcgccgggcatgggccacctggtctccatgatcgagctcggcaaggtgttcgccgcccgcggcctcgccgtcaccgtcgtcgtcgtcgacccaccgtacggcaacaccggcgcgacggggcctttcctcgccggcgtcaccgcggccaacccggccatgacgttccaccgtctgccgaaggtggaggtgccgccagtggcgtccaagcaccacgagtcgctcaccttcgaggtcacccgcctctccaaccccggcctccgcgacttcctcgccggcgcctccccggtcgtcctcatcatcgacttcttctgcaacgccgccctcgacgtcgccgacgagctgggtgtccccgcctacatgttctacacttccggcgccgagatcctggctttcttcttgtacctcccggtcctgcacgctcagaccacggcgaacttcggggagatgggcgaagagctcgtgcacgcccccggcatcccctcgttcccggcgacgcactccgtcctgccgctcatggaacgcgacgacccggcctacgcggaatttctgaaagcgtccgccgacctctgccgcacccagggcttcctcgtcaacacattccgctcgctcgagccgcgggccgtcgagaccattgccgcggggagctgcgcgcctccgggcgtctcgacgccgcccgtctactgcatcggcccgctgataaagtcggcggaggtgggcgagaaccggagcgaggagtgcctggcgtggctggacacgcagcccaacggcagcgtggtgttcctctgcttcggcagcatcggcctgttcagcgcggagcagatcaaggaggtggcggcggggctggaggcgagcgggcagcggttcctgtgggtggtgcggagcccgccgagcgacgacccggcgaagaagttcgacaagccgccggagcccgacctggacgcgctcctccccaaggggttcctggagcggaccaagggcagggggctcgtcgtcaagtcgtgggcgccgcagcgcgacgtgctggcgcacgcggcggtgggcggcttcgtgacgcactgcgggtggaactcggtgctggagtcgatcgtggccggcgtgccgatgctggcgtggccgctgtacgcggagcagcggatgaacagggtgttcctggagaaggagatgcggctggccgtggcggtggaagggtacgacgacgacgtcggggaggggaccgtgaaggcggaggaggtggcggcgaaggtgcggtggctgatggagtccgacggcgggagggcgctcctggagcggacgctggcggccatgcggcgggcgaaggcggcgctgcgcgacggcggcgagtcggaggtgacgttggcgcggctggtggagtcgtggagggaagcggccagcgcatgacgtgggaaatgattgaaggatgattgaatgaggtggtgggctgtgttgttgggtggagattaaagtgacgcacgtaaccaccgagttgggccaccacagagatgggtcgttcatgactgggactttgggtgatttcagtttcgtactatatgctgtcttgagtacaccgtaattgttttccttgctcttggggtaaaaagagcagtagacg

SEQ ID NO: 21545 - DNA, 1094 bp, Oryza sativa
  ref <308>: DATABASE ACCESSION NUMBER: AK071820
  ref <309>: DATABASE ENTRY DATE: 2001-12-06
gggcatctcttcttcttcttttcttctccagatcgcgaggcgggcggaatcgcggaagcagggggatcccgcagccgaatcgggccggatctcgccggcgatgatgccgtcggcgtcggacgccgcggcggcggcggcggcgctggagctgcaggagtccgggtgggaggagctgcggcgggaggcacggaagctggagggtgacctcgacgtcaagctctcctcctacgcgcgcctcgccgcgcgctcctcctccgccgccgacgccgcctccgcctcctccccgagcgagcgctcctcctggaagtccatggagttcgagatccagtcgctgctcgacaagctgcaggacgtcaacgacgccatgagccgctgcgccgcctccaccgcccccaccacctccgtctcgcagaagctcgcccgccaccgcgacatcctccacgagttcgcgcaggagttcaggaggacgagggggaatctgagctccatcagggagcacgccgatctcctcagctctgtgcgggacgacattactgagtccaaggctactggcggcatgtcgccgagggtgcatttgctcagggagagggcctcgattcatggcagcattaaccagattgatgaggtaattggccaagctcagagcacaagggtagccctttccaatcagagggcattgtttggggatgttcaaggaaaagtcaagcagttgggtgaaaagttccctgttattagaggactacttggtgccatcaagaggaagaaatcaaaggacactatcatcctttcagcagtgatcgcggcctgcaccatctttttgattatttactggctttcgaaatgatggttgtctccagaaaatctcaccgtgaaggcttcccctctgcgcagaatcgctgataccagatgacgataagacttggtagtatgtttcatttgttaggctaagaggaggaatgagagatcggattcttcagcttttatcaatttgcctttgatatatactcctaccttgtatttggagattaacctgtcctacatgtacagtacagagcaattttgctttccaaagtaacttgtctggctggctgagc

SEQ ID NO: 21546 - DNA, 1977 bp, Oryza sativa
  ref <308>: DATABASE ACCESSION NUMBER: AK071821
  ref <309>: DATABASE ENTRY DATE: 2001-12-06
ggcgtgtcaccctcttccctttggccctgttgcccccaattcgccttcgaccccttctccttctccttcaacatctaatcatcacggagaaaggataaggggtgggttcacaaattttttcaattgtgttcttatttattagaggtaattaagtaattattattagaggtacaaattaaggtctctgagagagaggggccggggtgggccctagctaggtaatggcagcctcgccggagtcgtctccgtcgtcggccaactccaccaccccgtcagcaccgtcgccgtcttcgtcgttgtcaaaatcaccctcacctccctccccatcatcgccgccgccaccagcatcgacgaacgcgccaccaaaatcagctggcggcgtttcatcttccacgcaagcgcaaccatcgtcggaatcatcgtcggagtctacgactacgccttcggcgccagcggagaggaagagcggcgggtcctctcgaggagagtccgggcggtatcgcggtgatgtgaccgccggcgtgtttgtggggttatttgtggtggcgatggttgcggtgttggcgggtgtggtggccatcgtggtgtgctgctgtataaagataacgaagaagaagaagcggccgccgccgccgaacatgcccttcttcaccgacgagaagggcaacgtgtactacgccacaggcggcctgcctcccatgtggcagcagcacggcagcagcaactacagcatcccacctccgccgccgcccggctggcacatgtcatcgtcggcggggggtttcagcggcgagatggggatggggtactcgtcgggaccgtacggtccggcgctgccgccgccgtcgccggacgtggcgctgggtttctccaagagctccttctcgtacgaggagctggcggcggcgacgtcggggttctcggcggcgaacctgctggggcagggagggttcgggtacgtgtacaagggggtgctcgccgggaacgggaaggaggtggcggtgaagcagctcaagtccgggagcgggcagggggagcgggagttccaggcggaggtggacatcatcagccgcgtccaccaccgccacctcgtgtctctggtgggatactgcatcgccgccaaccagcgcatgctcgtctacgagttcgtccccaacggcaccctcgagcaccacctctatagaggcggcaatggcgatcgagttctagactggtcggcgcggcacaggatcgcgctggggtcggccaagggtctcgcctacctccacgaagactgccacccgcggatcatccaccgcgacatcaaggcggccaacatcctcctggacgccaactacgaggccatggtcgccgacttcggcctcgccaagctcaccaccgacaccaacacccacgtctccacccgcgtcatgggcaccttcggctacctggcccccgagtacgcctcaccggcaagctcaccgagaagtccgacgtcttctccttcggcgtcatgctgctggagctcctcaccgggcggcggcccgtcgacacctccaactacatggaggacagcctcgtggactgggcgagaccggtgctggcgcgcttgctggtcgccggcggcgaggaaggaggattaatccgggagctggtggactcgcggctgggcggggagtactcggcggtggaggtggagaggatggcggcgtgcgcggcggcgagcatccggcactcggcgcggcagcggcccaagatgagccagatcgtgagggcgctggagggggacgcctcgctctcgctggaccaccaccacgacgacgacttctccgcctcatcggagatctcgcggcatcggcaggtggccttcgacagcggcgactacaccgacgactactccaccacctccacctccacccactcctcccgcctcccacccaagcgctaatcatcactaattcttttatttatcgattcaaattataattagctggtttc

SEQ ID NO: 21547 - DNA, 1645 bp, Oryza sativa
  ref <308>: DATABASE ACCESSION NUMBER: AK099196
  ref <309>: DATABASE ENTRY DATE: 2002-08-28
gacgcgttgattctgctcgtttagctagcccgcctctgacgctgcattatggagggagtaggcttgtagctagcccgcctctgcacgctatatttcaaggaatcagagatccatacagacagagacgttcagccatcagacctgcagaggcaatccatccatggcatctatcgttcctgtactcctgcgcctgctgctcctgctgctcccgcttcccctgatccgagaccacctctggccgagccaccgccggccaacgccgcaggacgatgcgggtgagctccacccgatcttcctggtgcccggggcgagctgcagcgacctggaggcgcggctcaccgaggcgtaccggccgtcgacggcgcactgcggcgcgatgaaggggaagggatggtttgggctgtgggagaacaacacggagctgctggtccacgactacgcggactgctcactggagcagatgaccctggtctacgaccccgccgccaacgagtaccggaacctgcccggcgtcgagacccgggtgcccaacttcggctccgcatggtcgttcggctacaagaaccctgttaaccgtctacagagagcacaatgccttggaaagctcagagactggctggaagaattgggataccgtgatggggacaccatgttcggagctccctatgattttcgctacgccccgccggtacccggccaaacatccgaggtgtactctcgctacttcagcgagttcatggcgctcgtcgaggcagcgaccaagaagaagcagaagaaggccgtcatcctggggcacagctacggagggatggtcgcgctcgagttcgtcaggagcaccccgcgggcgtggcgggacgcgcacatcgagcgcctcgtcctggtcgcgcctacgctccaagatgggttcgtaggctcggtgatgaagttcatcacggggacgggcataattttcgtcccgacagccacgtccacgaggcccatgtggaggagcttcgagtccgccatggcgagcttcccgtccccggccgtgttcggccgcgagccgctcgtggtcaccaagaggagggactactccgcgtgcgacatggaggatctcctagccgccctcggcttcggcgagggcgtcgagcctttccggcgacgggccgtccccaggatgtacagcctcgaggcgccgatggtgcccatgacgtgcatcaacgcggtgggcaacaagacgccgctgcaactggtgttgtgggacgacgacgacgatgacttattagacgcgtcaccggaggtggcagcgtatggtgacggagacggcgagatcaacctgatcagcatgttggcgtttgacacggagatgggtcggcagccaggacaggagaagcgattcaaatccgtcaagatagctaatgctaaccattccacgattgccatttatgattttgcactaaagaggatcattcaagaaattattgaggtgaatcaggtacgttagtagacactccgtacgttgggtttcacgtatatatgttgggtttcactgtgcgcggtaatcatatatatcacgtgtggaattctgtgtaataaatgaatcccatgcagctttgtgtataccgatgggttggttggtaaataaaaaccaaaaattactgctccc

SEQ ID NO: 21548 - DNA, 1876 bp, Oryza sativa
  ref <308>: DATABASE ACCESSION NUMBER: AK071822
  ref <309>: DATABASE ENTRY DATE: 2001-12-06
gtctccccccaaaatttccgacgccagagcgcgaggagacgcacacagaggtattccttcgctcgcgatctctctcctccccctctcgaattttgatctcttcccgtagaattttcgcttcgtgtgtgtgtgtttccgttcgattggatcggtgctggtagtacttgctagcatgatcccccgcgtgatctgtggccgtttggtgggatcgttttccatctgaattctcagctaaaccctgctgttttcgtagcgatttttttttgctaggcgtgctttagtggtaggtttgtctgcacgaatcgggtgggtctctggtggttttgaagtgatctgtgtgcggttgatgtgattttacggagtatggttggatccgtcaaaaacctgagttctgtaggggttctgtggttctggtccatgtttgcttctcagaattttgcttataattttgatttttctcgtcttgatctattgttagattgactctgatgtacagttagctcgggaatactgaagctacgattgcggggcagtaattcaaaattgctctttgaaatgtgctacggtaccaaattcaaaaatcaaacttgagatcattggcttgcccacttgaaacaggaattggatggatttcccaacaatgcatcattttctgttttttgcttctgaatttatgcctttattctgcatcgtggattactctttaaattgtttgtatggatcctccaaagaacggttagttcatcaccgtttttgttctttgatcttgcagacttggcatttgtagagtttttagatttatagatagcaaagatgtcggcacaggcggagctttcccgtgaggagaatgtgtacatggccaagctcgctgagcaagccgagaggtacgaggagatggtcgaattcatggagaaggtggccaagacggttgactctgaggagctcaccgtggaggagcgcaacctcctgtctgttgcatacaagaatgtgattggagcccgccgtgcgtcatggcgcattatctcctccattgagcagaaggaggaaagccgtggtaacgaggaccgtgtcacactcatcaaggactaccgtggcaagatcgagactgagctcaccaagatttgcgacggcattctcaagctgcttgaatcccaccttgtcccctcttccactgcccctgagtccaaggtcttctacctcaaaatgaagggtgactactacaggtaccttgccgaatttaagaccggggctgagaggaaggatgctgctgagaataccatggtggcatacaaggctgctcaggacattgctttggctgagctgcctcctactcatccaattaggcttgggctagctcttaacttctcagtgttctactatgagatcctcaactcgcctgatcgtgcttgcaacctcgcaaagcaggcttttgatgaggccatctcggagctggacaccctgagcgaggagtcctacaaggacagcactttgatcatgcaactcctccgtgataacctgaccctgtggacttcagacatctcggaggacaccgcggaagagatcagggaagctccgaagcgcgactccagcgaggggcagtaaagccggctttatgtgccctagaagcttgtagctagtgctttgctactgtgtaatgacacctatgtggctgtgattgttgtcgggaaatctggggctcccccgtatgtgaggttgctagcgatggttttgcagtctcgcctttaagctactcgtagcagagcaggtgggggtctgtggagccaggcctggttgggggtgggggagcctcttgaactgcttggtggcacttcctgtttttctgtttgcctttttattggtgtttattgttatggtc

SEQ ID NO: 21549 - DNA, 956 bp, Oryza sativa
  ref <308>: DATABASE ACCESSION NUMBER: AK071823
  ref <309>: DATABASE ENTRY DATE: 2001-12-06
ggggcaaatctatttattcgctttccatctccgctgagttgggggcacttggcagttggcaagcgcgcgtcacctactcagcagcctgagccgccgagggagaagacgacgacgaccaccaccaccaccaccatggaggccgcggcggcgaggcccgtcatccgcgtcgccgccatctgcggctccctccgcaaggcctcctacaacggcggcctcctccgcgccgccgcgggggtgtgcgaggagtccatcccgggcctgcgcgtcgaccacgtcgacatctccggcctgccgctgctcaacaccgacctcgagaccgccgatggcggattccctcccgccgtcgaggccttccgcgacaaggtccgccaggccgactgcttcctcttcggatcccccgagtacaactactccatcgcaaccccactgaagaatgcacttgattgggcttctagagggcaaaattgctgggcagacaaacctgctgcaattgtcagtgcaggaggtggctttggagggggtagatcacagtaccatcttcgtcaggtcggggtgtttttagatcttcacttcatcaacaagccagaactagccgtaaaagcatttgagcagcctccaaagtttgacagtgatggtaatttgattgatgcgcaaatcagagaacggatcaggcaagttctcttatcccttcaggctttcacactcaggctccaaaagaaagattgaaccagtgaagtgatacataatcttgttaatctgcatttctgaagcatggctccttggatattacatattacagcctatttgatggtattttactttcaatcaagcaatgtgtcgtggaaaaaccgaaaattgtaataaacgcttgtggaattgtttcccctgttcatttgaaggtttaatgttttggtcacatctatacaaaatatattaataaagatttatattttacc

SEQ ID NO: 21550 - DNA, 840 bp, Oryza sativa
  ref <308>: DATABASE ACCESSION NUMBER: AK071824
  ref <309>: DATABASE ENTRY DATE: 2001-12-06
ggcttcttcttccttgctgctgttcctaaggcacttctcccttccccaactaaatcatccaagccatggctaccgatctaccattgctagtgtggatcagctctgctgcggctactgctgtggcggtggtggttgctgcagctacggctgcggctgcgggtgtaggggaacagatgcttggttgctaggtgctaaaaaaaaaaaggaaagccaagtattgagggattcacctttgcctaggtgacaagttcgtccatggttgtgctcccgtgttcatcttcgccgatgcattggcctttcctcttccttggctgtgttgcccgccctgtgtttgaggtggatttaaaaagtgtggaactagctggtgtgttattccgggaggagctctctctgaaacataacatcaatggtggcttcattgttgaacgcattgctgatgattctgctcttgagcatcttggtgttagacggggtgacgtgatcttttttgaggacgagtgtgggactactttgcctgagattgaagattatctcctttctcttggttggagatacctgcaggggatgaagtcgatggttctcaagttgctagtacatgacattgaaggtccatgtaaggtgacaattaccttgcccttagagttttctgtcgattcaggaaaggtagcccgatggaggatggcttgaagatgtacagcaagactgaagttacctagagatgataattttgtgaatgttagtaacttgaatgttctttgacacgatcttttgtcggggcgtttaaccctaattttggctggctgaactatgctaatattaatttaaacaactgtcatattc

SEQ ID NO: 21551 - DNA, 1550 bp, Oryza sativa
  ref <308>: DATABASE ACCESSION NUMBER: AK071825
  ref <309>: DATABASE ENTRY DATE: 2001-12-06
gtgccaggacggcttgccatctggtgtgggtcccacctcctctatcctctctctccccctttccccatccgcccagcaccgccgccggacgtcctcccggcgtcccatctgcccagcaccgccaccccatcctcccagtgttgccgccgtcatcctcccagcgccctattcacctagcgccgccgccccatccgcctagcgccaccgctgctgtcctcccggcgcagcatcgatgctgtgcggcacggcggcgtcgaactcggaggaggcgtcgaaccaccggtccgcgtccctgactcgtgctctcctcgtcaccagcgtcgtctcgccaacccaccggcgctgcgggtcgcagccgcccggattcctcggctccacacccttctcagcccggcgcccgtcgtcggcaccgccgcacgcctcggcaaagcagctagcggcggcgaacggggatggcacgacggaggcgccaatcttggtggcggcggcggcggccaaatcctcgtcgaagctgactcccatcgtcgtcgcctcccgtcgtatgcgcctcctactcctcgtcgccgtcgccgatggagaggtatgcccgctcgctgccgagcttgccggcacgagtaggcagcatcgccgccgcctctcgctggtgcaagcagcagcaacgtcgtcttcgccgccgatttccgccatctgtccgctcggtcgcccgccgacggcacaggggagtcaacgagggagtgccaccgccggatccgcccgccgaatcccccgccgagtgccgccgccggatctgccgtttggagctctggctgcagcccccaccgccgtctcgaccaccgccgatcttgcatggcgaccccctccgtggcttcgtcgacctccttccgtggccgcctcatccgcatgcacgcgggctcatgtgggaaaggggagaagtaatagagactgacatgtgggacccactataagattggagagtgagatggagagactattggagtaaaaggcaaatatgactagctaatttttttaaacagttggctaaatggacatatagagagtctaaaatagctcttaggtcgcctcagaatctttggcaagctagatgcatatctacacgtgtcgacagacaaacaactactaccacagaattttcaccagtagacactgtgacaggacatttcccggcatatcgaggcattgtttagttcccaaaattttcttcccataaatatcacatcgaatcttcggatatatacatagaatattaaatatagataaaatgaaaaactaattgcacattttgcttggaaatcgcgagacgaatattttgagcctaattagtccatgattagccataagtgctatagtaacccacatgtgctaatgacagattaattaggcttaataaattcgtctcgcggtttccaagcgagttatgaaattagttttttcattcatgtcccaaaaccccgtctgacatccggtcaaatgttcgatatgacacacaaaaattttcttttcgcgaattaaataaggcctgagtgctagcg

SEQ ID NO: 21552 - DNA, 1930 bp, Oryza sativa
  ref <308>: DATABASE ACCESSION NUMBER: AK071826
  ref <309>: DATABASE ENTRY DATE: 2001-12-06
gaagctaccccactagacaatctgtccactcaccactggcctcacttccttgatctcttctcgtcttctccaccccgcacgcggccacccccgcagggaccccgtgacccgcgcccgcgcccgcgcctcaccgcaatggcgatggcggcagccatgggcgtggcctccccctaccacgccgcccacgccgccgcatccacatcgtgcgactcgctccgcctcctcgtcgcggaaggccggccgcggcggccgcgaggggtggcctcctcctcctcctcctcctcttcggcggggaggcggaggcggccgctcgtcttctccccgcgcgcggtgtccgactccaagagctcgcagacctgcctcgacccggacgccagcacgagtgtgcttggaatcattcttggaggtggtgcagggactagattgtatcccctcaccaagaagcgtgccaagcctgccgtgcctctgggtgccaactacaggcttattgatatccctgtcagcaactgtttgaacagcaacatatccaagatctatgtgctgacacaattcaactctgcctctctgaaccgtcacctgtcaagagcctatgggaacaacattggcgggtacaagaatgaagggttcgttgaagtcctcgctgcacagcagagcccagataatcctaactggtttcagggtactgcagatgctgtaagacagtacttatggctatttgaggagcataatgttatggagtttctaattctggctggagatcacctttaccgcatggactatgaaaagttcattcaggcacacagagaaacagattctgatattactgttgctgccctgccaatggatgagaaacgtgcaactgcattcggcctcatgaaaattgacgaggaagggagaatagttgaatttgcagagaaaccaaaaggagaacaattgaaagcaatgatggttgacactaccatacttggccttgacgacgtgagggcaaaagaaatgccttatattgctagcatgggtatctatgtgattagtaaaaatgtaatgcttcagctcctccgtgaacaatttcctggagctaatgactttggaagtgaagtcattccaggtgcaacaaacatcggaatgagggtacaagcttacttgtatgatggttactgggaagacattggtaccattgaggcattctataatgcaaatctgggaataacgaaaaagcctgtaccagatttcagtttctatgaccggtctgctccaatttatacacaacctcgacacttgcctccttcgaaggttcttgatgctgatgtgacagacagtgtcattggtgaaggttgtgttattaaaaactgtaagatacaccattcagtagtgggactccggtcctgcatttctgaaggcgcaataatagaggactcattactcatgggagctgactactacgagactgaagcagacaagaaactccttggtgaaaaaggtggcattcccattggtattgggaagaattgccacattagaagggcaatcatcgacaagaatgctcgtattggagataatgtgaagataatcaatgttgacaatgtccaagaagctgcaagagagactgatggatactttatcaaaagtggcattgttaccgtgatcaaggatgctttgctccctagcggaacagttatatgaagtagctgcgtaatatgtgatggggcatcggcgacgagcaccaggcgggcattataagaagaataaaagcagttcaaggcactttattccctttttttttcttctgttcttcctctattgtgttaggataaatgaatggtagaagcaactgtttttcagatgttttgggagtgaatgataccgtgcttgaattttccatgttttgctttgcctctgcttgaaaatgaatccagcaatcccatgtgtttct

SEQ ID NO: 21553 - DNA, 1057 bp, Oryza sativa
  ref <308>: DATABASE ACCESSION NUMBER: AK071827
  ref <309>: DATABASE ENTRY DATE: 2001-12-06
atgagcacgaggcggcctgagctgaacaccgcatcagcagcagcaagcagctaatcgcgcacgtacgcacaccgcgacccggggcgagatggcgcagtcgatgctggtgtcgggagccaatggcacggtggccgccgcgagcaccagcaggctgcagcccgtgcggccgacgccgttctcgcggctcgtgctgtcgcagccgtcgtcgtcgctggggcgcgcggtgtccgtcaagacggtggcgctgttcggcaggtccaagaccaaggccgcgcccgcaagaaaggctgagccgaagccaaagttcaagaccgaggacggcatcttcggcacgtccggtgggatcggtttcaccaaggagaacgagctgttcgtcgggcgtgtcgccatgctcgggtttgccgcgtcgatcctgggtgaggccatcaccgggaagggaatcctggcgcagctgaacctggagacggggatcccgatctacgaggcggagcccctcctcctcttcttcatcctcttcaccctcctcggcgccatcggcgcgctcggcgaccgcggcagcttcgtcgacgaccagccggtgacgggcctcgacaaggccgtcatcgccccgggcaagggcttccgctccgcgctgggcctcagcgagggcggcccgctgttcggcttcaccaaggccaacgagctgttcgtcggccggctcgcgcagctcggcatcgccttctccatcatcggcgagatcatcaccggcaagggcgccctcgcgcagctcaacatcgagaccggcgtccccatcaacgagatcgagccgctcgtcctcttcaacgtcgtcttcttcttcatcgccgccatcaaccccggcaccggcaagttcgtcagcgacgacgacgaagagtagaattacgaggatcgatcgatctaccgaggtttcgccgccattgttgtgcttgcgcatcattgagactttctttcaagtgtatatgtactgtgtacgtgtaggtgtaaagacgtaccttgtttaattagttgttaattaatgcccatggagaaaattaacgcg

SEQ ID NO: 21554 - DNA, 1252 bp, Oryza sativa
  ref <308>: DATABASE ACCESSION NUMBER: AK071828
  ref <309>: DATABASE ENTRY DATE: 2001-12-06
gagatcaggtcatcgatcgatgggcagcagctccggctccgaccggctacgcgacctccaggccttcgacgacacaaaggccggcgtgaagggcctcgtcgatgccggcgtcacaaccatccccgccatcttccaccaccacccgctgctactggacgatgcggaggaggatgcggatgttatcccggtgatcgatctgcaggcggacgttgaccgaggccatctggttggtcaggtgagggcggccgcccagtgtgtggggttcttccaggtggtgaaccacggcatccccggcgagctcctggaggagatgctggcggcggtgcggcggttcaacgagcagccggcggagggcaagaaagcctggtacagcagggacagcgggcggagggtgaagttcaactccaatttcgacctgttccagtcgccggccgccaactggcgtgacacgctgttgctggagctgacgccacggccggggccggcagcggaggagatcccaccggcgtgcaggggcgtggtgggggagtacgtggaggcggtgcagaggctgggcggggcgctgttggagctgctgtcggaggcgctggggctcccgccggagtacctcggcggcctcggtggggggctggctaccatggcagcgcactactacccgccatgcccggagccgcacctgacgctgggcaccacacgccactccgaccccagcttcctgacagtgctgctgcaggagagcaagggcctgcaggtgctcatgaggcagcgccagcggtgggtggacgtccctccggtggccggcgctctggtggtcaacatcggcgacctcctccagctagtgtccaacgacctcttccgaagcgtggagcaccgggtgttggcaaccaccgccgccgcggagcctcgcctctccgtcgcctgcttcttccgtcccgactacgcctgcaccagggtgtacgcccccgtcaccaccacgccgccgccaccgctctacaggagcaccaccatgccggagttcctctcgcattacagagccaaaggcctcgacggccgatccgcgctccaccacttcaggatccctcctccttcatctccaccacattaattttttttcttaatttcttacagatatgctccgtaccttcggactcgtactactttaattaattacagtatatatgtatgtacgtatatatatattcacatgatgcattcatcatatatcatccatcgggactatttgtctgtgtgt

SEQ ID NO: 21555 - DNA, 1190 bp, Oryza sativa
  ref <308>: DATABASE ACCESSION NUMBER: AK071829
  ref <309>: DATABASE ENTRY DATE: 2001-12-06
gagtgcttctcctacctccagccggctggacagaggccgtgttcatcccgataccggcgccaatctccgccgaatccggtcgcttcgttgcttcccttccaacattgattgcaaaaacggattcctctctatctcctctatcttatccacaagaaatccccatcaaattcgttatctatctcacgaattttggccgtttttattcgggtgaactcgagataaatcctaatttccttcaccaaatccatctgttcccgaggcgatatctccctcttccggctataaatagcatcccctcggcctcctcttcggtttccccctgtttcccgaagttttccctaaccctagccgcctccccacgctcgtcttctctctccgtcgccggcagtcgctccagccgccgtttgccgtcgcctcggccgtcgccctcctgcgccgccacctccctcggctccgcaaggtcgagctataccccgtccactggttcccctccgccaaatcccgccggaagccgctgtcaccgtgaaggccgagttcgccacccctgtttgatctccagccgcgccattcgtcgtcgtctatggtcgccttcggtcgccgtcgcctccattggattcgaagcaccgaggagaagcccgtccacccctccgttgccgccgctcgtcgccggaaagccatcgccatcgtcaacccaaggtcgccgccctgcggagctcgtcaccggccatctccctcgccgtctgtcgtcgtggaagtggtgcttgtcgtatccgttgttgcgaaggttcgtgagtacgtcggaagtgttcaagaagactaattgaagaccgattattgcaaggtcgtgctcatgacaattaaggaccggttcacgagctactgttgtgagacattaaccgtgtcaaccacaagccagcgtgggcaacgattttaccttttgtatagcatggttcattacggggtgccagaatgagaagcggcgagaagtccgtgggggttgctggggagtccatgcctctggtttttgagggggtgattatgatccaggaatggtgcactgtggtgagttgtgttgtgcgaagggtattgtcacgatttttccctttgcagtgccgtggtggtacttcggggcatggtaacatgtgtggaattgtgtcttgtgggtacagtggtacatctctggccagagt

SEQ ID NO: 21556 - DNA, 861 bp, Oryza sativa
  ref <308>: DATABASE ACCESSION NUMBER: AK071830
  ref <309>: DATABASE ENTRY DATE: 2001-12-06
ggctctctccccctctctctctcgccctcgccgccatcaccatggagcatcatcgtcatcggggagcggtggttctcgtagtggcggcggcggcgatggcgatggcgatgtcggcggtgaggggggatttcgcggcggacagggcggagtgcgcggacaagctgatggcgctgtcgacgtgcctgacgttcgtgcaggacggcgcgtcggggggcgcggcggcgccgacgccggactgctgctcggggctgaaggcggtgctggcggcgagccgcaagtgcctgtgcgtgctcatcaaggaccgcgacgacccaaacctcggcctcaagatcaacgtcaccaaggcgctctccctcccccagctctgcaacgcccccgccaacatctccgactgcccaaggctgttgaacttgccaccaaactccaaggacgcgcagatcttcgaacagttcgccaagcagcaggctgccatgcagggcagccccagtgcatcccctggtgggtcaagcgcaccggccgcgggcgcgcagaagagcggtgcggccgtgttgcggtggttgggagtggacggagttggtggcggcggcgcacgcgcggtggcgctcctcctcttcctcctctcctccgccgtcgccgtcgccgcgcctctcctgctcgtattctggatttctgatggccacagcttaaaattagcgtgtaacacacaaacgactaaaagtctctaattaagagcagtgagtggtctttgccgttggaaaatttggaattgtagtatatctcatgatcagctagctctagtagctacgcgtgttgtgtgtgtggtctcgaacgactttataatctcagtgtgatattgatttg

SEQ ID NO: 21557 - DNA, 721 bp, Oryza sativa
  ref <308>: DATABASE ACCESSION NUMBER: AK071831
  ref <309>: DATABASE ENTRY DATE: 2001-12-06
gttctttcagagtctttcagattcagaaaacccactactgccaagaagccctgcttctcttctacttcctctcaaagaaagagaccgagagaagttcatcttgcaagccaagaactctcgtcctctccttctgaagcgggtggcatggggaagctgtgttgcagccagacggacgacgatccggagttcaacctgctggggctgctcgtcgccgtcgtcctcgcgttgctgctgctgatgctgtgcacgccgccgcggcgcaggcgctgcgtggtgtacccctgctactaatggcggcggcggcgacggtgctccgatcctctcagatgagcagaggggatcgaggagaagcgacgaggcatcgtcaagctttaaagccaggcataggttccgatcttttctgaccgatttgcatatgctcagtttccgaaataatttatgctgaatttcgaattgtgatagactcgtttctgttgcgagttgttagaatttttatgtgcatactgttgatttgcggcctgatggaatatatgaaatgatttggagaaccgtgtgcttctgcaacttttgtgtaaaaacccggaaacttcagaaaaggtgtttgtattgtagtagcaaccgtatctgaacatctttctgttaaatcggtcgaaacaagcagaataggatgctgctgggatggaatgaaaacaaatcggaggtaggtttatactccattgtg

SEQ ID NO: 21558 - DNA, 1231 bp, Oryza sativa
  ref <308>: DATABASE ACCESSION NUMBER: AK071832
  ref <309>: DATABASE ENTRY DATE: 2001-12-06
gaccaccatatttgactggactggaggaagaagagatcgaacaacaacaatcgatcgaggagaggtcgtgtgacacgatgagcagcagcaggccggtgtgcgtcaccggtggcagcggctacatcgcgacgtgcctcatcaagaagctgctgcagcgaggctgcggcgtgcatgcgaccttgagaaatctcggagatgagaagaagacggcgctgctgaggaggatgcccggcgcggcggagcggctggtgctgttcgaggcggacatgtacgacgccgccaccttcgagcccgccatcgccggctgcgagttcgtcttcctcctcgccaccccgctaattcatgatccgcttagcaccaagtacaagaacaccaccgaggcggctgtggacgcgatgcacatcatcctgcagcaatgcgagcggtcaaagacggtgcggcgcgtcatccacacggcctccgtcaccgccgcgtcaccgctcagggaggacggcgaggggtacaaggacttcatcaacgagtcatgctggactcctcttgatctctccaaccgctatagcaacgtcatgatggatgcttatgtttcatccaagacactcacagagaagctactgctgaggtacaacgagtccgagagcagggcgttcgaggtggtcaccctgacatgcgcgctcatcggcggcgacaccgacaccacgcagctctatcactcgctaagcatcccgctgatcgtgtcgccgctcaccggccaggagctctaccacggcggcctcaagtccctgcaagcgctgctgggttctgtgccactggcgcacatagacgacatatgcgaggcacacatcttctgcatggagcagcaaccatccatcgccggccgatttctctgcgccgttgggtaccccaacatgcaggactatgtcgaccgtttcgctgtcaagtacccggagatcgcgataaagcttcaaggggtgattgggaaggatgtgagggtgaaagcggatacaaacaagcttggggatttggggttcaagtacaagtttacggtggaggagacgttggacagcagcgtggaatgtgccaagaggctgggattactttgagcgtgccaagcagtataatttctgtcctaatgtctgtatttgttccggcccttttactccaaccgtatctaagaaatgtaccctaaagctatcagaacattgttcatcgataatattacctccgtttcagg

SEQ ID NO: 21559 - DNA, 1231 bp, Oryza sativa
  ref <308>: DATABASE ACCESSION NUMBER: AK071833
  ref <309>: DATABASE ENTRY DATE: 2001-12-06
gtcccccaaatcaaatccccttctcccatttttcctctcctcgcttctcgccgcagccgccgccgcctcctcctcctctcgccatggccgccgctgctccccccgcgggccccgggctctactccgacatcggcaagaaggctagagatctcctgtatagggattaccacacggaccagaagttcacgctcaccacctacgccgcgaacggagctgcaatcactgttgctggcacgaagaaaaatgagtccatcttctctgaaatccagagccaggtgaagaacaacaatgtgtccgtggatgtgaaagcaacttcagactcaaaattgataactacattcacagttcatgatctgggcactccaggcctgaagggaattctatccattccttttccctaccagaagtctgcaaaggctgaagtccagtacttgcatccacatgctggcctgaatgctattgttggcctgaatgcaaatcctcttgttagcttttctggtgtgtttggaactggggcttttgctgttggtactgatgttgcatttgatactgcaactggggacttcaccaagtacaatgcgggactgagccacactactccagatctcactgcagcactgcttctgaacaacaagggagacagccttgctgcttcctactaccacaaggtgagcaaaacaagtgctgttggagcagagctggctcacagcttctcgagcaacgagaacactctcaccttcgggacacagcatgccctggatgaactcactactgtgaaggcgcgcttcaacaactttggcatggccagtgcgctcatccagcacgagttcaggcccaagtcgctcgtcaccatctccactgaggttgataccaaggccatcgacaagagctccaaggttgggctgtccctggtcctcaagccttgaaggtcgcctgctttttctggtgtggtttaggatgctagcttttgatatcagcagctcattgaacaaaacttgtaatcggcttaactttggttgcctctagcctgttctagactacatgagggtttctgttaccagtcaatctgtctcggtttctttttggtcatttgcgggcatattgatgggaaaacatgtcccggaatctgagtgtcaaaactcttgggtgaaattggtcacgtacttcaaagttcaccctctgaatccagctgcagatacttctgtttgattcaaaaccatatttcttctcg

SEQ ID NO: 21560 - DNA, 1290 bp, Oryza sativa
  ref <308>: DATABASE ACCESSION NUMBER: AK099197
  ref <309>: DATABASE ENTRY DATE: 2002-08-28
gataccactcagtgttcaccattgctgaccctccctctccaatccaagctccaacaatggctaaaccatccttgctcctccttcttcctctgctcatcttctccatcggcgcggctctcgcccgcgccgatctcatgctggacaggttcgagcagtggatgatcaggcatggccgcgcctacaccgacgccggtgagaagcagaggaggttcgaggtgtacaggaggaacgtcgagctcgttgagacgttcaactccatgagcaatggctacaagctggctgacaacaagttcgccgacctgacgaacgaggagttcagagccaagatgctggggttcagacctcatgtcacgattcctcagatttcaaatacctgctccgctgacatagcaatgcctggagagagcagtgatgatattctgccgaagagcgtagattggaggaagaaaggggcagtggtggaagtgaagaaccaaggagattgtggttcttgctgggcgttctccgcggtggcggcgatagaggggatcaaccagatcaagaacggcgagctggtgtcgctgtcggagcaggagctcgtggactgcgacgacgaggcggtggggtgcggcggcgggtacatgagctgggcgttcgagttcgtcgtcggcaaccacggcctgaccacggaggcgagctacccgtaccacgccgcgaacggcgcgtgccaggcggcgaagctgaaccagagcgcggtcgccatcgcgggctaccggaacgtgacgcccagcagcgagcccgacctggcgagggccgccgcggcgcagccggtgtccgtcgccgtcgacggcggcagcttcatgttccagctctacggcagcggggtctacacggggccgtgcaccgccgacgtcaaccacggcgtcaccgtggtgggctacggcgagtccgagccgaagacggacggcggcggcgcggcgaaaggcggcgagaagtactggatcgtgaagaactcgtggggggcggagaggggcgacgccggctacatcctcatgcagcgcgacgtcgccggcttggcgtccgggctgtgcggcatcgcgctgctgccgagctaccccgtcatgtgagcctcgtggcccgatcacacggtgcgtgtgaagaatgaagaatttgtgttgtgtgtgtggcttgaattgggattgtttatagtctacttagtgatgtaattatgtatgtatgtatgtataaacggaaaaccattgtgtcactgtataaagttataaagaaagcacgaacatctctgatatactg

SEQ ID NO: 21561 - DNA, 1057 bp, Oryza sativa
  ref <308>: DATABASE ACCESSION NUMBER: AK099198
  ref <309>: DATABASE ENTRY DATE: 2002-08-28
gacttctcctcccagatctctctcccacaccccaccgccgccagcgacgcgaggcgggatcaggccatggacggcggcggcggcggaggaggaggcgggttcggactgggcggcctccagtggacggcggaggaggcgtcgacgatcgggggcatcgcgacggtgtcgctgctgcactccttcatccccacgcactggctccccttctccatcgtcgcccgcgcccagcggtggccgctctcccgcaccctcctcgtcactgcatttggaggcgtccttcatgttgtttccactgctcttcttgggataactgctgttactatggcaaatactatagcaggcgaggaaacagtgcataaacttgcatcactgttgctgattgttcttggtggaagttatatcctgctgtttgcactgggaaaaggtggccatggccatgctcataatcatccaatggagaagatggcagttgcaggtcttgtacttgtacctgcattatcaccctgtgcaacaactcttccagtgtttcttgctgttggcaattcatcctccatgatgatccttgcgatcattgtgctcctctttagtaccatcacagtgatgacatccttggtggccctctcattctacggtgctagccagattaagttccactgggtggaacgttacgacaagatccttgtcggctcggtcctgtgcctcgttggggttttgacatacgtattccatcaccatgacggcgacgaacactctctccatgaacacgtgcaccggaaactcgtgggtctttagagtatagtataagattgcggatgaaactttcctacacttgcgagagaaaattgtgttgttccctaaccactgtaacgggtttgctgtatacagatctgattattaatccatctgaagtcagctagccggttttctggcaatgcaaaggttgtgctgacttgtgttgtagttgcctgtacatagaggtattctatcgtttgcttatgctgttatgcacccccaaaatcagaatactacttgcaaatgggaaacatacttgaactgc

SEQ ID NO: 21562 - DNA, 930 bp, Oryza sativa
  ref <308>: DATABASE ACCESSION NUMBER: AK071834
  ref <309>: DATABASE ENTRY DATE: 2001-12-06
gccctaatcaccacctcgctctttgcatttcttgatttctcctcgatcacctagtagttgatcgagcaatggcggccaaggtgcaccccaacctggccgtgccgtcgctgatccagccgccgatggcgccaccggcggcgatggcggcgggggacagcgtgatgaagacgaaggcggcggcggcgggcggggatgtggtgctgacggtgtggaggaagtcgctactgttcaactgcagggggttcacggtgttcgacgcgagcggcgacctggtgtaccgggtggacagctacgcggcggactcgcgcgcggaggtggtgctcatggacgccgcgggcgtgcccgtgctcaccgtccgccgcaagaaggcgatcggcagccagctcgggcttgggggcgaccagtggctggtccaccccggggaggagacccgcctcccgccgctctacgccgtgaagcggacgccgcagtacgtccgcggcggcggcagcgtcaagaccatggcgcacgtcgcgccctgcggcgtcgccctcggcgccggcggcggcggtggctacgagatcgaaggctcgtacctgcggcggagctgcgcggtgtacgacgcgcggcggcgcgcggtggtggcggaggtgcaggcgaaggaggcggtggggacggacgtgttccggctggtggtgcggccggggatggaggtgtcggtggccatggccgtcgtgctggcgctggagcagatgttcggcaagccctccctgctcaggagctggtcctcctaataattagcctgtttctttctttctctttttttttctttttttttttggccttgaatttccaacattgtttgggcctgagagcagaagagttgctcttggctgcctctttctctctgatcctgaaatgaaacctcaaattgggtgtcactgtacactg

SEQ ID NO: 21563 - DNA, 1679 bp, Oryza sativa
  ref <308>: DATABASE ACCESSION NUMBER: AK071835
  ref <309>: DATABASE ENTRY DATE: 2001-12-06
gacccccccaccccccacaattttttctccttttccactctcacaccccgcctcctcttcctcgtcacttcccaatccaaaatccaatcgcggggttgccaaaccctaaccctaggcaccgctcgagggaggcggcggcgatggccgacgaggggagcggcggcgagggcggtgcgggcgccttcgaggacgaggcggagccgacggtcaccatcggggagtacatcgaggggatcgaggccgaggagctggaggcggatttggtgctgggcggggacgacggcaaggagtgcacctacggcggcggctacctcaagcgccaggccgtcttctcctgcctcacctgcgtgccagcgggtgtcgctggagtctgcaccgcctgcagcctcgcctgccacgacggccatgaggtcgttgaactatggacaaagcgaaagtttcgttgtgattgtggcaactcaaagtttggaagtcatgtttgcaaactttgccctgagaaagatccagagaatccagtgaattcttataaccataacttcaaagggtcctattgcacatgtggcaggccttatcctgatccagaagctgaaaagcaagttgaaatgatacaatgctgtatttgtgaggattggttccacgaggatcatattggtcttaactccattgaagagataccacgagatgaggaaggggagccactctacgaggatttcatatgccccaaatgctcacctaagtgctatttcttgaaattatatccggatactatttgggcatctaataagcagagttctgcaccacaagctgagactaccaattcaactgttatgaatggaaattcaagccttggtgacatagagaaaagtgaaaatggtgctcttataaatcatttgaattgtgaaaagacctctgacaatgagaattgcccaaaagacagtgtagctccagaaaaggccagtctggatgacagttctgatggcaaatgtaagctaggaatgaacatttgttcaaatacaccatcagctgattcagagaaaaagatgccgttttttatgtcaaaaagctggagagaggttatctgtagatgtgaaacttgcaccgacttctatgcacaacaaggtgttgcgtaccttatagacaaggaagactctattgaggagtatgagaaggttgctaagcagaagagggaaaagaagttggagcagcaggaaggagttgaagcaaactttcttaattcactcgaccatgtacagaagattgagattttgagtggcatcaatgacatgaagaatgagcttcagtcttttctggaaacttttgattcatcaaaaccggtcacatctgaagatatacgagctgtttttgagaatcttgctaagaagaaaaaacagaggttgtcatgaaactcagctgcttggggttctgtttgagactaatatatcccactgccggtcgatcgagcagtttttctggccactcccccgtgaatttatcgttcgctatgtcatggctattgtgtcctgttacctagcttgtactcgacttctaatgtagttagcagaggtagtaatgctaaatgctccgaactgagcttctggtagatgctccagggcagcagaacaaaatgtttgctcctttgtatcaaatcaaaagaactttgtgacgtggtaatttacatt

SEQ ID NO: 21564 - DNA, 1475 bp, Oryza sativa
  ref <308>: DATABASE ACCESSION NUMBER: AK071836
  ref <309>: DATABASE ENTRY DATE: 2001-12-06
gatagggaggagagagaaagaaggaaaggctcctcttttgagaagacgaggttttagctcagactattgcaggaggaagaggaaggagggagaagcatggctgccttctggctcatctctatcattgtccttgtactactttctggagaatccaatgccaatccagctgcctctcagcagagtcagctggatgtaaaccacaggaagccacttcaaactttcagaccttacaacattgcccacaggggttccaatggtgaaatacccgaagagaccacggctgcctacctgagggctattgaagaaggtgcagacttcatagagtctgacatacttgcaacaaaggacggacatctgatatgtttccacgatgttatattggacgcaacaactgatatcgccaatcgtacagaatttgccaacaggaagagaacctatgaagttgagagacaaaatgtgaccggctggtttgttgtggattttactcttgaagaactcaagtcactgagggtgaaacaacgctacaatttcagggaccaacagtacaatgggaagtaccagattattacatttgatgagtacatcttgattgcgctttatgccgatagggttgttgggatatacccagagctcaagaatcccattttcatcaacgagcacgtcaaatggtcagacgggaagaagtttgaggacaagtttgtccagacactgctgaaatatggttacaaaggcgaatacatgtctgaagattggcttaaacagccattgttcattcaatccttcgcaccatcgtcactcatttacatgtcaaatatgacaaactctccaaaaatattcctaatcgacgataccacagttagaactcaagacactaatcagtcatactacgagataacttcggacgcttaccttgcgttcataaggaagtacatagttggcattggaccatggaaagatacaattgttcctcccataaataattacctaggtcccccaaccgatcttgtcgcgcgagcacacgctctgaatcttcaggtgcatccatacactttcagaaacgagaacatgttcttgcacttcgacttccaccaagacccttatcttgagtacgagtattggctcggtgagattggcgtcgacgggcttttcactgatttcactggtaccttgcacaggttccaggaatgcacaactccgtatccaaagaatgaaaagaatgcagaggcactcttgcagaaaattaactacatgctgaaggatagcggatactaagcttgcatgacaactcactgtactgttacttttcagatttgtttcattattgccaccactgaaaaaggcaccacccttgcagtttctacaattgttaaaataaagcagcttgtagaataaaagtaaattgaaatgtgttttcacaatatcatgtctgtaaaccttattcctaactccagaaaggggcaagatagctaaaaccg

SEQ ID NO: 21565 - DNA, 1584 bp, Oryza sativa
  ref <308>: DATABASE ACCESSION NUMBER: AK071837
  ref <309>: DATABASE ENTRY DATE: 2001-12-06
ggtcttcctctgaaccctgaaccaatcccgaactctgaactctgaaggctgcagagacaggcagagagatatgagggagataataagcatccacatagggcaggcgggcatccaggtggggaattcttgctgggaactatactgcctcgagcatggcatccagccggacggcctcatgcccagcgacacaactcctggaattgcaagggatgcattcaacacgttcttcagcgagacgagttcaggcaagcacgtcccaagggcgttgttcgtcgacctggagcccacggtgattgatgaggtgaagaccgggccataccgccagctcttccacccagagcagctcatctcctacaaggaagacgctgctaacaactttgctcgtgggcactacacagttggaagagaggtggtagatctttgccttgatcgactaagaaaactggcagataactgcactggtctccaaggttttctggttttcaatgctgttggtggaggaaccggctctggacttggttcattacttttggagcgcctatcagtagattacggtaggaagtcgaagctcgggttcacaatatatccttcaccacagatctcaacggccgtggtggagccttacaacagcgtgctctcgacccactccctgatcgagcacaccgacgtcgtcgtcctcctggacaacgaggccatctacgacatctgcaagaggtcgctggacatcgagcggccgacgtacaccaacctgaacaggctcatctcccaggtgatctcgtcgctgaccacgtcgctgcggttcgacggcgccatcaacgtcgacatcaccgagttccagaccaacctggtgccgtacccgaggatccacttcatgctgtcctcctacgcccccatcatctccgtcgagaaggcgttccacgagcagcactccgtcccggagatcaccaactccgtcttcgagcccgccagcgtcatggccaagtgcgaccccaggcacggcaagtacatggcctgctgcctgatgtaccgcggcgacgtcgtccccaaggacgtcaacgccgccgtccactccatcaagaccaggaggactgtgcagttcgtcgactggtgtccgacagggttcaagtgcgggataaactaccagccgccgacggcggtgccgggaggggacctggcgaaggtgaggagggcggtgtgcatgatcagcaacaacacggcggtggcggaggtgttctcgcggatcgaccgcaagttcgacctcatgtacgccaagcgcgcgttcgtgcactggtacgtgggcgaagggatggaggaaggggagttctccgaggccagggaggacctcgccgcgctggagaaggactacgaggaggtcggcgccgaagtcgaggacgacgacgaggaacagggcgagtactgatcgggctagcctgctaggtgaatctagcacggtagataaaccgcaagtttgtaaggtcggtggaagggggtctctcggtttacatggactcttgtgactttgtggtgtgagagtgggttttgttgtacttgcatcacaaaaaataaaagaattcgtcagaaatc

SEQ ID NO: 21566 - DNA, 1376 bp, Oryza sativa
  ref <308>: DATABASE ACCESSION NUMBER: AK071838
  ref <309>: DATABASE ENTRY DATE: 2001-12-06
gagaagaaagagagagagagagatggcggcatgagcacctcctcctgcatcgccacctcccccgatcccccgcaaaccctagcgaccgcgccccccaccgccacctcccctgcggcggcgccctggtgaggagggaggaggaggagggggaggtggggaggggggaggcgacgatgccgtcgcacgcggatctggaccggcagatctcgcagctgcgggagtgcaagttcctgggggaggcggaggtgagggcgctgtgcgagcaggcgaaggcgatcctcatggaggagtggaacgtgcagccggtgcggtgccccgtcaccgtctgcggcgacatccacggccagttctacgacctcatcgagctcttccgcattggcggggactcccccgacaccaactacctcttcatgggtgactacgtcgaccgtggttactattcagtggagactgttacattactagtggctcttaaagtccgttatagagacagaatcacaatattgagaggaaatcacgagagcagacaaatcacccaagtgtatggcttctatgacgaatgcttacggaagtatggaaatgcaaatgtttggaagtacttcacggacttgtttgattatttgcctctcacagctcttgtagaaaaccaggtcttttgcctccatggcggtctctcgccgtcattggatacattggataacattcgtgccctcgatcgcatacaggaggtccctcatgaagggcccatgtgtgatcttttgtggtctgacccggacgatcgatgtgggtggggaatttctccaagaggggcaggatacacgtttgggcaagatattgcacaacaattcaaccatactaatggccttacccttatttcagggcccatcaacttgtgatggaaggcttcaattggtgccaggacaagaacgttgtcacggtgttcagcgccccaaactactgttaccgctgtggtaacatggcagcaattctagaaatcggggagaacatggatcagaacttcctacagttcgatccagccccacgacaaatagagccggacacaacgcgcaagacccccgactactttttgtaatcgtggcgttgatctttttttttttaactcccgctgttgatgttcctctctgctgcgtctggttttatgtagatcttcgtccttagaaaatgggttccctcctcgagccaagctgtgccccccattctttgtttggaaattttgttgcagctcctcaacttccatagaacatgttaaaacgtacatggcgttgttttttcctttttccttttttatgtacctcccattttgtattattctgagacaggagagatgggaagctgcaatagagttgtctcgtgac

SEQ ID NO: 21567 - DNA, 1682 bp, Oryza sativa
  ref <308>: DATABASE ACCESSION NUMBER: AK071839
  ref <309>: DATABASE ENTRY DATE: 2001-12-06
tgggacctactctgaagtagtacgcgccgctaccctgcctcttcttccttcccactaccaaacccgaccaaatattgtattgctggctcgctgcttgggaagataaaagtgcggctctgaaggggaatttcgtcgaacaggatgaatgcgttggcagcgacgagcaggaacttcaagcaggcggccaagctgctgggcctggactccaagctggagaagagcttgctcatcccgttcagggagatcaaggttgaatgcacaattccgaaagatgatgggactttagcatcttatgttgggtttagggtccaacacgacaatgctaggggacctatgaagggtggaatcagataccaccatgaggttgatcctgatgaggtcaatgcgttggcacaactaatgacatggaagacggccgtggctaatattccatatggaggagctaaggtggaataggatgcagccctggagatctcagcatctccgagctagagcgacttacccgtgttttcacccagaaaatccacgacttgattggcattcatacagatgttccagctccagatatgggaaccaactctcagacaatggcgtggatacttgacgaatactcaaagtttcatggttattcacctgctgtggtgactggaaaacctgttgaccttggaggatcacttggaagagatgcagctactggaaggggagttctgtttgctactgaagccttgcttgcagagcatggcaagggcattgctggccagcgttttgtaatacagggatttggtaatgttggatcctgggctgctcagctgatcagtgaagctggtggcaaggtgattgccatcagtgatgtcactggagctgtcaagaacagcaatgggcttgacattgcaaagctaatgaagcactcatcagagaaccgcgggatcaagggtttcgacggaggcgatgcaatcgacccacgctcactgcttactgaagaatgtgatgtcctcgtcccggcagcacttggtggagttataaacaaggacaacgcaaatgagatcaaagcaaagtacatcattgaggctgcaaaccaccccacagaccctgaggcagatgagatcctgtccaagaaaggcgttctcattcttccagacatcctcgcgaactccggtggtgtcacagtgagctacttcgagtgggttcagaacattcagggtttcatgtgggacgaggagaaggtgaacaatgagctgaagacctacatgacccgtgggttcagggatgtgaaggagatgtgcaggagccaccactgcgacctccgcatgggcgccttcaccctcggtgtcaaccgtgtcgctcgcgccaccgttctcagaggatgggaagcatgatctcgtcagtcatctgatcatctccctgttgtacttcatgcactgaatttctttcggtttttcgctttggttaatccgtcaaccgggattggagaagatagattcaataaccaaccccacgatgagtcgatgagtgtgctgcctttctcagagattagttgggggaagaaacagtagtaatctgctgggtagtgatgaattgcctgaatttatcatcttgcagaatggcactgcaggatttcttgtactctgtggctgaaattcttgctggtttgcaagcagtaatctgaatttggtttcttggct

SEQ ID NO: 21568 - DNA, 1834 bp, Oryza sativa
  ref <308>: DATABASE ACCESSION NUMBER: AK071840
  ref <309>: DATABASE ENTRY DATE: 2001-12-06
gaggcagaatggcagcccccagcaagccacaacatggcgccattggccccgtgccgttcaaggacgtcatcggagacgcaatggcacagcgatcctcaccggaggaggagtatgccggcgtcgtgtccagcctcccgagctatcccaagctgcgcctgcggcactaccagggcatgtggctgatggagtacacccttccagggatcatggccatccagcggagcttcgtgccgcgccgccatggcgacgtcgtcctcgcgagccccagtgaccggcatccgctcctccgtcttaacccgcacgactgcgtcccgttcatggagggggcgatctctgaaggatggggtggtaagattgatgagctgccgtcgccgaggctcatgtccacccacatgcagcacgctgctctacccaagtccattgcagatgaacctggctgcaaggttgtttatatttgcagggagccgaaggatatcctggtctcagcctggcacttcttcagaattatagagcctgatctttcatttcaagaagtgttcgaggctgcctgcgatggcaagttcttgaccggcgctatctgggatcacattattggctactggaatgcttgcaaggcgaacccagagaaggtcctgtttctggtctatgaggaccttctgcgagatccggcaaacatcgtcaggaagctcgccgactttcttggccagccgttctcatcgaccgaggaagaagctggactggtgacagatattgtgaggctgtgcagcttcgagaacctgaagagcttggaggtgaataagatgggagaggcatcgttcgccttcccgaatgcgtcatacttccggaaagggaaggccggagactggaaaatccacatgacgccggaaatggtggagtgttttgacaccatcgtcaaggagaagatgcatggatctgggcttgtttttgcttgatgcatgtggtggacaagaaattactaaattattcaactcttttaatacttttttttaaaaaaacaagatctttcaataaataatttaaagggtagtccaaaatgaaaaaatagtaataaaatgtaacctaaagtgaaatttactcaaaataaactaatcatcaagctcaagaggttgctcgcattgctttggctgaatcacattattttaccaatgtgacaagattgtacaacttcttcttggagacttagatcatcttttattgttctgttctgaacagaaatagacctagagctgacatgaatgatatttttccttttaatgaggtcattagctctttgggttttttgaacttccaattaaaggtatggcttacacctgaagttacatgcaacatcaacctttgttgtatctattgaactctcccatgaattggactctttcctaccctaacacaatggtaaagccattgtcaagaatagtttttcggatcatatcccttgtgtggtgcatattgtgataaatatacctaaagcacatacctttagatttgagagttactgggtggagcatgagggcctttttgacttggtgcaaacaatttgggataatcatggcagtccccttgatcctgctaggaatattactgctaagcttaaggcattgagaaaagaccttaaaaaatagagcaaaaatctttcaaggttgcaagaattgatcaagaattgtaatgcaaccattcattttatagacagtatagaagagctcggagatcttactgtcttggggtgaaaatacatagtctttatcagaagcaaactgatgacctacttgatgtataagcaaacatattggcagaaaatatgtactattaggtgggc

SEQ ID NO: 21569 - DNA, 881 bp, Oryza sativa
  ref <308>: DATABASE ACCESSION NUMBER: AK071841
  ref <309>: DATABASE ENTRY DATE: 2001-12-06
gtatcagataagaaaaaaggaggaaaaaccgctcgtgaccgagaatggcgtcactatgccgcccggcgccagcgatccatgcattcaccgccgtgtgcgccctcccaccgcccgctctccacgcctgccgtccgtcgccgctacaccacaacaccgtgcgccgccactgcgaaccattaattccgctcgcagccatcgcacttccacgccgcgcgccaccaaccgtccctggatgctgcacacaggtggtgccggcccaaccccagcgccgccgcttcccaaggtgtttcacgcctccggcgccgtccttctcggccggagtcgcgcctgaacctgcatattctcggggaaagctctaccgactgcctcacgatcccctccacccacgtctccttccacgaccatcgctggcccacgaatgcgttggcaaaggtggcgcagcccctgcccaagacggatttcagccgtgccgcccacgtcctgggcgggatccaccttcactcgtggggctcgcctgttcaaccaccacccgtgacggttcaaccctcgctgtcggcctgccgctgaccgggaagggagcaatccgcgtcgccggcggtgagtttctctaagactattgagttgcttgaacgcttcaaagacttcaggcaccaacctgaagctcttattctttgaggccaacaagttcagggaacaatgaagaatcgttaaaatactataagcaggaaggtcccttgaaggatttcagcgagaggggaaccatgaatcagctttggttgcttagatcagaatgctccttccgaagtaatttttgttacagcatttccccaacgtattatgcacagctatctaatttgaagctataaattcaatgttgtatt

SEQ ID NO: 21570 - DNA, 1052 bp, Oryza sativa
  ref <308>: DATABASE ACCESSION NUMBER: AK071842
  ref <309>: DATABASE ENTRY DATE: 2001-12-06
ggaactcgtctcgctcagctcgcccagaagaatggctccaaacgccatgcgcaaggtcaagaaagttttactggtagttggcatgattgcctctaccatactcggtgagtatcctcatcaggcggccgccgcccgattttctgcacgccgtcctccaccaggaccaggacgtctaccaccaccagtccctggtggccctagagtcggaggaaaaccaagaccggagttcgatttgcccccggtgtgttccgttggatttccgtgctctgcctctgagccggagtcgaaccacaccacattctcctgcgagctggagaaccggatgggggacaccatctggttccaatgtgatggagatttattctacttctcggtgggtagtggccagagcatcggccgcctctacaacgacgtccaagacctggggccacgtaacaaggtgtcctgcgcctgggccttccaggaaaactacaagagcagcgtcccggcatgggacggcaactggccggaggcttcctcctgccgggtcgacgacgccagcggcgcagacggccagtgccgtcttctcttcgagaaccgcgaggttgctctgctcactgccaccggcggccgccgcgttctcgggggcttgctgctgaagaactgcactaccccaaccccatggtacgcgtggctgttcccctggaccgatccctgcaccacgtacctcgacaacaccacccgcccgtacgtcggcaacatacagccctcgtgggcggcagccgtcttcaacatggataactgatcgacgcgacaccggtacctcccacccacttcgcgcaggctggtgacaaataatctctctctctctccctctctctctctctctctctctctggttatatatatatatatatcatcatggacatggaatgatgagtgctgtgctacaaactctacatacatatagctgctcatcatctcaacccctcatcattccgtatatatgtgtgtaatgaataaaacgacgatcgactcttgtggttcaattcgatcgtctcagtgccttaact

SEQ ID NO: 21571 - DNA, 1045 bp, Oryza sativa
  ref <308>: DATABASE ACCESSION NUMBER: AK071843
  ref <309>: DATABASE ENTRY DATE: 2001-12-06
gactgctagtgctgctagcctgagtagtttcgtgtgtctgaggatctcctgatctcctccctccctctctctctctccatccccatccatcctccttttcctcctattcccctgtggaatctcatcttcttcttcattccacttctcttctctctcgtggtcgcatgatctcatcaggagcgcagatgctacggcgtccttgagaattgcagagaggcaaaagaagaacaagcagagagcaagaacaagcagaagcagaagcaaagaggcgatggacggcgacacgctgtcggcggcggcggcggaggacgggaaggtgctgcacgcgttccagacgagcttcgtgcaggtgcagagcttgctggaccagaaccgggtgctgatcaacgagatcaaccagaaccacgagtccaaggtccccggcgacctctcccgcaacgtcggcctcatccgcgagctcaacaacaacatccgccgcgtcgtcgacctctacgccgacctctcctccctcttcgccgcctcctcccccggccccgccgcctccgagggcgcctccgtcggcaccgccgtccgccacgccggccacaagcgtgtcaggtccacccacctcgactgaacaagaaccattctcattttctcaattaaccacctccaattctccaattccaattccaatttcggctagcttagcttaaagatcgagctcttgcttgcttgtatatctagctataatctataaatctacatatgagcaattaacgccccctcacaactactcccgatgtttcatattataagactttctaacatttgcctacattcatatatatgttaatgaatctagacacatatgtgtgcctagattcattaacatctgtatgaatgtgggtaatgctagaaagtcttataacctaaaacggaggtagtacaatcatcttcggttctttcttgtagctgttgtttcatcttgttgtagctgatatgatgagctattatatggattttgatgcaacaatgccaatacaagagagtgagcacttctccg

SEQ ID NO: 21572 - DNA, 1292 bp, Oryza sativa
  ref <308>: DATABASE ACCESSION NUMBER: AK071844
  ref <309>: DATABASE ENTRY DATE: 2001-12-06
gggtttcctggcggactccaaaaacccttcctcaaaccctcgcccccacaacgccccgcgacaggaggaagaagcttctcgtctgattttgttcctggtgactgaaagcagcagagaagcagataggctcgcggtgagccatgggagaaggcggagacgggaggtccttcaattttcttcaagttctgtttgagggtgtaatagctggaggtgctgccggtgttgttgttgagacagctctgtatcctattgatacaataaaaaccaggcttcaggctgcgaaaggtggaagtaaaattcaatggaaaggcttgtatgctgggttaggtggaaatattgctggtgttctcccggcttctgcaatctttataggagtgtatgaaccaaccaaaagaaaactgctagaaatgtttcctgaaaatttgagtgctgtggctcatttgactgcaggggcaattggaggtgctgcatcttctcttattcgtgttcccacagaggtggttaaacaaaggatgcaaatgagtcaattcaagactgcacctgatgctgttcgccttattatccgtaaagaaggattcaaaggtctttatgctggctatggttcctttctgttgcgagatctaccatttgatgctattcagttttgcatatatgagcaacttcgaataggctataaactggcggcaaagcgagacttgaaagacggagagaatgcacttattggtgctttcgctggcgcaattactggggctataacaacacccctcgatgttttgaagacaagattgatggttcagggacaagcaaaccaatataggggaatcataagctgtgctcaaacaattctacgagaggaaggtgctggtgcttttttgaagggtattgagccaagggtattatggattggcattggtggatccatcttctttggtgttttggagaaaacgaagtcaattctagctgagaggaacagccgtaaagtacgaatactatgaaagggggatgattttgcgtagatgctgctattttcccaggatgtctactgatatgtgtgctcgatcaattaattttaggagctccgattcacatccttgtcaatcccatccgaatcttgtattttgctagagcattacatggggttaaagttataatttctgaatttcttttcgtctggctagcttgttttgtacttgagctaaaaagataattttctggaagcgaaatgcttctgttcaaacggatgatctgttgtcattgcaaaaaagagaagttcattaggatagtttactgcg

SEQ ID NO: 21573 - DNA, 1698 bp, Oryza sativa
  ref <308>: DATABASE ACCESSION NUMBER: AK071845
  ref <309>: DATABASE ENTRY DATE: 2001-12-06
gtccaagaaaaaaaaaaggaagaaatactcgtatgcattttgttgcgccatagccgctagtccccggctccccgcccttcccacccctatccccgccgccgccactccctccccggccatcgccgtcgccgtcgccgtcgccgctgcagccgccagccatgctccacctccagaaacacctcctcctcctctccctccctccccgcgccaccgcctccaccctcctctccctccgccaccatggcctcttctcccttacccgcttctccgccgccgccgccgccgctaaatccgccggccacttcgccgtcgaggagtacctcgtggccacctgccacctcacccccgaccaggctaccaaggcctccaagtccatctcccacctcaagtccccgtccaggcccgacgccgtcgtcgccttcctcgccggcctcggcctctccgccgccgacatcgccgccgccgtcgcctacgacccgcgcctcctctgcgcggaggtcgacaggacgctcgccccgcgcctcgcggagctcgcgggcctcggcctctccccctcgcagatcgcgcgcctcgtcctcgtcgaccccgcccgcttccgccgccccaccgtcatctccaagctccagtactacgtcccgctgttcggatccttcgagaccctcctccaggcgctcaagaacaactcctacctcctcagctccgacctcgagaaggttgtcaagcccaacgtcgcgctcctgcgggagtgcgggctaggtgcttgtgatattgctaagctgtgcatcccgttgccgaggctgctcaccaccagcccagagcgtgtccgagatatggtggctcaagcagaaaacgtcggcgtgcgccgtggctccaagatgttcaggcacgctattctggccgtcgcgtacatcagcgaggaaaagatcgccgccaaaatgcagttcttgatgaagacattaaagtggtcagacgcagaggcgaggattgcggtgtccaagcttcctgtggtgctgaggagctcggaggacaagctgagccgtgtgtcggaattcttgatctctgaggtcgggttggagccggcatacattgcttacaggccggcaatgctcacttatagcctggaacgccggctcatgccccggcactgcgttctgaagtatcttaaggacaatggattgatagaatccgacaagagctactatagcgcggtccaggtgaccgaggaggtctttgtggagaaatacataagtccatacgaggacactgcgccgcaccttgctgaagactatgctgctgcatccagcgtaaagatacccaccagattcagattgaaaggaccaaaaacaggccatgcaagtgcgcaaactgcctaattcttgccacgagtagtgagctggtaagtcctcttgcagtgttctttgcctgactggttgttgagtgcgctggttttgctgttgctagccaccaacagaactgaactgataattagattcttgaattaagatatgccatctggtagatatgtaaccatggcactgttatgaaccggttcatcgttttgtcacatgtgtgcaatcgttcattcgaatgggctcatccatctgtggttgtatgaatttgccaatgaagtcatctggtagatatgtggcaccgttatgaaccagttcatcgttttgtcacatgttttgcatattgttc

SEQ ID NO: 21574 - DNA, 985 bp, Oryza sativa
  ref <308>: DATABASE ACCESSION NUMBER: AK099199
  ref <309>: DATABASE ENTRY DATE: 2002-08-28
ggcggcaaccaccgctcctcgccgccctcggatgctcccgccgccgcctccgccgcaatccgagtcatcggcggcggccgcgctctagccgctcgctcgctgttggcacggtcccggagcggagccggagcgcatggcggaggccctcctccccctgccccggcgcctcgtcgtcaccgcctccacgcccgcgtgctcctctgcctcctcctccacgtccccgtcgcctcactgcctcctctcgcgcgccaacccgcgcccgccgcgcttggccgccccctcgcccccgcgccaccgccgcctcaaggcccatgcagccgtctcagacaaaagtgagcaaccaaaatggtgggagaagaatgctggtccaaatatgattgacatccactctacacaagagttcttggatgcactgagggatgcaggcgacaggcttgtaattgtggagttttatggaacttggtgtggttcttgcagggcactcttcccaaggctctgcagaacagctgtggagaatcctgatatcttgttcttaaaagtaaattttgatgaaaataaacctatgtgcaaacggttgaatgtgaaagtccttccttacttccatttttaccgtggagctgacgggcaattggaggcgttctcatgttccttggcgaagtttcagaaactgaaggatgcaattgctgttcacaacactgctcgctgtagcatcggtccaccagtcggagttggggatgtgctggatagccctgaggagaaacctgcagaagctagtccccggtagatttgttctgttacagtgcgtctcgctctccattgctatatctgctcattttttttacctcgatagatcttactgtaaccaactcaggagaatattcagttttcctggataggggtggccaggcaacgggccagcatcagatgttgtaagcattactgtttaatttttttgagaaagaaaaatcgtgtattatagtgtgtc

SEQ ID NO: 21575 - DNA, 1576 bp, Oryza sativa
  ref <308>: DATABASE ACCESSION NUMBER: AK071846
  ref <309>: DATABASE ENTRY DATE: 2001-12-06
actccccccccaaaatcatcagatccgcctccgcctcctcctcctccacctcctcccaccccctcgccgatccagatccatcgccggggaggcgccagccatggccggcggcgggggcgccggcggcatgtcggagtcggtgctccgcaaggtgctcctctcctactgctacgtcggcgtctggatcttcctctccttcgccgtcatcgtctacaacaagtacatcctcgaccccaagatgtacaactggcccttcccgatctccctcaccatggtccacatggccttctgctcctccctcgccgtcgccctcgtccgcctcctccgcgtcgccgagccgccctcgtcgcccgccatgaccccgcagctctacacctcctccgttgttcccatcggcgcgctctacgccatgtcgctgtggttctccaactcggcctacatctacctctccgtgtccttcatccagatgctcaaggcgctcatgcccgtcgccgtgtactccatcggggtgctcttcaagaaggagaccttcaggtcgtcctccatgctcaacatgctctccatctcgttcggcgtcgccatcgccgcatacggcgaggcgcgcttcgatgttcggggtgtcgcgctgcagctcgccgcggtggcgttcgaggccacgcggctcgtgctcatccagatcctgctcacctccaagggcatctcgctcaacccaatcacctctctgtactacgtcgcgccgtgctgcctcggcttcctgctcgtgccgtgggtgttcgtcgagctgcccaggctgcgcgccgtcggcacgttccgcccggacttcttcgtgttcgggaccaactcgctctgcgccttcgcgctgaatctggcggtgttcttgctcgtcggcaagacctccgcgctcaccatgaacgtcgccggggtggtcaaggactggctgctgatcgccttctcgtggtccgtgatccgggacacggtcacgccgatcaacctgttcggctacgggatcgccttcttgggggtggcatactacaaccacgtcaagctgcaggcgctcaaggcgaaggaggcgcagaagaagatcagccaggctgatgaggaggctggctcgctgttgcaggagcgcgatgggcacagtgatcgcaagagcgataaccaggcatagagccaccaccagatctgatcctggcacacacaaattgggtatctggtgcaaagtgcaaaagactgtagtttggttggtctacggttgctttcaaggaggtggacaccagtttgttctttcacttatttaactttagttggatctggagggcaaatcaagggaatttattggtttaggaaaatacttgcacttgcacctactttctggaggactagagtaaactttcatgttaccctgttatttattcagctatttttgttccagagaaagacagcctcgttgcctctctcgctcattgcctaaaatttatttgttctactagtagcctaggtactaaaaatgtacttctacatattggtattttggtggttatcttctatatataatgagcttactgtaatattataatcc

SEQ ID NO: 21576 - DNA, 994 bp, Oryza sativa
  ref <308>: DATABASE ACCESSION NUMBER: AK071847
  ref <309>: DATABASE ENTRY DATE: 2001-12-06
gatatttctcttcttcttcctcccttccccttcctctcctctcctctcctctccgtcttccaaagctcgcggccttctcgctttcgatttctctctctcgcggacagcgtgaattcgagggatttcttggctggtttggttgtggattggattggattgggtttctgtgtgtggaggtgtgtgtgattagaagcttttgcgactggaggaggaggagagatgggggcgggggtgtcgggcctgttcggattgggcggcgacgagggggagacgtcggcggcggttggtggtgccgcggcggcgggtctgggcgacctgccggagctgtgcgcggcggaggtgctgctccggctcgacgcgccggagatctgccggctcgcgcggctcaaccacgcgttccgcggcgcggccggggcggatttcgtgtgggaggccaagctgccggagaactaccggtatctgatgagcttcgtggagggcggcggcggcggcgacgacgggagacagctgcggcggcggcggtggcggccggctgggaagaaggagatctacgcgaggctggctaggcctgtgcccttcgatggcggctcaaaggagttctggctggagaagagcaaaggcagggtttgcatggcgctatcctccaaatctctggtgataactgggattgatgataggagatactggcaacacattccaactgccgaatcgaggtaattatcgctttgatctgatattcactagtaatatttatctgttcctctgtgtctttttttttcagaaagatgatatgataagatcgtatgagttgctacttgcatcgtgatgatgtcacaaaatatctcatggtgtgattgacctgttcctagtttcttgtagaaaattaatgaatgagaccatatagctatttattttttttgctttcttttttactcgtgtattcaactcacaaagtgtacccttagttctgaaacataatgatatgtttggctgc

SEQ ID NO: 21577 - DNA, 1521 bp, Oryza sativa
  ref <308>: DATABASE ACCESSION NUMBER: AK071848
  ref <309>: DATABASE ENTRY DATE: 2001-12-06
gaagctttcttcctcctccgcgcgcgggtcgtcgccgtcgccgccgcccccgccgcatcgccgccgccgcgctcagatccagacccctgagacatggtctctcgccgagcgatgcgagcgccggagatgctccggtggctcgccgcggcggcggcgctcgtggctctgctcgccgccgcgccggccgccgggttctacctgcccggcgtcgcccccaccgacttcgggaagggtgattcacttcccgtgaaggtgaataagctgacatcagtaaaaactcaactaccctatgcatattactcccttcctttctgcaagccagaaactatcgttgacagtgctgaaaatctcggtgaggttcttcgtggtgatcgcattgagaactctccatatgtgtttcaaatgagagagcccaagatgtgccagattgtctgcaaattaactgttggtgagaaagaagcaaaggagctcaaggaaaagatagaggatgaatatcgtgtgaacatgattcttgacaatctcccgctagttgtttctgtgttaaggcaagataagaacattgcttaccaaggtggctatcatgttggtgtcaagggccagtacaccggaagcaaggaagagaagtacttcattcacaaccatttgtcatttttagtgaagtaccacaaggacgatgattcagaactttctagaatagtgggatttgaggtcaagccatacagcattaagcatcagcttgatgataaatgggatggcgtgaacactcgcctgagcacatgtgaccctcatgctaacaagcttgtaacaagttctgactctcctcaggaggtcgaagctggcaaagaaatcatattcacctatgatgttcactttgaggagagtgacatcaagtgggcttcccgttgggacacctatctgttgatgactgatgatcagattcactggttttctattgtcaactctctcatgatcgtgcttttcctgtctggtatggtcgcaatgataatgcttcgcactctatatagagatatctctagatacaaccaacttgaaactcaagaagaagcgcaagaggaaactggctggaagcttgttcatggagatgtgttccgccccccaaccaactctgatttactctgcgtttatgttggtactggtgtccaattcttcggcatgctgctggttacgatgatttttgcagttctgggtttcctttctccatcaaatcggggaggattgatgaccgcgatgcttcttgtctgggtcttgatggggttgcttgctggttatgcttcttcacgcctctacaagatgttcaagggttcagagtggaagagaataactatgcgcacagccttcttatttccagggattgcttttgttatcttcttcatattgaatgctcttatttggggggagaagtcatctggtgccgtccctttcaccactatgttcgccttggtcctcctttggtttggtatctcagtgcctcttgtgttcgttgggagctatcttggattc

SEQ ID NO: 21578 - DNA, 1143 bp, Oryza sativa
  ref <308>: DATABASE ACCESSION NUMBER: AK071849
  ref <309>: DATABASE ENTRY DATE: 2001-12-06
ttgcagatgaagagaagcggatattgtatgagaaggcagaggtgactgattatgagttgattcctggaggccgaaacatcaaggtcaccgaggagaacaagcatgaatatgtgaaccgggttgcagaacatcgtttaaccactgctattaggcctcaaatcacctcttttatggagggatttaatgagctcattcctgaggagctgatatcaatctttaatgacaaagaacttgaactgctaatcagtggactcccagacattgacttggacgatctaaaagcaaatacagaatattctgggtacagcatagcttctccagtcattcagtggttctgggagattgtccaagggttcagcaaggaggacaaagcccggttccttcagtttgttactggcacctcaaaggtacctctggaaggtttcagtgcactccaaggaatatctggaccacaacgattccagatacacaaggcctacggaagcaccaaccatctgccttcagcacatacttgctttaaccaactagaccttcctgagtacacatcgaaagagcagctccaggagagattgctactggctattcatgaggcgaatgaaggtttcggatttggttaatcagtcactcctgcacctgtgtgcaagaaatttcagggagtaatgtacagataccgtcggagttgcaataggcgaggggaatgtgcgcggactcttacataacctgctactagattcatttgttgcctgcatcaaccatcggcgttggtccctgaagactgatgagatttgttgacaaagtaccggcctgcccacgatgctttataggactggttgctgcgaaggatgtgcagggaggtgtagcaggaagtgctagaagacagcaactatttggtgttcataatattttttttctttcccttttgggtcttttttggccattgccccgttaatagatttcaccttctctatacattggacctgtatggaatttttttccttttttattcaagtttgtttttggggggcatagaccggtggaatgcaacattaagtagaatgcaagttttccatcgctattgcatattcaatgcacattgactaaaagtgtctggagccacgggctgcggctataaattttactcct

SEQ ID NO: 21579 - DNA, 1616 bp, Oryza sativa
  ref <308>: DATABASE ACCESSION NUMBER: AK071850
  ref <309>: DATABASE ENTRY DATE: 2001-12-06
ggcctttccttccgatctctctccctctctctcttcttcttcttcttccttccctctcaacccgacgacccacgcgaagcgaactctcgcgcgagacgagagtagtaaaccctagaaacctagaggagatccccaccaccaccatgacggtggatcagaggacgacggcgaaggcgatcatgccgccggtggagatgccgcccgtccagcccggaagaaaatgtggaggcgaggaaagtactggaaaccttgattccgtccaaccgataggaaaaagcgaccacggagatcacgcgatggacctacttcagttgcagagaccatcaagcggtgggccgagctcaacaatcagcaggagcttgatccacagggtccaaagaaggcaaggaaggcacctgcaaagggttcaaagaagggctgcatgaaggggaaaggaggaccggagaatacacgttgtgacttccgtggtgtgaggcaacgtacctggggcaagtgggttgctgaaattcgggagccgaatcagcaaagtagactctggttggggaccttcccaactgccgaagctgcagcttgtgcttatgacgaggcagccagagcaatgtatggtccaatggctcgcactaattttggccagcatcatgcccctgctgcttccgttcaggttgcactagcagctgtcaaatgtgctttacctggtggtggcttaacagcaagcaagtctagaacatccactcagggtgcatcagcagatgttcaagatgttttaactggtggcttatcagcatgcgagtccactacaacaacaattaataatcaatctgatgtcgtctctaccttacataagccagaagaggtttctgagatctctagtccactgagagctccaccagctgtcctggaagatggttctaatgaagacaaggctgaatcggttacctatgatgagaacattgtcagccagcagcgtgcccctcctgaagccgaggctagtaatggaagaggcgaggaggtctttgagcctctggaacctattgccagcctaccagaggaccaaggagattattgttttgatattgatgagatgctgagaatgatggaagctgaccctacgaacgagggtttgtggaaaggcgacaaagatggatcagacgccatcctggagcttggccaggatgaacctttctactacgaaggggttgatccaggcatgctggacaacttgctcaggtctgatgagccagcatggttattggcagatcctgcgatgttcatctccggtggcttcgaagatgactctcagttctttgagggcttgtgatttccccttggcggcagccggccatactaaaattttctggtgctttggtcggctagctcctgcacatcgccctcaggatcagcaagagaaacactggaccggattgggttcgttggtggaactggatgagcatctagtagctaaggaaaaaagatccttttatttagttctgtaggcaatggaactccttgagaactccgtttcagtgtttgttaatttgataacgcttgcttgtttgtgtgtgtatatcgatctcttttgaagcaatgagaaaaaaaaaaggactgaagaaaatgtg

SEQ ID NO: 21580 - DNA, 1161 bp, Oryza sativa
  ref <308>: DATABASE ACCESSION NUMBER: AK071851
  ref <309>: DATABASE ENTRY DATE: 2001-12-06
ggatgtcttgagactggcaactcggaggcgaaggcggcggcggactcaatcctgttggattggagtataattccactaaagttgcctatctatcgtgtgttcttgtgttcttgtgatttgtttccctttttcctgcttaaatcagtgttgaatcttgtaagatcctgtcagccggctgcatcaaccccccacatcccggcctcccactagaccaccaccctcatcccgcggcggcctccatcgtcgactccgcttcccccgtgcgcagcccacatccacgccgacagtccgtcgcctacgccacgtctcgcaactggatccgctcctctccgtcgatctccaccacggtccctttcgcgccgcaccggaagctgcccgccagtcctctgatcgtcgctggatgctgtcggcgggtgatgcagtactcacccgtctcccctccatcagccgcaccggaagctgcccgccagtcctccgatcgtcgctggatgctgtcggcgggtgatgcagtactcacccgtctcccctccatcactgagggacattcccatcaacaaaaggtacacttggcggcatcactaatttaactccaatcgcttatatacaaagctgccgagaattgagtttaatttatgcggaagagtgctagggagcggtatgctgctcttagtgctgacgacaaggaagctaggcttcaaaagatgcgagagtactaccagcgaaaaaagagtattgatcctgtacctacccatggtatttaaattattatctcacaaacggcgtagatctgaagtgaaatcttgccactggacacaagctcactcttcttcaggacgtcaggttccttcatcacccgggtactctttcctactgtgaaaataagaccagtttcttctgtttgtcctgtttttacttgattaatttctgcgatatcaatttttttaacatgcgatagaaatatcgttgatctatgttgtgtctgtcaatttattgatctgtgatgctgcatttacatgtggtgcacactcatcactacaacgacttctcctatggtattaacatactgtctctctgtttggtcatgatcctggtagttgttttactggctaggtgctcacattagacataaaattttggatttgattatatatatacttcctc

SEQ ID NO: 21581 - DNA, 731 bp, Oryza sativa
  ref <308>: DATABASE ACCESSION NUMBER: AK071852
  ref <309>: DATABASE ENTRY DATE: 2001-12-06
ggcagaggaggccatggcggatcagctcaccgacgaccagatcgccgagttcaaggaggccttcagcctcttcgacaaggacggcgatggttgcatcacaaccaaggagttgggaactgtcatgcgttcactagggcagaacccaacggaagctgagctccaggacatgatcaacgaggttgatgctgatggcaatggaaccattgattttcctgagtttctcaatctgatggctcgcaagatgaaggacactgattcagaggaagaactcaaggaggccttccgggtgtttgacaaggaccaaaatggcttcatctccgctgctgagctccgccatgtgatgacaaatcttggcgagaagctaactgacgaggaggtggatgagatgatccgtgaggctgatgttgatggtgatggtcagataaactatgaggagtttgtgaaggtcatgatggccaagtgagccatggaaccatactctaaggcagaggagattgtgtgttgcatagtcctagttaagatgcaacacttgttttatcaatttccagtgaagcatcctactagctgtagtcgctaaaaaggattttcctgctatgttcctctgaggtgtgttttcagatctcttgtgttttatgtgaaccagtaattcttgtccttggtatgtccagattgcagttgggcctgtatgtagttatatattttttcatcaatttatgctcgagtctagtatc

SEQ ID NO: 21582 - DNA, 1033 bp, Oryza sativa
  ref <308>: DATABASE ACCESSION NUMBER: AK071853
  ref <309>: DATABASE ENTRY DATE: 2001-12-06
ttccccaccacgcacgcaccgcacagacgcaagctcacctcagctcagctcacaattcggctgtatccaagatcgccatgggcttcccggtgggctactcggagctgctcctcccgaggctgctgctccaggtgctcctcctcctcggccacctccatcgctttctcctctgggccttccacgcagtcggcctcggcgacctcatcgacaacccgcccggcctggcggccacggagcaggacctgatgctgcaggggcgcggcggcgggatggcggagggttgggcgtcgtcgtcggcgctccagcaccgccggcccgagttcagggcgattccgccgatggccatcgaggaggccctccccgtggtgcggttcgacgagctggtggcgtccgccccggcggcggtgtgcggtggcggcgactgcgcggtctgcctcagcggcatctgcgggcgcgacgaggtgcggcggctgtccaactgccgccacgttttccaccgcggctgcctcgaccgctggatggcccacgagcagcgcacctgcccgctctgccgcgcgccgctcatccccgacgagctcttgcccgccgcctccggcctgcctgacccctccgactacgacctctcgtactacccatccccgctgccgctggcgcccaccccgacgctgctgcgaccacacgagctgctgctcaacggcttgggcggtttccagtgagcccgccaatccaccgccccggtcaatttcgttgcaaccggcatgacagagctgcctcaactacggcacacgggcacataggcgtcctgatttgtacataggcgccaaggagaactccccccaaaaaaacacaagtaggaatagtttgctgctatataggtcgattccaccttccaagcctgcgaagttgtgaatccttttttttttgcagattactagtagtatattaaatttgttgaagcagagcagtgccacagtttggtgcttgctaatttggcaagccgtttaatccaatctccccacgctattcaaatctt

SEQ ID NO: 21583 - DNA, 1260 bp, Oryza sativa
  ref <308>: DATABASE ACCESSION NUMBER: AK071854
  ref <309>: DATABASE ENTRY DATE: 2001-12-06
ggtttcctgcaaacaaaaaaaaatccctatccatttttatctgttagcgcacttgttctctgaataagtttagctgctcaccttactacttggtgtagttcttaacatatctgaaccaaacatggagcagcaacctcagaagaagatggttgtgtccaagaagatcatgaaggttgggccatggggcggcaccggagggagcccctgggacgacggcggtcacaccggcgttcgtagcatcaccctgtcgtacgaccggtgcatcgactccatcgccgtcgagtatgaccggaacggcgtcgccgtcgccggcgagcggcacggcggcgccggcggcaaccagaccacccaggtgcacacccaataccatctgcaccttgtaatgttcttggcacagccatagctgagggcctgtttagatccctggcaaaaattttcaacatatcacatcaaatatttaaacacatgtatgaagtattaaatataaacgaaaaaaataactaattatacaaatttcgtgtaaattgcgagacgaatcttttaaccctaattgtttcattattagataatgtggtgctacaataaatatttactaattacggattaattaggcttaataaattcgtctcgcggtttacaaacgaaatctgtaatttgctttattattattatacgtttaatacttcaaatgtgtatccgtatatccgatgagacatgcaaaaattttacatccatgtatctaaataccccctgagtctgtttggctgggacgtagatcaagctgggcttcccggaggagtacctgacggcggtgagcgggcactacgcggcggtggcgcagggcggcgcgccggcggtgataaggtggctggcgttcaggaccaaccggagggagtacgggccgttaggcggcggcgcggcggagggcacgccgttcgcgttcccggtggacggcggcgccatcgtcgggttctgggggaggagcggccggcagctcgacgccgtcggcctgcacgtcgcgccgctgcggccggagaccatgtacgagaaggcgcacaagctcgggctcatggcgtaccgctcggtccggcaacgcttcgggcctcagcagcagcagcaggtgcaagtgcaacatcacaacagctttgcactctcacagagtggcagaactttctagagcttccgcttgtcagaaactcacaatgcaaaatcatctccctcacgggttcacattctctaccataataacattatcattgc

SEQ ID NO: 21584 - DNA, 773 bp, Oryza sativa
  ref <308>: DATABASE ACCESSION NUMBER: AK071855
  ref <309>: DATABASE ENTRY DATE: 2001-12-06
gaattatagcactgcctctcctccaagctagcagctcagctaagctccattactacccagcttctcctcatccctctcaagatcaagaactcatcaagaagcctgcgacctcaccggaatcaaatcgtcagtggcggcgtggtcgctgtgacgatggagaagtgcaggtcggtgccgcacgagcactcggcggcgtactacggctgcggcggcgggtacgactacgaggacgtgagcggaggcggcggcggcgccgccgcgaagtcgtacagcttcaacgggccaagcgcccgcgatgacccggaggcgaagcggcggcggcgggtggcggcgtacaacgtgttcgcgacgcaggggaggctcaagtccaccgtccggagcagcttcaagtggatcaagtccaagttctccgacatccgctacggtggcctctgaactgatgaacctaccctgcatatatgcatatatacatatatatgataatatatctatctatgtatgtatactgctacatatatgatacagacttgcatgcatgcatagctaaattaagttgaagctgatatgtgcatgtttgaggagctatgatgaactgtgtgtgtgagtgatctactgatcttgagttgccttatgaagttatggtcaactgccagatcggtgctatgtgttttcacttttttttttgggtcttatgagttgagaaagaagagggggaggaatttgaagaacttgcagtggttgtatcctgcttaatttgcaaattaagttgtatc

SEQ ID NO: 21585 - DNA, 1399 bp, Oryza sativa
  ref <308>: DATABASE ACCESSION NUMBER: AK071856
  ref <309>: DATABASE ENTRY DATE: 2001-12-06
ggggaaacactgcactcgacgctgctttgaacgctcaatttttggtccagattggtatttttactgcagtaccgatgataatgggtttcattttggaactggggctactgaaggctattttcagttttattacaatgcaactgcagttctgctcagtgtttttcacattctctcttggaactagaacacattattttgggagaacaatacttcatggtggtgcaaagtatcatgctactggtagaggttttgttgttcgtcacataaaatttgccgaaaattatcggctctattctcgaacccactttgtgaaagcgcttgaagttgctctcctcctcattatctacattgcatatggttatacaaggggcggttcatcttcctttattctattaactatcagtagttggttcctcgtcgtgtcctggctcttcgcaccatacattttcaacccttctggtttcgagtggcaaaagactgttgaggactttgatgactggacaaattggttactttataaaggtggagttggtgtaaagggggaaaacagctgggaatcttggtgggatgaggagcaagcccacatccagacattaagaggacgtatcctagagactatcctaagcctcagatttcttattttccaatatggcattgtttataagctcaaaattgcttcacacaatacatctcttgcggtttatggcttctcatggattgtacttctcgttttggtgctcctatttaagctttttactgcaactccgaagaagtcaaccgccttgccaacttttgttcggtttctacagggcctccttgcgattggaatgattgcaggaattgctctacttattgcattgacaaagtttacaattgctgatctatttgcaagtgcgcttgcttttgtagcaactggatggtgtgttctatgtctggctgtcacatggaagcgcctcgtgaaattcgttgggctctgggactcagtccgtgagattgctcggatgtatgatgccggaatgggtgctctcatctttgtgcccattgtgttcttttcatggttccccttcgtatccaccttccagtcacgtttcctgtttaatcaagctttcagccgtggtctggagatctccctcatcttggcaggaaacaaggcaaatcaggaggcatgaaaagcctaaccacctaaccgcctggatatttttgttgtatattcttggaattgattagtggtacttgatttgaacaacacctttgtacataactgcctgccattttaggagcaaattatgtatccaaactaacagtgccatgccagtttagatgtgagtattcatctcttgtttgtagccgtaacgacctgtaatttgaacattccggtaatttggatgcgacaattcag

SEQ ID NO: 21586 - DNA, 509 bp, Oryza sativa
  ref <308>: DATABASE ACCESSION NUMBER: AK099200
  ref <309>: DATABASE ENTRY DATE: 2002-08-28
ggggagacgcgacgcgaaatcgatcgagagattattggcgagtcgaggagagtgcgcgagagagatggcgatgagatcggcgctgacctcactcccgttgcgcctccgctcccctgctcctgtggcggcggcgtgcggcgggatgcggctgatgagcgacggcaaggggcgcgtgctgagcgaggaggagcgggccaaggagaacgtctacgtccagaagatggagagggagaggatggagaagcgcaagaagaagctcgagaaggagaaggcggaggcagacaagggcaatcccgccgcctccgacaagaatacggaggggggatccaactaggagtgatgtgcttctgtctgaagacggacttgtttcacatgcctatgttggacaccggtgttcatacatgtcctaggatgaaagaataaattctgtaaaacatttgacagagctagattcatctgctctggtttccggtgcttgttcatgattgaatgaggctctattgtgttgg

SEQ ID NO: 21587 - DNA, 1462 bp, Oryza sativa
  ref <308>: DATABASE ACCESSION NUMBER: AK071857
  ref <309>: DATABASE ENTRY DATE: 2001-12-06
ggtctacgaggacgagagaacgaggaggcacgcacgagagctcctcctcccacccaagcacggtggagctcatgttctcggtgcctgttctcaatcctaataaagttggctgacgttgcatcgccggcctggcaaaaaatcagtgcttgtttttgtcttgaagcttccacggttccactaataactcaagttccttctttcctgagaacagcccatttcaggagggatcttagcagagtacgtcaattttattattcaatactgcttgtggatagaattactctgttggcaaggttctttgttttaagtaacaaatgaaggatcatctaatgcttaatgttagcaaccttcccgagtctgttgaggcgaccgaggcagccatgaatctgccttccgggggagtttctctaccaccgttgtctacaactcatacacttttgtcagttcgggaaagcatgggtgctgaggaagagcctcttattcagacagtagaatgtcgtatttgccaagaggaggataacatcagcaaccttgagagtccatgtgcttgcactggaagtctaaagtatgctcatcgggcttgcgtgcagagatggtgcgatgagaaaggagatttgacatgtgaaatttgccatgagccatacaaacacgggtacactgcacttcctagagctcatcctgatgagacaaccattgatataagtggtggttggaccattaccggcacagcatttgatttgcatgatccaaggattattgcaatggcacaaaatcacataatggaagctgactatgatgattattcagtaacaaatgcgagctctgctgccttttgccgctctgctgcgcttattttaatggctctgttagtgttgaggcatgtgttggtactaactgatgaagatgaagacgacgcttcttcaatgtttttgctttttctactacgagtcaccgggtttctgctaccattctacatcatggcttgggcaatcaatatcttacagggccgaaggcggaggcaggtagcggctgctctagctgcaactgaggtggcattcattctacagtcaggacaaagaaggggcatgaatttcaccatcgcaccagattcccctgccacacctcagcatgagcctatcccttgaattaatgttgtcagcatcactcaagttcatgtggcattgtttagctgatgacttgacgaagaatttgttaattgtgattaattgattattcagcacaagatgagatgcaatgtcatctcttatcagatagaatgtattaattcatgtatgttttggtgtgtgtgtgtgtaagaggtgtctgtgatactgaagccccttttttatgtatgtatggtatgggttctgtgttcagtgtcctgcgtataggtagagagcacggagaaacactttcagtaggttcctaatttttgtctcccagaaatccttgattttatttc

SEQ ID NO: 21588 - DNA, 1368 bp, Oryza sativa
  ref <308>: DATABASE ACCESSION NUMBER: AK071858
  ref <309>: DATABASE ENTRY DATE: 2001-12-06
gagttgccttctcggcccatcaggcccagcacccaaaccgctgtgctcccttcgtggcggcgacgccgacgaggcgtacgcgtcttctccgccgccgccgccgccgccgccgtccgtccgtccgtccggtcggccagccggcaacggccacccgtgagcgacatccgcgaccggccagaaccgcttcctttggtagtccgtgcccgacgccaacaagcggaggagatatcccacaatgggcatcagtaagactgaagtgaatctgctgcggttgcttgactcggctccgcggcagcagaaccaggctaaactcattcattatgtcaccacatcgagggaactgttggagaagctggcagcggaaaatacgtcagaagggatatcaagtattgcaaaaggaaggctaaatgagtattcagagaggattgaggaacttgccgcaaggcttgcttctctagtgcctggttacgaaaatgctgttgaagccatcagaaaagaagaaagttaccttgaaggggaacaaattagaagtccaatagccttatcccctggattgaggaggcgattgacagctctgcaagagattgaacaacctaccaatgcaaaagaaagaaatgttgcagaacctcttagattagatgaagcagcccaggcaaacatagagaaatataggaatctgcaagaagatttgactgatgagattgttgaattagcacgccagctgaaggatagcagtcttatgatgaaccagtctgtgcaagcaacagagaagatacttgattcaactgaaagggctgtggcatatagcttggcaggcactgaccgtgcaaatgcacaagctgtggaggtgtcttcgttaacctccaaaacaacttgtttccagtggtttctgctttttgtaatgacctgtatgttcatcatggttgttctacttatacgggtaacctaaggcgtggcattcactgaaacaaatgtgaccagttacagtacattactgctcgaagatagacctccattacaaaatgctgtactgactagtataagtgatagatgctgcgactttctttagtcagctagctagaagctgttaataaatgaatatagcaggcttttggccatgtataaccatgctgaccgagtttgaattcattacctaaaaaaaaatggatatagcaggcaaccgctgatatgattttttttccctcatttttttgatgtgcaatgagttgttcggtgctcatatttttgtaagccgctgatatagcaggcagacgctgatatacttcttaacttccatttgatgtatgatcaatgtatatatactaaattgcaagcatatgtgttgccttcaaacgaaaaatgttttct

SEQ ID NO: 21589 - DNA, 1298 bp, Oryza sativa
  ref <308>: DATABASE ACCESSION NUMBER: AK071859
  ref <309>: DATABASE ENTRY DATE: 2001-12-06
gatcctgcaccaaaccaaacccccgcgacccacacccaaacccgccaccgattccgagcgcgccgcggcgagcgagcgggagagaggggggtcgcaagcgcagcttcctccccggccatggatctcctgcacggggagagcgtccagaccacggtggccatcgccgtcgccgtcgtcgcggtcgccgcgggcggcgccttcctcctcctccggtccaggaagcccaagggctgtttggatcctgagaacttcaagaagtttaaacttgtggaaaagaagcaaataagtcataacgtggccagattcaaatttgctcttccaactccaacctctgtattgggccttccaattggtcagcatatcagttgcagaggacaagatgctacaggcgaagaagtaatcaaaccttatacccctactacattggattctgatctagggcattttgagcttgttattaagatgtaccctcaaggaagaatgtcacaccatttccgtgaaatgaaagttggtgattatatgtctgtgaagggacctaagggtcgtttcagataccaagttgggcaagtgagagcttttggaatgctagctggtggatcaggcatcactcccatgttccaagttgcaagggcaattcttgagaaccctaatgatatcacaaaagttcatttagtctatgcaaatgtcacgcatgacgacattcttctgaaggaagaactggacaacatggccaaaacctaccctgatcgctttaagatctactatgtcttgaatcagcctcctgaagtctggaacggtggcgttgggtttgtgtcacaggacatgattaaagctcatttgccagcacctgccgaggacattcaaatcttgaggtgtggtcctcctccgatgaacaaggcaatggctgcgcaccttgatgagctcgggtacaccaaggagatgcagttccagttctaagctctcctaatggcggagtaccagaataatggaccccatggcctacgctgtcttacgctctcttgtgtcatggagacgtcgtctgacctcttttgttagttgatagcaatacatgattagtcgtgacccaacaattcatgtatcactccatttttatgggcaaatgttatctgcaattggcagaagccctgtgactgccatctggtttacaaactgaacattggatgctgcaccgcggggaaactattcaatccctcgaggggatgttctctcgtttgctcaaaaaccatctaaacggttatgaaaaattctgaaaaaatttgacaacattcatacaacat

SEQ ID NO: 21590 - DNA, 1644 bp, Oryza sativa
  ref <308>: DATABASE ACCESSION NUMBER: AK071860
  ref <309>: DATABASE ENTRY DATE: 2001-12-06
gagggcggagcgagaagaagctagacacgagaggcggggcacggtaggcggcttcccgaagaaatctcctcctcctcctccggtcgccgttcgactccgatcccgaccagtcgccgccgcctccctcctcagcttggatcaaggaaaccaccccttcgattcattgattgatcgattgattgattggctaggcctctccaacaattttggttcccggaccgaggttaattcttgagcgctaggtgggggcgaggcgtcggatccagccatgatggtggttgatacggtcagcgccagcacctccctcgttgcccaccacctgttcgaccaaaggtccaaggcaaaccaccacctccgccggactctccatgtcgtctcctgccgccccctgcccactcacttcgccggtcgccgccttgtggccagggcgcccaggcagcatcaacctcgcctcgcggactggaccgtcaaggcgctcgccatgggggtcaccaaggaggccagccctcacagggagtaccgggggatcccgggggaaggcgctgacatgggcgatattgggatcaccaatcccaaaacgacgtggcctccacggaacagggccgatgatcccaagctgcacaacccgctgctccggcttgagcgcatgggctgtggttggctcggagtgatctttgagtgggaaggcgtgattgttgaggatgacgctgaattggaaaggcaggcatggtttaccctcgcgcaagaagagggcaagtctccacccctggcgtttgtattgaagaggattgaaggaatgaaaagcgagcaagcgatatctgaggttctctgctggtctcgggacccatctgagttaaggagattgtcctcacggaaagaggagatacgctgcaacctacgtggaactgccttttatcaaatgaggaatggttcgagggagtttatgagcacgcttgccaactataagatccctcttgccgtggccaccacgcggccaaggaaggttatcgaagaagcaattgacgctgttggcgtgcgaagcttctttgatgcagttgtggcagcagaggatgtgtaccgggggaagcctgaccctgaaatgtttctctatgcagcgcagctcctgagtttcatccctgagaggtgcatcgtttttggtaactccaattcagcagtggaggctgcacatgatgccagaatgaagtgtgtggctgttgcaagcaagcacccgatctacgagcttaatgccgcggaccttgtggtgaagcagcttgatgagctctctgtggttgacctgaagaaccttgctgacattgagtctccagagtttggcatggagcctgagccagagatggaggaggaggaggacgaagattcgtccccgtcaacttcagttggtgtagatgatttgttctggtaaggaagccagattgtaaatttgattgattccgctcctgcacatgtgtacgattgtcagtcaatagcaatgatcaggaagggccatatattccttctaatcaatccgtccgtagactgtgatatgtaaatgtttctttagaacttacactgtatatacactgtacctcacagataagggggaactgtctgaatacttgatggaatataaaccaaactgcagttcct

SEQ ID NO: 21591 - DNA, 2123 bp, Oryza sativa
  ref <308>: DATABASE ACCESSION NUMBER: AK071861
  ref <309>: DATABASE ENTRY DATE: 2001-12-06
gattgaccaggccatggaggcatgcagagagagaagctctctctcactcactcgctcgccacacaccatcacccatgcgcgctaattaacctcttttagcaactggatctcgatcgccgatcaagcctggccattgcgcgcggctacgacgacgaggaggtcgccatggtgggaggaggaggaggagccggagagaagccgccggcgtccaatggcgtgcacggttccggcaaggccaggttcacccttctctacggcctcctcctctacgtcgtcatgccggtgctcttcctgtacatgctcgtcgccgccgccaccccgttctacaacccccgctgctcgccggagtccaacgccgccatggcacgcttcgtcgtggccatgcccaacgcctcgtcggtgaacggctcttcaccgtcgtcttcgtccccgcctccgacgccggtgaggccgatgcggtccgcggacgaggcgccgacggggctgcggcacatcgcgttcggcatcggcgcgtcgtcggcgctgtggaagagccggaaggagtacatcaagctgtggtggcggccggggcggatgcgcgggttcgtgtggatggacaggccggtggaggagttctactccaagagctcccgcacggggctcccgccgatcatggtcagctccgacacgtccaagttcccctacacccacggcgccgggagccggtcggcgctgcggatctcccgcatcgtctccgagacgttccggctcggcctccccggcgtccggtggttcgtcatgggcgacgacgacacggtgttcctcccggagaacctggtgcacgtgctctcgcagtacgaccaccggcagccgtactacatcgggtcgccgtcggagagccacatccagaacctcatcttctcctacggcatggcgttcggcggcgggggcttcgccatcagccgcgcgctcgccgaggagctcgccaagatgcaggacggttgcctccaccgctacccggcgctgtacggcagcgacgaccgcatccacgcgtgcatgtcggagctcggcgtgccgctcacgcgccacccgggtttccaccagtgcgacctgtggggcgacgtgctcggcctcctcggcgcccacccggtggcgccgctggtgacgctccaccacctcgacttcctcgagccggtgttcccgacgaccccgtcgcgcgccggcgcgctgcgcaagctgttcgacgggccggtgcggctggactcggcggcggtggcgcagcagtcggtgtgctacgaccgggagcaccactggacggtgtcggtgtcgtgggggttcgccgtgatggtggtgcgcggcgtgctgtcgccgcgggagatggagacgccgatgcgctccttcctcaactggtacaagcgcgccgactacacggcctactcgttcaacacgcggcccgtggcgaggcagccgtgccagaagcctcgcgtctactacatgcgcgactcccggatggaccgccgccgcaacgtcaccgtcacggagtacgaccgccaccgcggcaagcagcccgactgccggtggcgcatccccgaccccgccgccctcgtcgaccacatcgtcgtcctcaagaaacccgaccccgacctctggaaaaggtcgccgaggaggaattgctgccaggtggtgtcgtcgccgacgaaggcagggaaaaaccggacgatgaccatcgaggtcggcgtgtgcagggaaggcgagttcgccaagctttaattagtagcgggattaattaggagaggagaagagggattagcggcggcagaagaggtcccgggcaaaagagaggatggagattaacgaccagaagttaatccactgggaccgagtaatagctcattagcattagatcgccacacggcgatgtgttgtttaattagcgcggcgggtgtaagcatgcacgccgggactattttgatctcttcactagttcacttacatattgaaccaactcacccacgaaccggggctttttttttgccttttcctctgctgagcagagcaggagaggaaacagccggagtttcacaaatcttgtgtggtgtcagaacgattcaacaatggcaatacaaaacactcatagttctttc

SEQ ID NO: 21592 - DNA, 1292 bp, Oryza sativa
  ref <308>: DATABASE ACCESSION NUMBER: AK099201
  ref <309>: DATABASE ENTRY DATE: 2002-08-28
gagcgaaccactcccaaaacgccaccaaaaccctcctctccccacctccgccgccgccgacatggccgtcgtccaccgcctcctccgccgcggcctctccgccgcctctcccctcccctctcttcaggagctcgggaggcgtccggcgagctcgtcggcggcggcggcgggggacgcggcggctgagctgcggggcgcgcgggaggacgtcaagcagctgctcaagtccacctcctgccatcccatcctggttcggttagggtggcatgatgctggtacttatgacaagaacattactgaatggccaaagtgtggtggtgccaatggtagcttgagattcgaaattgagttaaaacatgcggctaatgcaggtcttgtgaatgctttgaagctgatccagcccatcaaagacaagcatgcaggtgtcacttatgcagatctgtttcagctcgccagtgctacagccattgaggaagccggtggccccaagatccccatgatctatggaagggttgatgttgctgcccctgaacaatgcccgccagaggggagacttcctgctgctggccctccttcacctgcggaacatctacgagaagtattctatagaatgggcctgagtgacaaggaaattgttgcattgtcaggagctcatacacttggacgatctagaccagagcgcagtggatggggcaaaccagaaactaaatacactaaaaacggacctggtgcacctggagggcaatcttggacatcacagtggctgaagtttgataatagctacttcaaggacatcaaagaacgccgagatgaggaccttctagttctgcctactgatgctgtgctctttgaggactcatcattcaagatctatgctgaaaagtacgccgcagatcaggatgcattttttgaagactatgctgaagctcatgccaaactgagcaatctcggagcaaagtttgatcctccaaagggtatttcactggaataagtggcgtctgctgccgatgagctgcattttggcgaatgaacaagacgataccctgtttcttcttgctactatagagcatattatggttttattaccgatccagaaatttaatccattgatcggcaaatgtgatgttggtgttttgtattgagttgtgctctccattagaaataaaaatagcggtggccattttcgtttccaggaccaaacattttggcacattacaatacaatgttttagatgatgtctgcattgagctcttacacaggatgatcaaaatatatgacataatttattactg

SEQ ID NO: 21593 - DNA, 1162 bp, Oryza sativa
  ref <308>: DATABASE ACCESSION NUMBER: AK071862
  ref <309>: DATABASE ENTRY DATE: 2001-12-06
ggccattctctagggtttattccacgcctcccgtcgccgccgccgccgccgtcgttgtcctcgcccgcgcgcgaggagaacgctaaactccggtcaagatggcgaggggtttgaagaagcatctgaagaggctcaatgcccccagccattggatgtttgacaagcttggtggagcatttgcacccaagccttcttctggtccccacaaagctcgggagtgcttgcctttgatccttatcctcaggaacaggttgaagtatgctctgacctaccgtgaggttatttccatcttgatgcagcggcatgttatggttgatggaaaggtcaggactgacaagacttatccggctggattcatggacgttgtgtcaattgcaaagactggggagaatttccgccttctgtatgacaccaagggtcgcttccgtctccacagcatcaaggatgaggacgctaagttcaagctctgcaaggtccggtctgtacagtttggacagaagggtattcctttcctgaacaccaacgacgggcgcacgatccgctacccagacccactcatcaaggccaacgacaccatcaagattgacttggagaccaacaagatcgtggacttcatcaagtttgatgttggaaacatcgtgatggtgaccggtgggaggaacacggggcgcgtcggggtgatcaagagcagggagaagcacaagggcagctttgagaccatccatgtcgaggatgccctcggccaccagttcgcgactcgcatgggcaacgtcttcaccatcggcaaggagaggaagccgtgggtatctctccccaagggcaagggcatcaagctcagcatcattgaggaggcgaggaagcgcaatgccgaggctgccgctgaggcttgatttctgaaaatctccatgaatgaaactgttgatttgagcagtctatttatatagattatttagctcttaagatcatatgtccattggagaccgtcaattggcgcttcattgttcgatacttgtcgagctgttttgaaactatgaattcatcatctgttaccttcagcataatagatccagaatccttttttagcttgtgtaatctttcccaaatgagaagctaccttgcatactgaaatgaattccacatgatgtttggatttgcaagttcg

SEQ ID NO: 21594 - DNA, 1238 bp, Oryza sativa
  ref <308>: DATABASE ACCESSION NUMBER: AK071863
  ref <309>: DATABASE ENTRY DATE: 2001-12-06
ggacctcaccgtctcaccgccgcatcccgctcgccggtcaccggctagacgccgccgtcgcgcgggctcctgggttgccgtgtctccatcgcttccttgttggcctgttcctgcgagcttcgccctctggcttcctccctgttcgggatccgggatcgcgtgtctgcctctcggctcgctgcgccgccgccgccgccggctcgtcccgtctgtgtgtgtgtttgtgcagttgaaattggagtaaatatacaatgaggctgttgaaagcggatcagttgttcaggaaagtcattgacggcgggtggagaaagcaatctcgactgcttgggcttgacgttggtagtaagtatgttgggctggctgtttccgacgacaaaaataggatcgcattgcctctaagtgtattgagcaggacaaagacaaacatcagcttgatggcggatgatttcgtaactttggtctcaaaatactcccttgcaggctttgttgtcggctatccgttcaacttgcagggtcaatctagtccaaatgcattacaagtaaggcttcttgttggagagctctgtaaaactgggaaacttgatgatatgagttacacctattgggatgaaaattttacctcgaagtgtgtagaagcccttttacatcctctgaaactacatgacccagttgaaaccaaaacaatgacagataaatttgctgcggtttgcatactccagcgctacctagataatatgaacagagaattgagatctgcagataattctggaaaacagggtgacacctgagttccacaatgcatatattattctgttcggtgcacactaaaccaaagacaacggaatcagcatctgttcggtgtactgctgccttagtgtactgctgccttatgaaaaaggctgtgcagttcattgagacatgtacaaaaccctgagtttatgctctcgtatacgcctgataagttttgtagatgcagacttgcagagctgacaattcgtcagctagcaagggcagcttccctgcctgcctgctagaggcaatttgttgtaggtgatgcacaagtactaggaatcttttcccccttcctttattttcttgcttatgaggccattggcaccgaaatgcctgcttatgcgcagcttgaacaatctcttccaatatgattgccgagcatgcgcgtgtgtatatgagcctctattgtgtttcgggaaaaaaaatgattgccgagccaagaagat

SEQ ID NO: 21595 - DNA, 1780 bp, Oryza sativa
  ref <308>: DATABASE ACCESSION NUMBER: AK071864
  ref <309>: DATABASE ENTRY DATE: 2001-12-06
gaagctaaactgccaagtaattaaacctaatcaatcatcaagccatatatacatcctctatctatcgatcgatgatggagataaactcagaagccaccgtcaccctcgtctccgtcgtcaccctgcccattcttctcgcgttgctgacccgcaagtcgtcgtcaaagaagagacggcctccggggccatggaacctccccttggtcggcggcctcctccacctcctccggtcgcaaccgcaggtcgcactccgcgacctcgccggcaagtacggcccggtgatgttcctgcggacggggcaggtggacaccgtcgtgatctcctcgccggcggcggcgcaggaggtgctccgcgacaaggacgtcaccttcgcgtcgcggccgagcctcctcgtctcggagatcttctgctacggcaacctcgacatcggcttcgcgccctacggcgcctactggcggatgctgcgcaagctctgcacggtggagctcctcagcaccaagatggtgcggcagctcgcgccgatcagggacggcgagacgctggcccttgtcaggaacatcgaggccgccgccggcggcaagaagccgttcaccctcgccacgctgctcatctcgtgcacgaacacgttcaccgcgaaggcggcgttcgggcaggcgtgcggcggcgagctccaggagcagttcttgacggctctggacgaagcgctcaagttcagcaatgggttctgcttcggcgacctcttcccgtcgctgcggttcatcgacgccatgaccgggctgaggagccgcctggagcgactgcgcttgcagctggacaccgtcttcgacaagatcgtcgctcagtgcgagtcgaatccgggtgattcccttgtcaacgtcctgctcaggatcaaggaccagggcgagcttgacttcccctttagctcaacacacgtcaaggcaattatactggatatgttcacgggagggacagagacgacatcatctaccaccgagtggctcatgtcggagttgatgaggaacccagaggtgatggccaaggtgcaggctgaggtgcgaggagtattcgacaacaagagcccacaagaccacgagggcctgcttgaaaacctatcatacatgaagttggtgatcaaggagaccctgaggctgaatccggtgttgccgctgctactcccccatttatgtcgggagacctgcgaaatcggagggtatgagattgtggagggcaccagagtgttgatcaattcgtgggcgatggcgaggagccccgagtattgggacgatgcggagaagttcataccagagaggtttgaggatggcacagcggacttcaaaggctcccgttttgagtacttgccatttgggaccgggagaaggaggtgccctggtgatatatttgcaatggccacgctggaactcatcgtggcgcgccttctatactacttcgactggagcctcccggatgggatgcagccaggtgatatcgacatggagctcgtcgttggtgcaacggcgaggagaaagaatcatctccagctagtggcatcaccatataagccgatttccatgcaaagttgatggatgtgtgtgactgtgtgtcggtgtacttgcggttcgcttacgtgcttgcatacctcttaataagttttgtttgtcctggggaaatggacaaacaaattaataatactagttgataccccgtgctttgccgtgggatgtgtggatgaatgcattttatatatgatataaatgatagatgtacaagtttaaataatgtg

SEQ ID NO: 21596 - DNA, 1449 bp, Oryza sativa
  ref <308>: DATABASE ACCESSION NUMBER: AK071865
  ref <309>: DATABASE ENTRY DATE: 2001-12-06
cagactgctcgctctcgttttccccatccgcaccggctgctcctcgtcgcgccgacgcctccgcgcgccagcgaatcgccgcctcgagaggcccctcgtcgccgatcaggggcgtggcctcgtcgagtttttttgttcctcggaggggcggcaaggaggcggatttggagcaattcgtaagactagtggtggtggtggtggtggtggctggttggcgccatgagcttcgtgttccgggggagcagaggtgacatcgaggccggaggcttcccggggttcgccccggagcgccgcgccatggtgagcgtttctgcttaaatcggattcatgcgggtggtcggccggtgaacagcaacctggcttttcttgtcactgttcttatgttgttcatggtactgaactcacaccagatgtctccgaactttttggtttggctggttttgggtgtgttcctaatggccaccagcctaaggatgtacgccacatgccagcagctccaagcgcaggcgcaagctcacgctgcagctgccaacggcttccttggacacactgagctgcgggtgcatgtcccgccgaccatagctctcgccacacgaggccgtttgcagagccttaggctccaacttgcgctacttgaccgcgagttcgatgatttagattatgatgcccttagggccttggatgcagacaatagccctcatgctccttcgatgagtgaagaagaaataaatgctcttcctgtattcaaatacaaggttcaggcacatcagggaagtgcctctttccaaaaaagtgatggaccatctcaaccatctgtttcttctactgaatctggcaatgagaaaaagcaggatcgtttcaaggctgatgcaactgacaacaccctggaggatgagttgacatgcagtgtttgcttagaacaagtcgttgtgggtgatctattgagaagcctaccatgcctgcaccagtttcatgcaaactgcatcgatccatggttgcgccaacagggaacatgcccagtttgcaagcaccgtgtaagcgatgggtggcatggtgaagcagatgcttctaacatggtataagctgctgggagtggccagcaggtcttaagctaaaactactgacttaacccacggaatgaggattagctgtttagtcttgaggagtgtttttgtacataaaaaaacgttcacttctctgtgatgtttatgcatcaaaaggttgtgatatttttggttgacctgtaccctgttcagtatgaactcacatacaatcctttttactctgtttccgtggggaaattggcgtattatgggtgtttaaggctgaagatcagtagaggatttaagatccaagagtagtggtctggtctctattagtcttaagtaaaaatgatcttaactgttagtattatcacaagtaaaaaggagaaactgatttatgagttct

SEQ ID NO: 21597 - DNA, 1773 bp, Oryza sativa
  ref <308>: DATABASE ACCESSION NUMBER: AK071866
  ref <309>: DATABASE ENTRY DATE: 2001-12-06
gatcgctacttttatatacttataacaatactctctcttttacttgacattttgacttctcgtagtcaccactcaccaatatacagctgtaatcattctcttttgcaatttttaatttttaatgtatatatttcatacatctattctgtacattttttgctatcttgatgatcaacatttggaaagtttgatggcatgtattctattctaggtgacaagtaaaaaggaacagatggagtaagtacttttagaaaaatctagtagagtagtttccatattatccaatatgggtattatagtttccattaataccacctccatttttaaacatatgacactgttggcttttggacatacgaccatccatcttatcaaaaggatatgtatcacttatttttttgtgacttgtttttatcattaaagatactttaagcatgactacatttttgcataaaattttttaataagacaaatggtcaaatgtatgtccaaaaatcaatagcttcgtatatttaaaaatggagagtattaatggtcaagtttttactacatggacatgaaattttaaaaaaaaaggaaggaaatgctcattttgtttgtttttttacacgtgcatatgtggatacatgcactatcaccaacgtaatgatgcacgtttaaattcaaatcttctgttcattatcatgtcgtgcacaaatcatgaagcacgttggactgataggatagtgcatatgcagagattcatttctctttcacataactataaccttctgttaatacaaatcagtttattccttttaatattttcgttttttttttgttgcaagctttaatgaccatttgtcgatcttcattttctaacgtacttagaagtaacagtaaagcataagtgatttacccaaaaaatttctgtttcatttccagagtttggacaagacaatccatagtgaaaacaagattgccacagcacgtcgagcaaaagcaggcttactgccacaaagagctttacagggtcaccattcactccatatcctagcagcaagatatgaactgttaagtatgggtagctatggatggatccagacacagcaaggatctgaagtactttcagcgttttcatgtacaatgttctcagctatacagcaatgtattgcagaattcaggcatcgatattttgggatatggactggttttagcaatggtatgaacaaaaataccctagctaagagtttgcagttcacgtggacagccatggctttgcactcccagtggactgaagacttcatgatctttaacagtaagccgtcttaagaacatgaagagttttagcaagcacgttttaaaagcacaaccaagaaatctggttcgagtatagtgtacataatattttgcatgtacttgtgattttagaagattcctaccatgaccatgttgcattgatgtaaagataggtgttcgacatgcaattctggaagtgggattctagttctaaagtgggcaagtatcacagtatttttttcctctatgcacacctcaaatatagctatattttcgcgtgaaaaagggtctggcgatattcaaaagcaaaattggaaatttatagcttgtagaatacatgaactcttgctttctttccttgtgttttattcagatacagattggtctgaaatcttcaagtatatatatagccttacagcgtgacacgttgatgatgtgccccgtgctgttaacattgtaattttttttataaaaaagaaaatcttatcatcgttc

SEQ ID NO: 21598 - DNA, 862 bp, Oryza sativa
  ref <308>: DATABASE ACCESSION NUMBER: AK071867
  ref <309>: DATABASE ENTRY DATE: 2001-12-06
gaaagctaagcccccccacaagaattggataagctcgattgacgattgccatggttgatctgatccacgagacggacgacgcgatggccgaggcggagctgctgctggagcgcagccgggcgatcaccctgaacggccgagacaagcgaggccgcgccctcgtcaggatcgtcggcaagtacttccccgcgcgcgcgctgggcgggcgggcggaggcggcgttgagggggtacgtgcggaggcgcgtgctcccggagatcggggagcgggagttcgtggtcgtgtacgtccactccctcgtcgaccgcggcgacaacttccccggcgtcgcagcgatccgcgcggcgtacgaggcgctgcctgccgcggccaaggagcggctgcgcgcggtgtacttcgtgcacccgggattccaggcccgcctcttcttcgccaccttggggcgattcctcttcagctccgggctgtacgagaagctgaggtacatgagcaggctcgagtacctgtgggagcacgtgagcaagggggagatggaggtcccggaatgcgcgcgccggcatgacgaggagctcgagcgccgcccgctcatggactacggcatcgaggctactgaccgccggtgcatgttcgacgccgcgtccatggacacctcggcgtccctgcactcgctccggtgcatctcgtaatcgtggtggccgctcgactgtagcatccgtagctggcctcgccccggtcctatattcgtagctagcgaaggcactgccgcactgtcgtagtttgcaggccctgttgttcttcgttccatctgtacaaaatagtagtatttgtggaagtaaaagagataataaagagaaacagtttg

SEQ ID NO: 21599 - DNA, 905 bp, Oryza sativa
  ref <308>: DATABASE ACCESSION NUMBER: AK071868
  ref <309>: DATABASE ENTRY DATE: 2001-12-06
ggccttgaccctctctctcccttcttcttccgccacctccctctctctcccttcttccgagcacctcccacaccaaagccgccgggcgctagctcttatgagccctccttcccgttgcaagcccagctagatgcgtctccgaccgccggccgtcgttcttcttgggcctcctgtgatccctccttcccctctggctcgatccggcgagcagtcgtcatatgtctcgtcctcgagcaccggtgtggctgcaggcatgacgaggaagggcaagatctggccgccgctgcagtcgtcctcgtggttagggggcaccagatccggcctctccgaggtcgggggtaaccagatccgggtcctgctcctcctgcttcaccgagtagccacctccaagagctagccgcctccatccccgagaggcaactgccacagcgtccgcctcctcctttgagcattggtcctcgccgcatcctccatcttcgagcagccgacgccttcaccatcgagtactacgtgtcaatgcctcccccgtcatgcattggatgggtattgatctatgtgtttgtagtcttgtgatttgattttagaccttgcaagttatcggtaccaagttttcgattggggtgtgtcattcttgtttccgcatgatgtgttgccactgggaattaattgaaggaagggttggatgactgatgctagaaaagttgcgctctttggtgttttgtttttcttgaaggtggtgaactgcaagtgtttagagtttcgttgtctttggtgatgttgctagaaaattggaatctgaacattgcagttctcaagtagttttgcgctagtttgtttttatgttccttgtaacatcaacgttgtaagttcttggattagaaatgtagtctaaaatgttttggatt

SEQ ID NO: 21600 - DNA, 1455 bp, Oryza sativa
  ref <308>: DATABASE ACCESSION NUMBER: AK099202
  ref <309>: DATABASE ENTRY DATE: 2002-08-28
gacgccacctcccctcccctcccctcccatggcaacgccaccaccgccaccgccttcgcctcgtcgcctccgccgctagccgttacccccccaccaccggcgccccctcaccttctccccaatgtcgacggcggcgcccgcatccgctacggcggctgcgagcctcttcctccgccggagtctctcctcctcctcccctcgccacgtcttcctgcctcattgggttgcccccattgtcgtcgcgcgccccgctaggttatctgcggtgccggcgaagcgcggtggaggtggtgttgttgcggctgcatcggcggcggcggggagcgcgcagtttggcgccggggacagtgagaatccatacgagattttggggatcagtccacttgatgggttcgaccaggtgaagatggcctataagcggaggcgaaaggatgccgagagcaacaaagatgccgagcacctgttcaagttagagagggcatacgatatggtcatgatggagcagcttcagaaccggaagaatggggtggcatatggatcaatccaggtgtcaaaggacattaaatatgctgataatcaaccagtggttccttgggggcctagatactcaagatccactgggaaggacctgcgcattaatatggcaatatcagcaacatttatcatgtatatatctaccatgggccatgcagactggaagcccatgcagtttttgtgttttgcctatttctatcgaatacttgacaaactgaaggctaccgagtcagctagcactcctatatacaatgagtatggtgaggttgaaggtcgtggcatacacatggcaaaacgagtactccgtagtttgggtttggtacttggatcaatacttgctgtatccctgggctacactgggctagccaatttttctcagtttcttgggcagtatattccatctgttgtttataacttccaggaattgattgtgactacagcttcatctgttttgctttgcatattggcgtcgtactatcgatagcaacttgtgtaattgtgttggatcaccccttggcattgcaatcttgataaacctgtcttcatgagggccatggtcgataacttgagcctattctgctatggaatatgagagcccatcaactatataagtgcactgttcttgcatgttttacatcgttcttacatctggaaaattttgcagctactgataagatgttctatccaatgttttgaaactgaaatttagcatgcaagagacagacagctaacaaagcaatgtgtcacatgaaacctgacgatgctgaaaatctagttctagtgagttgttccagcaaaaagttaactgcaattttcctagaagtttccttgagtttgcaatctgcttgcaagttccttgtatatttactgaacaattactctgtgttggtgagttatgaattacaacgtccttatggaatc

SEQ ID NO: 21601 - DNA, 1807 bp, Oryza sativa
  ref <308>: DATABASE ACCESSION NUMBER: AK071869
  ref <309>: DATABASE ENTRY DATE: 2001-12-06
ggccttgccggccggggaaaatatctgaaacgacggtacgcgagcgcccacgggggccacggctgtgcgcgcctgtgccggtggcccggtgctggatctcaccgggcgcgcgcgtggctgcgtactgtgccgcgcgcggagtcacccatgcacgccgtgaactggtcgaatgagatggatcacgttcacgtgcaggcaggcaggacgccggaaagggatcgggagcgcgaaagtgagctgtgtctaagctcggtttctcgttagaaatgcgcgaataattcggtccattagctaagctagctggctgctgctgcttccgctgtggtgtggcctatgactggatggcgacccgtgccgtgtcgtactcgtgctcgtgatcgcgtcgttgtctctcgcgcgggatggacacgactgatctactggtctctgcaacgttttaacggtcgacgttcaccatgcatggcctgggtgttcgtctgttgggtatggagaagcggaggagctcggtccattcttggtgcagaagggcaagccggagctaaaatggaacaagtactcgtggaacaaagaggccaatctgatgttcctggagtcccctgtgggtgtcggcttctcatacactaacacaagctccgatctgcagcagcttggcgacaagatcaccgctgatgatgcttacatcttcctgctcaactggttcaagcgcttccctcagtacaaatctcacgacttctacatcgctggagagagctacgctgggcattacgttccacagctttcggagaagattttcgacggcaacaagcaaggccccaaggagaactacatcaacttcaagggtttcatgatagggaatgccctgatggacgacgagacggaccagacgggcatgatcgactacgcctgggaccacgccgtcatctcggaccgggtgtacgccgacgtcaagaagtactgcaacttcagcatggagaacgtgaccgacgcgtgcgacagcgcgctcaccgagtacttcgccgtgtaccgcctcatcgacatgtacagcctctacacccccgtctgcaccgaggtctcgtcgtcggcggcgttcggccagcgccaggtcgccgtccacggcgccgccccaaaaatcttctccaaataccatgggtggtacatgaggccggcggggtacgatccgtgcacgtcggatcacgccgaggtgtacttcaaccgggctgacgtgcaggaggcgctgcacgccaacgtgaccaatatcggctacaactggacgcactgcagcgacgtgatcggcaagtggagagatgctcccttctcgactctccccatcatccgtaagctcgtcgccggcggcatcagggtctgggttttcagcggtgacaccgatggaaggatccccgtgacgtcgacgaggctcaccctgaacaagcttgggctgaagacggtgcaggagtggacgccgtggtacgaccatcagcaggttgggggatggacgatcctctacgagggcctgacgttcgtgacgatccgcggcgccgggcacgaggttcccctgcacgcgccgaggcaggcgctcagcctcttcagccacttcttggctgacaagaagatgcctccgacggcgttcccctagtcgctcgcatgcagtctgccttcttcaacgatggcgaggaacgggcgtcgtgcgcccactaggttgttttccagcgataccaactgatcaggaaattttcttttctttggtccaagactccaagtcatgtaacacagtggaaattcgattggaacaatcgataacaataaaacc

SEQ ID NO: 21602 - DNA, 1002 bp, Oryza sativa
  ref <308>: DATABASE ACCESSION NUMBER: AK071870
  ref <309>: DATABASE ENTRY DATE: 2001-12-06
gttattccagatgctataggaggacttgatcatcttgaagagcttcgtcttgcttccaatgccttgatttctcttcctgattccattggactgctattgaatttgaggattctgaatgtgggaagcaacaggctaaggtcattgccagatagcatctcaaagtgcaggtcattaattgagcttgatgcgagctacaacgggctcgcttatctgccaaccaacattgggtatgagctggtaaatctgcggaaactctgggtccatatgaacaagttgcggtcacttccatcatctatctgcgagatgagatcattgtacctcctggatgcacatttcaatgaactatgtggtctgccatctgccatagggaaactttcaagtcttgaaattctgaacctgagcagcaactttagtgacctgaaggatctccctgcttctttcggtgacctgctgaatctgcgcgagcttgacctcagcaacaaccagatccatgctcttcccgacaattttggtcggctggataagctagagaagctcaacctggagcaaaatcccctttctatgccgccaatggagatcgtgaacaaaggcgtggacgcggtgaaagaatacatgttgcagaggtggcttgacatcttgctcgaggaagaacggaagagcatcgcagcagcggagagccctcaagcaccgaccactccttcggcctggctggcacgcagcgtctcctgggtctccgacgtttccggaagccttgtggggtacctcagtggcgagaacaagacggagaaagatgcctacctggatcagcagtactgaaagcgctcacctgtgtggtgtttgtgcaccgtgtacatactataagcgttccatgcttaccatctcatctgggaaaatcgttttgtgttcctggtgagtcgagccatacactcgtgctaggcttgcatcccccaaagcaggctttggggtttattttgcccgttttaacttccggacgtccttttc

SEQ ID NO: 21603 - DNA, 898 bp, Oryza sativa
  ref <308>: DATABASE ACCESSION NUMBER: AK071871
  ref <309>: DATABASE ENTRY DATE: 2001-12-06
gactacgcatctctctctctcaggggaaaaaaaaatctcctctcggccgagatcgtctccaccgccggcgagccttcgaaaccggagctaaccagcgccaccgccgtcgctcgtcatgatacattttgtgctcctcatcagcagacaagggaaggtgaggctgaccaaatggtacaatccatatcctcagaaggaaagatccaaggttatcaaagaagtaagtacgctcgtcctgacaagaggtccaaagatgtgcaattttgtcgattggcacggatacagagttgtatacaaaaggtatgcaagcctttacttctgcatgtgcattgatgctgctgataatgaactggagactcttcaaatcatccatcattttgttgagatattggaccgatattttggcaatgtctgcgagcttgacctgatattcaacttccacaaggcatactttatattggatgaggttctgattgccggtgagcttcaagaatcgaacaagaaagcagtactacgcctgatcactacacaggacaacttggtggaagcagcaaaggaagaggcaagctcattgaggaacataattgcacaggccaccaagtagagcagcgcatcgtgcctgctacaatgatgattactcattctcaccccagggcatgatattaactataatcaacaggaacttttttttacattaaacttgccataaaaatattttttgaatgctctgtgttttcatttcggcagaaatttgtaccctcctttttcttttatgtgttgttttcttctaattttttctacccttctttttctttggagtatatacttaattttgttctcctcatcatagtgagaaggaataacttatatattattgaaataatttggctaaggaattctt

SEQ ID NO: 21604 - DNA, 1157 bp, Oryza sativa
  ref <308>: DATABASE ACCESSION NUMBER: AK099203
  ref <309>: DATABASE ENTRY DATE: 2002-08-28
gaagggaaaagagttcccacttcccccaccaaactccgctcggatcacccaccggcggcgaggctgcggagatggccggcggcgaggacgaagggtggaggaggagcggcatcgaggtgagcgcactgcagttcgactacgacgggcagccgccgctcttcgcgcggttcaatctccgcatcgcccccggctcacgatgcctcctcatcggcgcgaacggatcaggcaagaccactctcttgaagattcttgcggggaaacatatggttggaggaagagatgttgtccgtgttcttaatggttctgcttttcatgacacacagcttgtgtgcaacggtgacctttcctacttaggtggttcatggagtcgggctatcggttcagctggtgacgttcctctgcaaggcgacttctctgctgaacacatgatttttggagttgatggggttgatcctgttaggcgagagaagcttgttgatctactagatattgatctgcaatggcgcatgcataaagtctcagatggacaacgccgcagggtacaaatctgcatgggtcttcttcatccatacaaggtactcttgcttgatgaaatcaccgttgatcttgatgttgtgactagaatggatctccttgacttctttaaggaagagtgtgaacagagagaagcaaccattgtctatgccactcatatatttgatggattggaatcatgggctactgacattgcatacatccaagaaggtgaattgagaaaatcagcaaaatactctgacgttgaggagctaaagagtgccaaaaacttgctgtcagttgtcgagtcatggctgcgatctgcgaccaaactccctaagaaagaacatccccgtcctgagacccagcccaggcgctcctctccatttgatgcttcaccgttccgatcttcacgccacatggcctactaccgttgatgattgttcccacctctacacctattctggtgctaattaatcatacttccacaatttgtttctgttctgtttctcatccctttctacggcattgtacctaatatataaataaagcgaacttacccttgtgccgatgagcagtgagtacccatcaagttcatttctgtacttctttctgataatctaatactacatgaattcagtccc

SEQ ID NO: 21605 - DNA, 2170 bp, Oryza sativa
  ref <308>: DATABASE ACCESSION NUMBER: AK071872
  ref <309>: DATABASE ENTRY DATE: 2001-12-06
ggtgagatagatcgattcgttcgatcgaggcgcgggactcgcccggtggatcgcgttgcgtacgagcgtacgagggagaccgacgctgcagcgcacgtacacacgggacgcgacgagacgctgcagcgcagcgcagcctcgcgcgcgcacggcgaggggaagaaacacgcacgcgggggctggatcgcgcgctggctggctggggggaagcggcggttggcgagcagagcagaatacctgagatatggatgaagccagacagtgagggttatagccaatgcattgaacgcccaaagaaccagcgcaggactaacaatgcaactgtcggttatctaattgttgatgcaaacggggggctaaatcagatgagaatgggtataagtgatatggttgcagtggcaaagatcatgaatgcatcactagtaattcccactctagatcatcagtcattctggactgatccaagtgatttcaaagatatattcaatgttgagcacttcaaggaaatattaaaggaagatattgtaatcgtggattcccttccaccaacttacaaaagggtgaaaccctatatgagagcacctacctcctggtccagggcttcctttacagagatttttcaaggatactaaggaagtacaaagtagtgaggtttactcacacagattcacgtatagtcaataatggtcttgctccttccctccaacgtctccgttgtcgtgcaaattacaaagcacttcaatataggaaggagatagaggagctcggtcgcaccctggtagatagactgagaaatggaatggatcattatattgcacttcatttaagagatgagaaagacatgctgtccttcactggttgcaatcacaacctgacagtacatgaggcagatgaactgacggacatgcgactcaaagtgagacactggaaggagaaggagatcaacagtgaggagaagcgactccaaggcggttgtcccatgactcctcgtgaagctgctgtcttcctcaaagctatggggtatccttccaccacaaagatatacattgtggctggtgaaatatacggcgcacatagcatggatgcattaaaacttgaatacccgaacatctacacacactacagtctagccacagcagatgaattagaacctcttgagttgtatcagaacaggctagctgctgtggattatatagtagctcttcagagtgatgtttttgtatatacatatgacggaaatatggccagagcggtgcagggtcacagaagatttgaaggattccggaaaactataaaccctgataggctgaagtttgtagagctcattgataagctggatgaaggttccatggactggaatgaattccaattgaagtgaagaagcatcatgaaaacagacttggaggtccatatgacagattacctggtgaaagtccaaggcaagaggaatacttctattcaaatcctatccctgggtgcctctgcagaaaggtacaaaagactaggtaaaatagattaatctcaaagggagatgattcagtcttcaaaaagacatgaattgtacagtcttcaaaggaaaatagtttcgcagctgcattaaggatggagatgacacttcctcacaagtcacagattgcatcaaagtggaagtcctagtaaactgacagagaccggtcattttgattatttatcctagactgacaacactcgtagttcagggcgtggggccaagaagtgctgcattttcaaagaaatgttcatccaaggaaggaagatgagattctgaagtagttgaagaattaaatgtatcatcgattataggaacagccagaaggaaaactcttcatggaggctgattgtagttagtccatacacacttcccctgttcttgacgttatctgattcgttgtagtgggcatcttacatctggatggattcataacagtaatggaacaaaccacactatcagtatagaatgacagacaaatatttcagtagcttaggtcagatcaataattctttgtaatctagcaatgtgccaatgtcatgcacatcagattagcttcttgtaaaagtatgttctttgttgcagtggcatctgcatctgcactatcctctaggaggaatcaatgtgagtttcagaaacaaattagaaacaaagaaatgcatg

SEQ ID NO: 21606 - DNA, 1599 bp, Oryza sativa
  ref <308>: DATABASE ACCESSION NUMBER: AK071873
  ref <309>: DATABASE ENTRY DATE: 2001-12-06
aaaaaaaaaaccctcgtctccctcactgtcccgtccctgcggctgcgctccactcgtcgccgccgccgccgccgccgccgccgccgtcgtccgcgtctccgtctccgtcctcgccgaggtatcccgtctcgtctcctccgctccttgcgtcatctctctgctgaacaggggaggggcgccgatctccatctggcgagcagagcaggggaggggatcctgaacattgtgagaatggcctggagtcagagtgctagaaagcccatgattgggcttctgtttcgcgcccaacaacattctgctcggggttactcttattcagcgttccaggctcacctttcgagcagcaatgtcgatcaaagcgccacacttctcaggagattcagctccgaagttcctgcgtcggagcaaatgaatctcatcaaacagctgagggagaggacgagcgctccaatcaaagatgtgaaggcttccttagttagttgcaactgggatattgatgttgcacagaaggacctaaggaagagaggggtggttcttgctgccaaaaagtcttcacggactgcagctgaaggtttgcttgctattgcacaagatgagaaaagggccgctgtggttgagcttaactgtgagacggattttgtggcaagaaatgatgttttccagtatctggcttcttctttagcaaagttggctttatcagcaagggatcctggtgaattggtttttccttttggtcctgactatttggagaaccttaatgtcaatcttgatcatcctaaacttagtggggagacaacagtccaaagtgctgtcacagaagttgctgccatggttggggagaatgtcaaattcagaagaggtttcattatgtccacaactgcacatggtgttgtttgctcttatatgcacacatgtccccagccaggtttgggtcgtcttgctggcttgatcacactagaggcagaagacagcaatgctcctcttgatgctcttcagagagtcgggaaatctattgcaatgcacatcgttgcgacaaagccgttgtttttatcaaaagaactggtctctgcttcagctgttgaaaatgagagggacatactccggactcaggctgaaagctctggaaaatcccaaatggccatggagaaaatggtggaaggccgactaagaaagtattttgaagaagttgtgcttttggagcaaaaatatgttgtcaatgacagcacaaacatcaagagcgtcctgaatgatttgtcaaaggaagttggctcaaaagttacagttggcaattttgctaggatggaagttggcgaaggagtttcaaaggcctgatgagtccactgggtctgaagctacggctcgttctgcatagttttcaagctgacatgaatcaaatgtgataattgagatatgctgaggtttctcttcttctcaagttagatttattagtctcctgagaactgtactactttttccgcggtttggctccaacaatacggtcatatttttctacaaatgctatgtatcaattagtttacaagtgaactttctctagagagtattgtaacaattcgaatttaatgaaataatgtttgatct

SEQ ID NO: 21607 - DNA, 941 bp, Oryza sativa
  ref <308>: DATABASE ACCESSION NUMBER: AK099204
  ref <309>: DATABASE ENTRY DATE: 2002-08-28
aaggaaaagatggcgccgtcgtcgccaccggcgatgaacatggcttgtgcgagacagggacgcctccggcagcgttatgaaggatgctatcgccttgtctctggatgcatcccttacatgatcaaggaggatggagaaaacagcagcagctcccttcaagatgatgatcatgtgctggaaaggctgcaagtgctcatgatctcgacgccgaagcgaagcgatctcatcttcccaaagggtggatgggaggacgacgagagcatcggcgaagctgcctgcagagaggccttcgaggaagcaggcgtcaagggcgttctaagtgggacaccactgggagaatggatcttcaagagcaagagcaagcagaacagctgtggcctgcaaggggcctgcaagggctacatgtttgctctccaggtgacagagttgctggagtcatggcctgagcagaccacccatggcaggagatgggtgccggttgaggaggcgtacggcctctgcaggtacgactggatgcgagaagcgctggacaagctcaaggagcagctcctgttcgccgccggcgatgacctccgcgcctcgccgtcgccggagctggactcgtcggccggcctgtacatggtgatgccaccggtggctgaaggagctgtggcattgtgctgattaatgctcctgatctgctgctgctgctgctcatgatgctgatgatccctgagaggcagagaacctgaacttccaggaggcaaagtttcagatgttgagtggtgatggttcaggctttctctcacctgcagaaagggttgcagacctgcagtcatgcaacaatttaagatgttaattctgcaatcatcaaaatgatgtccaatctaataactgttccttaatccttactgctgagaactaatgggaagaaagtagctaaccatcttctggactggacg

SEQ ID NO: 21608 - DNA, 1000 bp, Oryza sativa
  ref <308>: DATABASE ACCESSION NUMBER: AK071874
  ref <309>: DATABASE ENTRY DATE: 2001-12-06
gagttagcgagagatcgagcgggaccggaggagcctaccgcgcgtctcgccgtctcagctccgcaaggcttgcagccctgccggagatgaagacgacgaccgtgcccatggcggcagcggcggcggtggcgccgtccaccaccacctcctcctccgcctccttcaaggttgcggcctatgcttggtcgtcatgccggagcagctcctctccggcgacaagattggtcgccgcccccaatcaccagcgaccaccgctagttgttggagccattgccggcctggatccggttaccgcggtgcagctgccattaaccgctgggaacgtcgagtctgttctagatcaagtgcgcccttacctgacggcagatggaggggatgttgcccttcatgaaattgccgggaatgtggtgaggctgaagcttcaaggagcttgtggatcgtgcccaagctcgctgatcacgatcaagaggggcatcgagcgccgcttgatggagaaaataccagatgttgctgctgttgaacctgttacagataaggagactgggcttgagctgaatgaagagaatgttgagaaggttctcaatgaaatcaggccataccttgctggcacgggaggtggtggcctccagtttctcatgatcaagggccccattgtgaaagttcggctcacaggccctgctgcagttgtgaggactgttcggattgccgtgagtaagaagctccgagagaagattccatccatccaaatcgtccaattattgtcatagtctgaagaatatctgtgtgccacccctctcaagcagcacatctgcaacactgtacagaaaattgatgtaaatttgtaaattggttgcatttcagaagcctcacgaagagttgcccatctttagtcagcattcagcacagggatcagatatatcatatactatctgtctagatctgtaatgaagttttgatctgttcctcttgaaagaaagatggaaaagtgtgtttcttggtg

SEQ ID NO: 21609 - DNA, 2670 bp, Oryza sativa
  ref <308>: DATABASE ACCESSION NUMBER: AK099205
  ref <309>: DATABASE ENTRY DATE: 2002-08-28
ggcgagctaattaaccgtacgtgcgattgccgggagagaagccagccgctggccttcgctgcggcgcgcgcggtgtggcaacgacgagcaagcaagggggcaggtcatggctttgtccttgaactgagaagaaggtgcatgataacgcgccacacgtgaaactatattcatgagggatgactgaaatggaggattccttaagatcctgcacagagcagctactccgtgttagagaagagaaagaacgccttatcatcgaagcagctgataagatctctttggagcagaagaaagtgtggagtctgcagcagaagttagaagatgcaaataagcggtttgcaaaggtcaccactgaaaactacaatcttcgcaatattgtcaactccaaggataaggtgatcactgagctgagtgagtctgcagcactcctgaaccaaaagttaattgatgccacagccagacttgaattcacacacaaacagtgtggctctcttcagtatgaggtgcgcatccttcagaaggaactcgagattcggaacaaagagcgggagtttgacctcaaatcaattgatgctgcccagaagcatcagcaggaaagcaccaagaagattactgcattggaaactgaatgccagaggctgcggaccatggtccagaagcgtcttcctgggcctgcggctttggcgaaaatgaaagatgaggttgagcgacggggcagtaattgtgttgagaacagaaggagaaagccacgttcatctgcacagtcatcaccgcaggtggtgactccaaggcatcctgtttctgaaggttaccttgtcaagatgcaggaattggatgatgaaaacagacacctcaggcaattgttggccaagaaggagagtgacctccagtttgtgcagttgcagtatgcagatgaagcatcgaagctgtcagtagtgcaagggcagctcaaggagttggttggtagccatgaactggatgacgacaaccgtcctgaaccatgggcaaatagttctttagtttccaaaggagagcattttagagttgggaagcaacatgcatctcacagtaggggaagaagaatagcaggatctgacatgcagttgcttgtagatatatcggagatagagaagcttgaaatgatttcaaggccttcaagtgcgccacatcaatgcgtgccagatgcttctgatacagagtccaaaactgccctgacagaaacagtttgccaagatcgaatccttgaagatggtctatctgacaagtatcccgagtggattcaagatgttttggaacttatcataaagaagcatcaagtccttaaaataagcgtcgatatcattattgatgaaataagatctgcattgaggactgagatttcagacaaaggaaatgatgctgcaaatgtgacatatgaccaggcagtaatagacagcatggtggctactcttgttgaaagagtgagttgcatgatcgaaagatcttctggaaacaatgttctgagttctcaatcatttttgcatgagaaatctgaactcacttgtcatcttgagcaccttatctgtgtatgtagtgatgtactggatggaaaggccaatcttcgaaagttcatcgaagaagtttgcttaaccctcgagtggacagtgaaccaatatatttattgtgtcgatgctctcgaaactgtggattgcatcacaaatgatttcgatggaaatgtatctcttagatcattaaacatgcaggaaaaacaacaaatgcaaagcacaaatccgaaagtggctgtaggagttcaacaagaggtacagaaagaaccgtttctgatccctggtgaccccgtagaaaatcattctcaggttcagtttgtcacttgtaagcttgataaggaactgctggctgttaggcaagatcatggtgataattgtcaagaaaagcagtcagtacattataaagaagaaagtgctacggctgatgggagcatgcaattgttaccagaagaagaggggaaacaactaacaaattcggcaatatccgcagcagctgataaacttgcagagtgccaagaaacaattacaagcctaagcaagaaactgcaggcgctaaaatgtccagcaaatgcggatgctgtagacaaaagaaagtctgataacttgcacctgttagttgcaaatcagaattttagttctcccccatccatagaagcagcatgcaagaaagagaacgatgaacgtgttacaactgaaaagaaccttctacaggagcaagatgttggcactggccataaagttgataacaatggttcaacacaaatcgctcctcgtcccgtgatccccaagtcgccactaaccactgtttctgttgatatgaagaagaggaagaaaaagaagcagggtgggagcttgctgagtagactcatctttgggaagaaggcataaaacagctccttggctgctagcctgctacgctcctctgattaagttgttagtgcatccagcagtgctggagcttgttcttctaagttattccgatcccatgtccaataagagggggcaatgctacgtagctaaaatataatttatcggttatgtcatatgtgttgcgacgtgatcaacactatatgtttgtaaaatcctgttccagacatatgcatatggtcttatgattggtggattt

SEQ ID NO: 21610 - DNA, 3128 bp, Oryza sativa
  ref <308>: DATABASE ACCESSION NUMBER: AK071875
  ref <309>: DATABASE ENTRY DATE: 2001-12-06
gtttccatcctccctccctctcttccccaacctctccaccccaaaacactttgctttccttccctttttccttctcccccttccattcctcctcgcttgcgttgcgtgcatcccttcctctcgccattactccccatctcgcgagctcgctctccccccagcaatgccgccgtggagccaccgcggcctccggcggtgctagatccacgccacagggagctcgggcgccggcggcggcggcgccggaggtgtggggatatatcaagaaacgggtgtggccgggacaggcgggcgcggcaaatgcacgagcacatccgcgccagggcgtgggaggcgacggtgcgcaaggtggtgcagcagcagcagccgcagccgcagcctgggggcagcaggcgccgcgtgtccccgatgctggccgccgacgaccccgagacggcgtcctcgtcgtcggcgtccacggccggcggcggcgacgacggcgggtacgtcgagcgcggcctccccaacggtgacttctacacgggccagtggcgcggcggcgcgccgcacggcgccgggaagtatctgtggacggacgggtgcatgtacgagggcgagtggcggcacgggaaggcgacggggaggggcaggttctcgtggccgtcgggcgccacgtacgagggggagttcagggacgggttcatggacggcgccgggacgtacaccggcgccgccggggacacgtaccggggctcgtggtccatgaacctcaagcacggccacggcaagaagagctacgccaacggcgaccactacgacggcgagtggcgctccgggctccaggacggcgccggccgctacatctggcgcaatggcaccgagtacacggggcagtggcgcggcggcctcatccatggccgcggcgcgctcgtctggtcgaacggcaaccgctacgatggcgggtgggaggacgggtgcccccgcgggcagggcaccttccgatgggccgacggcagcgtctacgtcggctactggacgcgcgacgccgccaccggcattgtccagcagaagggcgtctactacccgtccccggcggcgtcctccccgacggcgcgcgacccccgcgacgtgttcgcgagggacctcccgggcttcatgggcggagccgccgagccggccgcgtctctgccgcacaggtcgctgaatcactccggcaacagaggcggcgccgcggcggcggcgggcaatgcgcggtcgagctccgcgtcggggctgagcaacagctccggcggcgacaggaagtacgacaagatttgcatttgggagtccgacggggacatcacctgcgacattgtcgacggcgccgcgttggccgacgaggcggtgggccccaggaggagcatcaaggcggccgccgccggtgatgggctggtcctcgcgccgccgtcgccggcgccgcgcatcgccaagtgggtgccaccgcgggaggcgaagcggcagggcgagaccatcgccaagggtcacaagaattacgagctcatgctcaacttgcagctcgggatcaggcatgcagtcgggaagcaaggtccagttacgcttgatctgaaatcctcggcttttgacccaaaggaaaaagtatggacaaagttccctccagaaggctcaaaatacacccctccgcacaattcttgtgatttcaaatggaaggattactgccctcaggtgttccggacgctgcgcaagttgttcaaggtggatgctgctgattatatgttatccctttgtggaagtgaggctctgcgtgagctctcttctcctggtaaaagtggaagcttcttttaccttacaaatgatgatcgatacatgataaagacaatgaagaaatcggaagtaaagatgctgcttaagatgcttcctgcttactataatcatgtccgttcattcgagaacactctagttaccaaattttttggtctacattgtgttaaattagctggggcaaaccagaaaaaggttcgctttgtcatcatgggaaatctgttctgctctgatcattccatccataggcgttttgatctaaaaggctcgtctcttggccgaacaactgacaagccacaaactgagattgatcagtatacaactctgaaggatcttgatctgaatttcatatttagactgaagaagcaatggttccatgagttccaaaggcaagtggacagggattgcgatttccttgagcaggagaagatcatggattacagtcttctggtgggtgtacattttagaggcaatagagagaagcttctgagcgaaggttccaccgattacgatatcaacaaaatatctactcctcgtctttcaagaggaaatgtggatcagtgtctcactgatccaaacaggtggcctaaaatcaagctcggagcaaacatgcctgcaagagctgaactgactgctcggaagaatgatttggaaccacagcttattggagagccaactggggagtattatgatgctatattatattttgggataatagacatacttcaagattatgatatcagcaaaaagctcgagcatgcatacaaatctttccagtatgacccaacctcaatatcagcggtggacccaaggcagtactctagacgttttaaagattttatatacaaagcatttcaagaagacaggctagatagctgaaaatgtgttgaagctcaagaaacctctgcctccaggtgtagatgaactttaaactgtccaaagaaagatcaggctgtcacaccatgcaaaatgcagttgggcactctacttgtgtgctgtcaattgtatgtatgaaaatggatggcagcttcagtggaagtgatcttggtggtagagctgcttgaactcatggttttccaacagaggtagtctggctgtagcgtaaatataaatagctttatacacacatatatagagctcactaatattttgtagggtagatgttaactcaatgattcaacttacagataggaaatttgtagccatgcacaaaagtgcgcaagccagtccggagttgtaaatgtttttacctgagggtaacatgtatcaggtactattcttttgtaactgtcttgatcaatacccataggaaatccttggataatcactcc

SEQ ID NO: 21611 - DNA, 3324 bp, Oryza sativa
  ref <308>: DATABASE ACCESSION NUMBER: AK071876
  ref <309>: DATABASE ENTRY DATE: 2001-12-06
gccctcgcttgcgtcgtcgccgcctcagcctcctcctcctatcgctgctgcgccggcgccaccccctgtggatctagccacccagaggaaggagagggtcgccctcttctcccctctcatctccaagccatcactgcctccctctttctctcccaatcctcggtgagctgcagatccggtttgggggccatcggaatcgatgttcttggcctccccaacggtctccttgctggtgaatccgcgcccctcaaaggtgacgcatggaagccgaagccacccccaccgccgtcttctcccgccaccgcccatcctggcctccttctccaccctcttcctcaccttcacctcgatgccggatcttgctttagggtcgccagatttggtaagggaaggacataggagcgttggggctgagtgattggagaggcagcagctcgggcacgacattgacgacggtggttgcggcccggcgacgatggcaggtgcaacgacaacggcagcagtggctcggcagcgtgatctgcaatcattgggggtgatttcttctccaaaacaagcaggtgactttctatagtccaccaaggagtgatggcaggataaaagtgactcttctctaccatggtgatccatcccagaaagcttctccgaccactacatcctattttacattgaggtaaagccagtatagaaacatgtattctcacccactttagcatattgctagcttttttgagtactacaaaattaactgtgttgtttatatgcagagttcaggttaaagtttccaatccaaccatacgctcattcatttcttccttaaaatagaaatatttgtgttggagcattttcagaattcaaacaagcaaagttctgtatagtatcacaactacctagcatcagtgataaatatagatgctactcaaagctttttagtatagtattccttttcaccagagttgatatgggagagaaattatagaactcctggaaagtgatgcagttttgtatagatgtgggatatttaagtatcttaatctgttgatttaaaattattgtcattggcaagaattgatgattgatcttatatgtcattggtaagcattgatcttatcgttgcttaatcacttttctttaatttgtattgaaattaaagactactgggaagtattcaattcttagcactacttaacactgatccaatacaaagctgatctgattgttcaccatcaagtgaacacaatagtttaccagtacacaacacgttgatttctctactttcagatttatgtgcaagttaatggtaattaagtctcttcaatatgttgcgatagttatgcttgatacaatgttcaattattaattctcttaaaccagcttgagcaattatgtatactcaattcagcagcatcatggtcaggcgcgccaatatttctagttagtatcaaacctcgcctctaggaaattgcatatgctttatagccaaaaaaaatttgacatgcagagatacagctaaatcttgtaagctctcgagactaatagaaagtggttaccatttgattccgaccagaataaactattatttggcattgttaccttttgagagcaagtttaatagtatagccaagtatagacaactgctggtttcaaatcatctatagctaatctaagagcccattcatataatagttaactataaaaatatactacaccattaatacccagtctcacatctcatacacacatatcaatagttaactataaaaatatactacaccattaatacccaatctcacctctcatacgcacatatcatcttaagtttgtgttacagccggctacaaatctgtagtctgctttcttatatctcttctcttctcttttcttcttgatatgtagttatagcttggtttggactttttcttgttccaacagcaacaaaaaaaaaaatcttcgtcgcggctactgtacctgctctgcaagaggagcttcagtcttcgaaacagctgcgcgttttcaagatcggtgacttcaaaattccactgtgaattaatgaattgaataggaacatgaggggcaccggagttcaataggaagttgtctcaaacaaactccaattgtaaagaacttgacacagtcacaatctgcgtgcgttccgctcaggaacacggcaaacggtacaaaccagttgctgctggaaggtattttacaccgccacaaaatcatagcaatggatatcagaaaggcaagaattagcttgagtatcaaataaaggatatattcttgaaagaccagtacaattttcatcagaaatggagccaactcactgagcagcaagatcaattccaattatgcatgagaacagcaaagcagaaaaacaaaattacaacaaagatttaccctggaagcttattttgtggaaacatccagtgaaatccatccaataaagtaaaaacctatgaaacccatacctaaaagttctctaatttcatgaaaaaaaaacaaaacctatacctagaagttctttaaattcatgaataaaaaatactaaagatacaataggcatgaaatacaaagtcaatttcatctgggacggaaaaagcataaattacaagcaaatattatcatgttattatttacccaaaatttgtccttttttttaactcccaaatggagttaagttcggatttgaaatttgatgataatgtatttcatgtccagacataactctagtaattttttcatgaatttatataactcttttatgtctgaattttacgggttttcatcggatatactttaacaaagcatgctccttactgaaagaaaaattgtcaacactgtttaatgaaagtattcactgtgcagagaggggctgacatgatagcagcctggatgaataattgtcataatccaaactattccaatttcgcaggaatcatctgcagcagaggcactaattcaaccaaaaagggaaaacatacttgggatattcaggtctgcattacagtactgctcaagatgctgaataaaggatctagaatcagaaactgtccaatttgatttctagaatcagaaactgtccaaattctaaggtgtatggtatctattggttttagcatgctagcataagtcaagcccatctgttatgccattcttatcagatcaatactgagcttaggcggtctagttgaataaacgtttgcagtgctactaatgatagtactagtaagtaacatttgatgtcaaacataacaaatattactctttttcttaaaattaaaggtagggcaaacattactgcctctgcctcaatatgcattatgg

SEQ ID NO: 21612 - DNA, 2218 bp, Oryza sativa
  ref <308>: DATABASE ACCESSION NUMBER: AK071877
  ref <309>: DATABASE ENTRY DATE: 2001-12-06
gattatagccattctctccagccaccctctcgcctcctcctcctctcatcatctcccatccttcctcctcctcaactcctctcctctcttcgcttcttctctcatgctagctactactactagcttctccttctcctgtcgcacggtgcggcggaagtggtagtagtagtagctttcttggtttaagcaaggatcggcgaggacggacgccggcggcgaccgagcttggggtgtgtgtgtgtaaagttgtcttctccggcggatgagctgttgtttcttggctcgcgcctccggcgtgtccggcttgttgccttccatgtccgcgacgctgcaataattcgcttccatatttgctgccgccatgccatgtatagccgcgctgctgatgcggccctccagccgttttaatgcgtgccaaatcctctccccgaggctcataaaaattattgaattgttgggatctgaggggatccgccggagttggtaggatcacggtggagtgattttggccggaggaagaagaagaaggagaaaaactggtgtttgttttgtcgtttgtagtgagctcgcgtgatgagcttcggtggcatgttcgatggcgccggctccggcgtcttctcctacgacgccggcggcggcggcggcggcggcggagtacacaactcccgcctcctccctacgccgcccgtccccaagcccggcggcgggttcgccgctcccggcctctctctcggcctgcaaactatggacggtagccagctcggcgacgtgaaccggtcgcttgccatgatgggcaacggcgggagcggcagcggcggcgacggcgactcgctccagcgacagtgccagtatctcgcatgctgaagctggcgcagcggatgacggacaacttctgcgcgggggtgtgcgcgtcggcggcgcagaagtggcggcgcctggacgagtggcgcggcgagggtgggggcggcggcggtggcggcggcggggacggggaggacaaggtgcggatgatggcgcggcacagcgtgggcgcgccgggggagccgccgggcgtcgtgctgagcgccaccacgtcggtgcggctccccggcacgctgccgcagcgcgtgttcgactacctccgcgacgagcagcggcgcggcgactgggacatccttgccaacggcgaggccatgcaggagatggaccacatcgccaagggccagcaccacggcaatgccgtctccctcctccgtccaaatgccacaagcgggaaccagaacaacatgctgatcctccaggagacgtgcaccgactcatcgggctccctcgtcgtctacgctccggtggacgtgcagtcgatgcacgtcgtcatgaacggcggcgactccgcctacgtctccctcctcccctccggcttcgccatcctccccgacggccacaacaatggcgcctcgccgtctccggcagaggtcggcagcggcgcctcgccgaactccgccgccggtggcggtggcggtagcaacaacaccgggtcgctggtgacggtggcgttccagatactcgtcaacaacctgccgacggcgaagctcaccgtggagtccgtcgacaccgtcagcaacctcctctcctgcaccatccagaagatcaagtcggcactgcaggccagcatcatctcaccatagataagtggacatttgacgtggattccgactcgaccatttttgagtcgagtcggatgccatctcaaatgtctaacttttgaaggttagaagactgagaggacttccgcggcgggcgatggccgaccgaaactggctgatggatgcaactcaatcgttgatcaggtagagttttcgagaggcgatatgcgagcgaggataaaaataaaattaagttatatatagtgtgtggagtatatttgcatagatgagcaaattaaatggggtgagttgcagagggatcaagtcaagaacgaaccttgcgctaggcttggctcaagctgatgtggtggttcgggtattgacttagtctctggtgaaaataaacccctagggctttgatctcctatatatatctagcagtttgcttaatttaaccattttgtgaagttttttttaattctccaaaatgggggaaatatagagaaacaatactgatcagatccccaagatcgttggtgtttgtttagtttgcataatgttggaatgagttgatatataaacatgtttattttggc

SEQ ID NO: 21613 - DNA, 2733 bp, Oryza sativa
  ref <308>: DATABASE ACCESSION NUMBER: AK071878
  ref <309>: DATABASE ENTRY DATE: 2001-12-06
gaggctctcctcctagctcccagagaccagagtagtagagagagagaggaggcaaagcagcagcagcagccgcagccaatacgatccgctcctcctcgctcgctcctcgtcgacctggagattccccccgcgccggcgccgccgatttgattcgcccacccctaggccccagctagctagatctggtgcggatccctcgccgtcgccgccatgttctggcgcatgactggtctctccgcggcctcgccggtggatacaattctagacaaggagaacttcacattagaagaacttcttgacgaggatgaaataattcaggagtgcaaagcgctgaatactcgtctcataaatttcttgcgagacaaggctcaagtggagcaattgcttcgttacatcgtggaagaagtaccagaagattctgaaaagaaacgttcttttaagttcccattcattgcttgtgagatatttacctgtgaaattgacatcatcttgaggaccttagtagaggatgaagagttaatggatttgcttttctcatttgtaagacctggtcatccacatagcacattgttagctggatacttcagtaaggtggtaatatgtttgatgctgagaaagacttcccctctaatgaactatgtccaggagcacccagacattgttgtccatcttgttgatctcatcggcaccacctcaataatggaggttctgattcgactgataggtgctgatgagaccatatactcgaattatgctgacacattgcagtggttagaaaatacagatgtactggaaatgattgtggataaatttagctcatctgattcccctgaagtacacgccaatgctgcagaaattctttctgcagtgactcgatgcgcccctcctgctctcgctgcaaaaatatgcagcccaagttttgttgggagattatttcgtcatgctcttcaagaatcacgccccaaatctgtcctggttcattcattatcagtatgtatatctttgttggatccaaaaagactagcgtcagcctcataccaagcatttagaagtaacttgagccatgggacattggttactgctagtccagagacagttgatggtatgctggagagcctaggtgatttgctgaagttgttggatatttcttctgctgaaaatgttttacctacaacatatggatgtttgcagccccctcttgggaaacaccgcttgaagattgtggaattcatctctgttttgctgacgattggtagtgaaactgcggaacaggagctaatcaaccaatctgcagtaaaacgttccattgatttgttcttccagtacccttacaataactttctgcaccatcatgtcgagagtattatcatttcttgtctggaagttaatagatcccagctgattgaccatgcccttaatgaatgcaatcttgttggcaaaattcttgctgctgaaagaagttcctccctgtcaacagaatctaacacaccaacattactatctgaagggaaggtgcctccaaaaattgggaatattgggcacataactcgaatagctaataagcttattcaactgggaaatagcaacagcataatccagtctcatttgcaggagaacagcgagtgggttgaatggcagacaactgccctggtcaaacgcaatgaggttgagaacgtttatcattgggcctgtggtcgtccgacttctctacatgatcgtggtagggatagcgatgatgatgacttccgagacagggactatgatgtggcggcacttgctaataacctgagccaggcattccggtatggaatgtacagcaatgatgacattgaagaggcacaagtaattgaacgagatgatgaggatgtctactttgatgatgaatcagctgaagtagtaatatcttcgttgcgtttgggtgatgatcaggacagcagctccctctttacgaattcaaactggtttacctttgatggtgatagaggaataaatgaccgtttagctgcctctgtcccttcttcatctcccaattctgaagaaacttctctaaacacggaggaaactgatgaggtgcaaattggtgaggacactagcatcgagccacaactggaaagtgtctctcttgaaaatggccctgttgaggaggccggggacttagcagatgtaagtaaacaaacagattctaacacggaagacgagaaactattgtgcactgaagaggaagatttgtccaaagaagctgaagaatctgagcgacacgtggatgttcgagatggccaggtagacatacaggcagaagatgcagctgaaggatcatgcggggatatgggtacagggatagcagtggatgaacctgtcagcccatcatctgagcccaacaatgcttcggctggagcttcaccagacacaggtgatatccatactgctggctcaactggatccaacgattcaggtgcagagttgcatgccaaggaagattcacaggatggacagaaaactgatgagcccacaacaacagagtgaaagtatggttgtggtatggattgtaccatcagaccaaaagcagctactgctcggcagatccttccagaaggtatggtagtactcatgccaaagtccctaacctcacatcttggcaatcatggagaaatcagaagcaatgagtgctgtgcaacaacataaagcttttgctatctgcagttgcaatttgcaaacgagcacttccatatgccg

SEQ ID NO: 21614 - DNA, 3897 bp, Oryza sativa
  ref <308>: DATABASE ACCESSION NUMBER: AK071879
  ref <309>: DATABASE ENTRY DATE: 2001-12-06
gtgcggctcatggagatgaaggagatgaatgcaaggatgggaaatggagaaaaaaccccatgcatatcagatgtccaagacaaccgatgtatgacaatacaaattgaaccaacggataccaatcaagcaaagaaaagtcccaaagtgaagattgttacaagagatgcctcacttcttgcaggagatggagatattacaagaaaatcgcttggaccaataaaggtattctctgagaaggacctatcaagagaaatagaaagagtagcatctactttacatccagataatgaatgggcaatacgaataactgcaatgcaaagagtggaaggcttagttctcggaggtgctgccgactattcagccttccctatgctcctaaagcagcttgtgaccccactcataacccagattctggataggagatcaagtgttgtgaaacaggcatgccatttgctaaatttcttatcaaaagaactgctacgtgactttgaaccgtgcgctgaactgcttattccggtccttcttaagaatgttgtgatcactattcatgtaattgctgagtcctcggataattgtataaaagagatgctgcggaactgcaaagtagctcgtattctaccaaaaattattgaatttgcaaagaatgataaaagtgcagttctccgtgccaggtgttgtgagtacgcaatattgatgttggagttatgggttgatactccagaaatacagagatcagttgatctgtatgaagaattcataaaatgttgtatagaagatgcaactagtgaggtccgatcaagtgctagagcatgctacagaatgttttcaaggatttggcctgaacgttcgcatcagttgttttcatcgtttgaatcatccaggcagaaaatgataaatgatgaagatgctgagacacagcaaaggcatctttctcctgtagaaagagttaaattgatgcagcctcaatctagttcttgtaattcaactgaaattgacaaagttgtcaaggtcgattctggaacatcgttttcttctgtagaccttcaatcagtacaagtgaaagcatccgttcagcatgatgatatgacctcaaaaattcagcctgaaggcaaaactgatggcactacaactactggaagttcatttaaagataccagtacgttagaaaaagaaacaagcccagacaaaggccctgatcctgataaatgtgattcaggtgtcaatttatcatcttgtgatccatcctctgccactcaatttatactagaacctacttcagaattgctaccgtctgatgcaactgttgtaacaattgttcaagacaaggctgaatgcaggccaaatactgaacagctgactcagcaagttcaagttttgggacatccctctgatctgctgaaccgttcacctcctgttagtttgaaagaatcaggaaactcgctgaaacataaccctattcaagtgaactttgatggtagctcaggtggaaaactaggagctcagaaagtgaagcatcatactagcgctcctaataagagtgttgttcgtaaggagccgcggaacaattacattcccaacttccggcgtcctctcttgagtaagcagatgacaaactggttttatgccagtaacagaagtgatttagatgacaagcaactcattttgggtgaaatggtcagcaacatggatgtgccctcctctctcaccgaggcactttctttgggtcttaaaccaaagtcagattggatgatgagggtatacgcattcaatttcttaagacaatctttgctagagcagggaccaagaggcattcaggaggttgcacaaaattttgacaaggttatgaggtttgttagtcgttacctggctgatcctcatcataaaatagcacaggctgctctctcatcactttcagagatcatgccagtttttaagaagccttttgaacattatctggacaagactctgcctcatgttttctctcagctgaatgatccaaaggaatccatcaagcagcagtgctcagcaattttgaaacttgcaggtgaaatctattccattgattcgctcttaccggccctacttcgtacactagaagaacagaaatctcccaagtcaaaattggcaattattgagtttgcaaactcttcttttgtaaaatgcacagtcagttctgacaactattctagcagcagcttccttaagccatggcttgaaaagctagctcttttgttcaaggacaaaaacagtaagctaaaagaggttagcgttgctggtttctcatcaatctattctcactacgatcctgcatctttgttaagctttctagttagcttgtcaatggaagaacaaaagagattaagacgggcaataaagcagttgatccctacaatagagagcgacttggaagagtttttgcaacaaaggaaacataagccaaaggtgccactatttgattcttttgttggtgcatatcaaccttatgctaaaggtttagtcataaagcaaaataagcaccatctgcatgccacatatcagtctgattgccttcaggctgatgatgtgttcgattctgcactccactgtctcccaagaatttctttggaagttcgtgagcgacgcgctgggaaaattgaatctgaatcttacgatgaatctaatggtcatgatgctgaaatgatggacaagaaatctagtgatacaaggtcgagtgacccccctagaacatttgattataatgtgatatcagataacacagttgagagtccaagaaaagagggtactgacatcaagagatttgaggaatcaaacgagagtgaactgaacataactgtcagaaataggaatgtcatattgaatagctgtcaagatcatggaccaagcatttccaggacatatcatcaggatgaaatgagtcaaatggaagaagttccagagataaatggcccttccgtgtcaatcaagaatttacaacagatgtcctcttctctacttgagatgcttgatgatccagaggaatccaccagagagcttgcacttactctattggttgaaattcttgaaaagcaacgaaaggcaatggagaactgtatcgatactcttatagttaaattgctgcatgcaaccaaagatgctgccttgaaggttgtaaatcaagcccatatctgtttgacaacggtggttactcaatttgatccgctgacatgcctaagagcaattgcttctcagttggccaaccaggatgaaaaagttcttattgtcagcatcaacagtttgagcaagcttgttattcgattatcacaggacaatcttatggcacatttgtcgatatttcttcctgcactcctggacgccttcgaaaaccatagtccatatgtccgcaaggctgtggtgttgtgcttggtggatacgtacctgaagctcgggccagcgttcttgccgtatttggagaggctggacagcgcccagctgcagctggtaaccacgtacgccagcaggctgtcccagacgagctttattgctgtggacgcttgatgcaggcaacccagcagcaacagcagcagcagcagaagacgcaatgcttgtttcaacgataactctccaccgttggttagccttagccttctctttctttttatttatggccatgtgtgcacaataagggcagcagctcagctctctccccctttctccaaatttatgagcatagtagaatagatctctatactgtaaatcataattacctgtttttactacccagaaatgagatacatgcatgtaggcagtgcagattgtacaaccaatggaagaatagtagtactagcattttcatcctgtttgctacagcttatgtgatctaaaggaaaggaagaaaaaaatataatgggtgtgcagttc

SEQ ID NO: 21615 - DNA, 2193 bp, Oryza sativa
  ref <308>: DATABASE ACCESSION NUMBER: AK071880
  ref <309>: DATABASE ENTRY DATE: 2001-12-06
gatcgaatcccccaccatccaatttcgttttcgttttcgtttcttccgccgcaagcctcgccgcccgccctcgcaccggcggccgccgccgccgcggcgcgcgatggagtcgacgtgctggtcgtgcggcgagggcgcggtggtggcggacccggacaccggtgtgctcgtctgcacctcctgcggccgcatccacgactccggctcgtcggagttcgtccaccagtcgatctgcaccgacaacggcgtgtacgacctccgcgcctcctccttcgtctaccaccagtcgcagtcgcagtaccgggaccagaagctctcgaacggcgtcgtcaccatcgcctccatcgccgcccgcctcggcctctcccccaccgccgccgacgaggcgctcgccatggccaagtccgccacgggcggcaacctcgccacccagggctccgccttcctcccggccctcgcctccgcctgcgccttcctcgtcgcgaggtcccaccgcctcccgctctccctggccgaggccgccgagaccgccttctgctcggtggcctcgttcgccgacctcgtctcccgcatcgcctcccacctctcgctccccccgctcccgtccttcgactacgccgccgcgctcgagcgcgccgtgcgctcctcgccctcgctgtcctccgccgcgagcgagaggacggaggtgatcctctcccaatcccggttcctcctccgctgcgcctccaagtggtcgctcaccacggggcggttccctctccccctcatcgccgccctcgtcgcgttcgccgcggaggcgaacggggtcacctccatcaccgtggaggacattgcgcgggacatctctgcgaggctgcacaccagcctccgccggtacaaggagctcgtcgatgcgctggtgcgcgtcgcgcgggagctgctgccgtggggcgccgatgtcaatgcgaagaacttgctcctgaacgcacccgtgctgctccggctcatggagatgaggtcacagtccgacccatcagagcagtttctcgagagcttcgctccggacattgccgggattgtgcaggcgtgctcagccgttgatgatgatgaatccaagtaccttcaggttgctccccaattggcttctgatgatttggattccaataattccgggcaggaggggaaggaattggagaattttaagatctcggaggagtgcctatcaagtgcttaccaaaatgtcttgaagaggcttgctcaactacaaagacttgggcaagttggtaaaggtgctaacaggaagaggcagcggataggagggctggagctggagccatgtatagattcgctggatgatggttggaccaaggacatggtgttggaggatgtagtgaatattgacgtcggctttgatgttcctccgccatcgtttgctgctggaatgaagttgcagaagaaaaggagagcacggattgaagctgctaagtgccgaattgatgcgattagaaaaggtcctgttgagagcgagaataaattgcaggctgctctgagaaatgaagatgcctgctcaccgcaaaaaccggccaggaagaagcgaggcaaaaagaggatagctggaagtgatcgtgccatgaatggagagcttccaatagagatgccggatggtccaggtggtgagaagaagagacggaaaggagctccctctgatggtattgactgggaggactgtatcattgagctcctgttattacacggcgcaaatgaggaagagatcgaacaaggacaatacagaagattgttagatctacatgtcttctgtgcagtgagtgccagtggacacaaatgaaaacatggtgatgtaagtccataggtctttaggataattaagacagatttattgctgaacataggttctcactactataaaccacaacaatctgttgatagaatttttttttcttgatagagaaattttgtgctgagtaccactttggtgaagttcaattaagctgattgtggaaagaaaatattgtgatagagatgaaaatacatgtttgggttttgttttccctggtaaaacagacagtagaatgcaacctaggaatgattgggagactagaattttttgtcttaaatgactgggatgttctggttactgtacattgatgtactgcttatgagtgacttgtagttataaattttcactctactgcc

SEQ ID NO: 21616 - DNA, 3124 bp, Oryza sativa
  ref <308>: DATABASE ACCESSION NUMBER: AK071881
  ref <309>: DATABASE ENTRY DATE: 2001-12-06
gatatactgtaataaggttctcttgttgtttattatccgttctgttcttgagttcgtcagtcatctgagcaagattttctttgctattccagtcggtgactgcctaagctagttcaagaatggagcaagctggcaagaaatgtgatctttgatgatcacttcctcttcctgatgatgatttggttactttctggtactatcaacacacatcaaagccttgattcctctgttgcttgtacacactgtccttgatcgtagtagaaggagaaggtgaaggaatcatcagagtacagagattaatttcttgcagtacagattgatttgctctgcttctctgctggttcttgctgatcaagaagcatttgatgagagcttctccaatggcgggtgcaagccatcacctggtcgtcttcttggcagcgctgctcgcgttgctcccgggaagctcgcagctgcagtactcgcagacatggacgctgttcaagatccagcagatgctgaaccacccgccggtgctgagccactggcgccggaccaccgacttctgcggcggcggcggcacggcggcgccgtcggcggccgtggtgtgctacggcgacacggtgacgcagctgcacatcgccggcgtccgcggcgcgccgccgctcccgatgaacttctccatcggcgcgctcgtcatggcgctgtcgaggctccccgacctcaaggtgctcacgctgtccgggctcgggctctggggccccctgccggacaagatcggccgcctcgccgcgctggagatcgtcaacatgagcggcaactacctctacggcggcgtccccggcgggctgtcccagctcaccggcctccagacgctgatcctcgacgacaacctgctcgccggcgagctcccggcgtggatcggcgagctgccgcagctggccgtgctgagcctgcggaacaactcgctgggcggcgccgtgccggcgtccgtgggtcgcatggagtcgctgaggtcgctggtgctcgcgtcgaacaacctgacggggaacctgccggacatgagcggcctcaccaacctccaggtgatcgacgtcggcgacaactggctcggcccggcgttcccggcgctggggcggaaggtggtcacggtggtgctcagccggaacaggttcaccggcggcctccccggcgagatcacctccttctacctgctcgagcggctcgacgtgtcgtggaaccgcttcgtcggcccgttcatgccggcgctgctgtccctgccggccatccgctacctcaacgtcgccggcaacaggttcaccggcgtgctctccgacaaggttgcctgcggcgacaatctccagttcgtcgacctgtcctccaacctcctcaccggcagcgagccggcctgcctgaggccggacaagaagccggcgacggtggtgctcgtcaatgccaattgcctcgaggccaccggcggcgacgcgtcgcagcacccgtcgccgttctgccagaaccaagccttggccgtggggataactcacggcggcaaggtgaggaagaagctcacacatcacgccggcttcctcgccggcattgcaatggcggctctcgccgccgcgtcggccatcgccgtcgtcgccgtcgtcgccgtgaggaggaagaacaagaaaggcgtaatggtgaggccaccggcgatgttgggagaagacaattcttcaagcacgagtggctacccatccaagatgttcgccgatgcacgctacatatcacagacagtgaagctgggagctctgggaattccaccatacagaacattttctttggttgagcttgaagctgccactgacaactttgagaactctttgctactggggcaagattctttcggcgagatgtacagggggagactaggcaatggcacactagtggccatcaggagcctgaaggttaagaggaatcagtcttccctaagcttcagtcgccacattgaaacaatttctaggctcagacaccggaacttggtcagcgctctcgggcactgcttcgagtatgatcttgatgattctactgtcactcagctgtacctcgtgttcgaatacgtgcaaaacgggaacctacggagcaggatttcgcaaggaactgaaggaaggaagcttacatgggcacagagaatatcagctgccatcggcatcgccaacggcattcagttcttgcatgctgggatgatgcctggcctgtttggaaacaatctgaagatcaacaacattcttctcgatcagaatcatgtcgcgaagatcagcagctacaatatcccaatcctaggagaggccatgaaatctgagaagggaggacctggaggcaagcaccatactgaaagcccactgctcaacgataaaaccgagatcttcgatttcggggtgatccttcttgagatcgtgtctggaaagccaatcacatccttatatgaggttgagataatgaaagaactgatgctatgggcagtcgccgacgaggatttggtgaggaggaggagctttgccgaccaggaggtgagcaagggatgctctgacgagtcgctgaggacgatcatgcagatctgcctgaggtgcctggccaaggaggctgtgcagcggccgtccatcgaggacgtcctctggaacctgcagttcgctgcacaggtgcaggacgactgggaaggagataaccggagcagcgacggttcaatggtgtcgtcgtcgtcccggatcacgaaatcctccagattccagaatgagcaaaccaggtctgggcgggaaaaagaatgtgaggattcgtcagctcgtggatcagtgtggctgcaggctgcaacagaagatggaaattttgagacaggcaggaggcaagctgaagatgaaagatattgatggaactgatcctccgggttgtgcttctgtcttgatgcacacaaccttcccctttcctgatcgtgtttgctcactgaatcctttaaatctcagaaacgccttcatttgttttttcttcttttctttcttttttgtctttaggcgtacaataatatgtgctttttaggcgtacaaataatgttgtgctgtgcaagcccctgtatcgttctgtcaatattaaagctggaatagtttctacg

SEQ ID NO: 21617 - DNA, 1321 bp, Oryza sativa
  ref <308>: DATABASE ACCESSION NUMBER: AK099206
  ref <309>: DATABASE ENTRY DATE: 2002-08-28
gacgtcaagcagatcttcaagaccaccaccggcacccccttcctcttccccaccaccgggacgggggcgtgggagagcgcgctgacgaacacgctgtcgccgggggacaagatcgtgtcgttcctgatcgggcagttcagcctgctgtggatcgaccagcagcaacgcctcaacttcaacgtggacgtggtggagagcgactggggctacggcgccgacctcgccgccctcgactacaagctccgccaggacccctcccactccatcaaggccatctgcatcgtccacaacgagaccgccactggagtcaccaacgacctttccgccgtccgcaaaatcctcgacaagcacaggcacccggcgctactactggtggacggggtgtcatcgatatgtgcgttggacttccgcatggatgagtggggagtggacgtggcgctgacgggttcgcagaaggcgctctcgctgccgacgggtctgggcatcgtgtgcgcgagccccaaggcgctggaggcgagcaagacggccaagtcggtgcgggtcttcttcgactggaaggactacctcaagttctacaagatgggcacctactggccctacaccccatccatccagctcctctacggcctccgcaccgccctcgacctcatcttcgaggaaggcctcgagaacgtcatcaagaggcacaaccgcctcggcaccgccaccaggctggccgtggaggcgtgggggctcaagaactgcacgcagaaggaggagtggttcagcgacaccgtcaccgccgtcgtcgtgccgccgtacatcgacagcgccgagatcgtgaagcacgcctggaagcggtacaacctcagcctcggcctcggcctcaacaaggtcgccggcaaggtgttcaggatcggccacctcggccacctcaacgagctgcaattgatgggtgccctgagtggagtggagatggtgctcaaggacatcggctacccggtgaagctcggctccggcgtggcggcggcggcggcgtacctgtcgaattcgacgccgctcatcccgtccaggatctgaagcacaacgaacgaaggaaggaaagcaattctcagcagcgatggttctgcctgcagtttggcagaacggaacagcggcaaattaatcctattgcatataatttggtctctgtatgtaaagttaaatttttatacgctccatcgatcagctctatgctaaggagtaaggagtataattttgtgaaggtactgcagcttttacttaattaatcttgaacctcgatgtatacaacagtgaacagttaaattaatcatcattccct

SEQ ID NO: 21618 - DNA, 1365 bp, Oryza sativa
  ref <308>: DATABASE ACCESSION NUMBER: AK071882
  ref <309>: DATABASE ENTRY DATE: 2001-12-06
gaattctcacgcaccacccgcgcgccccgcttgatcggagaggagggggtttatattgatttttgcgatcactgcatacgtcgtcttctttgcggatttgagaccgaggatcgatggcggccggagggatgctgtgcgtgtcgtcgtcgccgacggcgtcggcgtcggtggcgagggggcggcggcagcggcggaggagcgtcgaggtgaggtgcagctgccgccgggggccaccaagggcgaggtcaagagggccttccgccgcctcgcgctcacggtgcgtctcgccggatctgcgccggcgtctcgggtttttttttttctcttttatttttcagttattgcagaacattcttctgatgagaggttggagagctgaagaaatttttttttctcttgctgttcttggcgtgcagtatcatccagacgtttcaaaggagagcgatagcggcgtccatttccagcggatcaacgtggcctaccaggtaatttcaaactaaatccgatttcactctcacctcaaaaaaaatcacagtgaattatcaacgtcagtatcatcagcaacacaccgcaacaactctgaatccaaccaatatctagccaagaacaatagcatattaaaattaccaccactccaaacatttttcgagagtatgatcagttgaaaccccttctctgatttttttcacctcgcctcgatagcttaacgttgatcttgtaaacacttgtaacccttctttttttttctcttaataaaattttatcggccatccaaaaaaaaaaaatctccgtaaacttttttttaatgaaccgacacaacacagtgccaatttcattgaatatagcaggagaaaaaactgtaaacctctgcaaactttaaattcagtattttagattcttagattcagtgcaattttcagttgctgatcacatttggtgtgatggatgtgcgtgcagatggtgatgggcaacatgagggaggccgaggagaggctggagtactggaggctcaagtacggcctcgacgacgaggacctggacaagtacaggaaccacctcaacgacgaagacgacgatgaatggttcgacgtctaatctgaggatcgtgaatcgctgcctggactgacgggatcaacgagcacagatgcaaaccatctcgttgatctccatcattgatactagaaatttaatcttgtttatagcactgaaaaatctgttcatttgtatgtatgcctgtatgtagaacagtagtagtagcagctagaactgaaaaaatctgtttatttgtatgtatgcctttcccccggttttattgtaggggaaggggtacgattagactgatatatatataactcaattggtact

SEQ ID NO: 21619 - DNA, 1359 bp, Oryza sativa
  ref <308>: DATABASE ACCESSION NUMBER: AK071883
  ref <309>: DATABASE ENTRY DATE: 2001-12-06
ttgggagaagccaatccacctcctccctcccctccacctcgccgccgccgccgccgccgcatctgccgaaggcgggagccgtgaggggaaggacctgtggcacgaggtggtggcggcatggagttcctgcaggggcagagcacggagaccgccgtggccgtggcggtggccgtcgtcgccgtggccgccggcgccgccttcctcctcctcctcctccgcagcagcaagaagcccaagggctgcttggaccctgagaacttcaaggagtttaagcttgtggagaagaggcagatcagtcataatgtggccaagttcagatttgctctaccaacccctgcttctgtgctggggcttccaattggccaacatatcagttgcagagggcaggatgctactggcgaggaagtaatcaagccttatactccaactacgctggattctgatcttggacggtttgagcttgttattaagatgtatccccaaggaagaatgtctcatcattttcatgagatgaaagttggtgactatttatctgtgagaggacctaagggtcgcttcaaataccaacctgggcaagtaagagcatttggaatgttagctggaggatcaggcattaccccaatgttccaagtcacaagagcaattcttgaaaacccaagtgacaatacgaaagtgcacttaatctatgccaatgtcacatatgatgacattcttctaaaggaagaattggatagtatggttgaaacctatcccgatcgcttcaagatatactatgtattaaatcagcctccagaaatctggaatggtggtgttgggtttgtgtcaatggaaatgatccaaacccattgcccggcacctgctgctgacattcagatattgagatgcggacctcctcccatgaacaaagccatggctgaacacctggagaatcttggctacacgaaggaaatgcagttccaattctaagcctccacagtggaacaataccgaaataacagcgatggacaacattttcgttcaccttcagtagaaattgtctgaccctagtgccatttaatcaagatataggcgaactttaaacccgataaaagtagaatgtcaggtcagcatattttgagtgaaagcaaaaaacaacacctacttgagttggggtcagaagttcctgtagcccatcatttttgtgccaatgctgttcaattccagacagacagaatgaaactaattatttttttttcaatcagaattttggacacaaggttggaacgttcattgctccagctaactcgttgctcaggtgattaaagaatgaccaacttgtaccatttgattatgagaagaaaaacaactactgtacgtgcc

SEQ ID NO: 21620 - DNA, 3763 bp, Oryza sativa
  ref <308>: DATABASE ACCESSION NUMBER: AK071884
  ref <309>: DATABASE ENTRY DATE: 2001-12-06
gagttcagatttcagaagttcagatccatccaaggcgagccttcgtcctcctcctctgccagcctcgcctcgccttcccgctccaaccacctcgcgcgggagccagatccacgcgagctctcctcctcccccctccacgagatccccgccccccggcaatggacaccgtcgagaagatcgtcgaggacttcgcctccgacatcgccatgggccccttctcctccggcacgcgcctccgggacatgatacgggcgatacgcgcgtgcaagacggcggcggaggagcgggcggtggtgcggcgggagtgcgcggagatacgagaggccatcggcgagaaccagcaggagatccggcaccggaacatggccaagctcatgttcatccatatgctcggataccccacccacttcggccagatggagtgcctcaagctcatcgccgccgcgggatacccggagaagcggatcggctacctcggcctcatgctgctcctcgacgagcggcaggaggtgctcatgctcgtcaccaactccctcaaacaagatctcaatcactcgaaccagttcatcgtggggcttgcattgtgtgcgcttgggaatatctgctccgctgaaatggcacgggatctgtcgcctgaagtggagaggctgatgcgtagcagggacgttaacacaaagaaaaaggctgctttgtgtgctataaggattgtgagaaaagtcccagacttggcagaaaacttcatgggtcttgcttcatcgttattgaaggagaaacatcatgggattctgatatctgcagttcaactatgcacggaactgtgtaaagccagcaaagatgcactagagtacctgagaaagaactgcgttgaaggattggtgcgcatactgagagatgtctccaatagttcttatgctcctgagtatgacgttgctggcatatcagaccctttcttgcatattcgagttcttaaactgatgcgcattttgggtcaaggagatgcagactgcagtgaatatatgaatgatattcttgctcaggttgcaacgaaaaatgagtcaaataagaatgctgctaatgccattctgtatgaatgtgttcagactataatgggtattgaagctactagtggtttacgtgtgcttgcgatcaatattttgggtagattcttgtcgaatcgtgataataatataagatacgttgctctgaacatgcttatgagggccattactgtagatacacaggcagtacagagacacaggacgacaatattggagtgtgtaaaggatgcagatgcttctattcgcaagagggcccttgaacttgtttttttgttagtcaacgatacaaatgtaaagcctttgactaaagagcttgtcgactacttagattcagctgatccggatttcaaagaagatctcactgccaagatatgctcaatagttgaaaagttttctcaagagaagttatggtaccttgatcagatgttcaaggttttatccttggctggaaatcatgtgaaggatgatgtgtggcatgccctcgttgttgtaataagcaatgcatcagaacttcaaggatattcagtgaggttattatacatggctctacaagcatttgtcgatcagtaagagtggctgtttggtgcatcggtgaatatggtgaaatgctagttaacaatgttggcatgctgcaaggggaggaacctattacggtaacagaatctgatgctgtggatgctgtacaactcgctcttaaccgttactctgctgatgtgacaactcgagctatgtgtcttgtggctcttttgaagctctcgtcacgatttccatcgacatcagagaggataaagcaaatagtttcccagaataaaaagaatattgtgcttgaactacagcaaagatcaattgaattcagttccatcatacaaagacatcagtctatcaggccatctttgcttgagcgtatgcctgcattggatgaagctagttatttgctgaggagggctagtgctacacaagcaactcttgcagctgataagcctaccccagcagtcactcccggaggccttaagcttccaaatggtgtagcaaaacctgccaccagtcctttagttgatttgcttgacttaagttctgatgatgtgccagccattaccactgcttctaccactacagcacctaacgacttcctacaagaccttctgggtattggtgggataagttcatcacctgcagctgcaccttcatccgcaagcacagatattcttattgatcttctatctatcggatcatctccatcacagaatggcccgccagcagcagactctactcctgcccaagtcggtgcgattgtacctgaagctacggatgttctcagtagtttgtcatcaagtacatctgtttctgggaccaaatccgctcctgcagtacctcaagatatggatttgcttgatggtctgccatcaaatacatctgtttctggacctgttaatcactcatcaataacagctttccagagtgcaaccttgaagatcaacttcaatttcaaaaagcagcctgagaaaccacacgagactaccgtccatgctacttttacaaatttgacatccagttcttatacggattttgtttttcaggcagctgttccaaaggtagcatcatggcgcctttatctattgtcttctatatttgagctgtccttacttgcattagtgttatggcatgcaagttctcaaatctcacttgacgagcaattataattttccgtaatagtttcttgaggcgcaaatcttctattgtggtggtagtggtaccatgtggttgaccattctttgttcttttattaatttatatggttttatttgtctatcttgtactcttgaagctctctatacaaatttacattatagcaattgaaacagatgctaaaaaaatggcaagtgtgttttagttcattttattctactagtttaacaaggctaaaatatttgatgacactgatgggaatgtttcttgaactgtccaaatgaatttcagtttatccaattgcgactggatccagctagtggcaacattgttccagctagtggcaatggttcagttactcaagggttcagtgtcaccaataaccaacatgggcaggtatgtggagacttgcatccttcgctgccgtttcactttttatgcacacgtgtctgctgtcaacatgtgtataccattctgacaggtgcataatctgcagaaatttcagtctttgaaattcatgattttctttcaagttatggaggtcttcagatttagaacatacggatttcttctcatgttttggacctatttgccttgtgcttatagctgatttcgctttgcttttcttctgaacagaaaccacttgcaatgcgtatccggatgtcatacaaagtgaatggtgaggacagactggaacaaggccaagtgagcaattttcctgccggactatagtactgctcggtcagtgccattttgttgttacattattgtcgtgatagtcctctccatttgcgtaccttgttctacgtggttctttctgttttctgtctcccttggaggggttggttgatcaaaaatagttattttctcattcattcttcctatatattgtatagtagtagaaaggtacaatgtgaaatattcagattcatcaccaagataccaatgtactcatcagttcacgcctggtgtgctgtgtgcatcagtgactgaggaaaattaatgaaagaaaaatgacc

SEQ ID NO: 21621 - DNA, 3142 bp, Oryza sativa
  ref <308>: DATABASE ACCESSION NUMBER: AK071885
  ref <309>: DATABASE ENTRY DATE: 2001-12-06
gacatctgaattgtcaagcaaccacaactcttgtccatcctctccaatcttaagcaggataacacaaagaattcttccttcacattcccattcacaatccttccttattcaacaatttgtctgatacttgcatgcccacaggcagctcaaaaagctagctacttgtttctgacttgtatcatttctacatagatagctcaaagcctctcaaaatcctgcatttcttgctcaaatggatttttcaaggcatagattcttcaaattcagatcagcagctgtctccttcctctccatgtaactaatttcaagctctcaagatcagcaagttcagcaatcactagactagctaggctcactccttccacatatagtcacagctgctctcatcaatcaatctatctttccagcttccaggtgacaatcgagacctgaatttctgaactttttttccctctcgtcacttcgtcagtagaaatccaaggtttatattcctctgtactactacacaacagagtgagcgtagtacgtgtctcatcagcatcaaaaagtgacatactgaaagcacgccacaattgaggccgattgatagaatcgaattccactcaaaattgcacggtggaagagaatcccctgcgtgcttgatttgatcaggatttatattggaggcatccaattccatcactcaaccggagctgtctgtctgtagctatcgccctatttctgctagctcgtggcgtgccagtttaatttcttccaaaattctccggcctcacctcgcgtcgcgtcgcgtcgcttgcgttaggaggtgcctaagtagtggcttgtcggcgtcagatgagtgcagggacgtgctgctcggaggcgtccatggcgtggatcgactgctccctcctcgcctggctcctcttccgcgtcgtcttcttctcctgccacgccaagcagttcagcatcttctagcactcgatcagctaggctgaatccacatatactccagcatatatatacagcaactgattaagtaagctgttgctcgccgacgacggtggccgagcatgtccggtgcacggcggtgcggtggccggacgtcggagagaagctcggtggtgggcgacaacaggaatggatacgtcgagaccgacccaactgggcgctatggccggttgtcggaggtgctggggaagggtgcgatgaagacggtgtaccgagggttcgacgagctgcggggggtggaggtggcgtggaaccaggccaccatctccgacgtcctccgcaccccggacgccctccaccgcatgtacgcggaggtgagcctcctcgccgacctccgccacgacgccatcatcgccttccacgcctcctgggtccacccctcccgccgcaccttcaacttcatcaccgagctcttctcctccggcaccctccgctcctaccgcctccgctacccgcgcgtcagccgacgcgccgtcgccgcctgggcgcgcgccatcctccgcggcctcgcctacctccacgcccgcggcgtcatccaccgcgacctcaagtgcgacaacatcttcgtcaacggccacctcggccaggtcaagatcggcgacctcggcctcgccgccgtcctccgcggctgcgcctccgcccgcagcgtcatcggcacgccggagttcatggcccccgagatgtacgacgagtgctacggcgtcggcgtcgacgtctactccttcggcatgtgcatgctcgagatgctcaccaacgagtatccctacagcgagtgcgacaacccggcgcagatctacaagaaggtcaccgccggcaagctccccgacgccttctaccgcctcaccgacgccgacgcgcgccgcttcatcggccggtgcctcgtcgacgccgcccaccgcccctccgccgaggagctcctgctcgaccccttcctctccccgtctcagaaccacgacgatcacaatatcattgctcatgccactgcgccgccaccgccattgccattggcgtgcagtaattccagtgaggagcaagaggaggcggcgccggcgccggcagcaaagacgacggacatggcgatcaccgggaagctgaacaaggagcacgacaccatcttcctcaaggtgcagatcggcggcggccgcaacgtgcggaacatctacttcccgttcgacgtggcgaacgacacggcgatggaggtggcgacggagatggtgaaggagctggacatcgccgaccgggagcccacggagatcgccgccatgatcgagcaggagatcgtgaggttggtgccagggtacaagcagcacgagtactcgtacgcggatgacaacgacgatgatgacgtcagcggacaccctaatcccttctactacctctcctcttcgccgacctcctctcagggatctctctgcggagtggggtccacatcgtcagaggggtttcctggcccacatggaaaagttgactggtcaagagattactgttactaccctccaagcagcgtcagcgtgagcgacgacgatgacagcagcacgagctcactctctgctgcagtcagtgcaagcagcctgcatcagcagcagcagcattgctcggcctcttccagcagattggggccagcatctgcatctgcatctgaagacggaggaggaggacacgccggacggccacggcagcgagagggggaggaggagcggcggcggcggaggatgagtcggaacaggtccatggtggacatgcggagccagctgctgcaccggacgttggtggaggagctcaacaagcgcctcttcttcaacaccgtcggcgccgtccacgacatcggcttccgcgaccctactgctgctgcttcttcttcctctagctcttcccaccaccgccggagaagcagcaacaagatcgaccacaagcaccactacatgttctgaataaacttttcagagcaacttaatttgctactccattatgtacagagaatcagatgcagagtattagcctctgataatggattagggccgttcactttgatgccactttgaaccttactaaattttggtaaaactaccaaaaaaaagtggctacatttagtttgttgtcaaattttagtaactatatataagaaatcctgctaaaattttaacaagttgcc

SEQ ID NO: 21622 - DNA, 1359 bp, Oryza sativa
  ref <308>: DATABASE ACCESSION NUMBER: AK071886
  ref <309>: DATABASE ENTRY DATE: 2001-12-06
gaattggcgacgtcgtcttccttctctttccgcccgccacttcataccgccctctactcttgttgcttagctacctagctagctagctttcctctccactccatccacccacgcacctcaatcgatcgatcctccatggcggcggcggtgctggcggtgctgtgggcgtgcatgatgatgatgagcctagctccggcgagcttggcggcgtcggggttcgaggaggtgccgacgatcgcgttcgacgaggggttctcgccgctgttcggggaggacaacatggtgaagtcggccgacgggcgcacggtgagcatcaccctcaaccgctacaccggctccggcttcctcctccgactactaccaccatggcttcttcagcgcctccatcaagctccccaaggaccacaccgccggcgtagtcgtcgccttctacctgtctaatggagatgtgttcgagaagacgcacgacgagctggacttcgagttcttgggcaacaggtacaggcacgagtggaagatgcagacgaacgtgtacggcaatggcagcacggaccgtgggcgggaggagaggtatctgatgccgttcgacccaaccgccgacgcccaccgcttctccatcctctggcactcccgcctcatcgtcttctacgtcgacggcgtccccatccgcgaggtcccgcgcaccgccgccatgggcgccgactacccctccaagcccatggcgctctacgtcaccatctgggacggctccacctgggccaccgacaacggcaagtacaaggtcaactacaagcgcgggcccttcaccgccgtcttctccgacctcgtcctccgcggctgcaccgcccgctccgacatccgcctcgccaccaccgccgacgaccaggacaggtgcgccgcggcggaggaggacctcatggagagcgacgagtactcctcgaccatggccatgacggcgaggaagcggatggcgatgcggcggttcaggcagcggcagatgctctacaccgtgtgctacgacaccaacaggtacccggagccgttcccggagtgcgacgtcaacatggcggagcggcagatgtactggcagtggggggagtccaaggtggttcgcccccgcgtccgaccacgacccggccgccgctccaagcgccgcccctcgccggaggccacggccatcccgccgcccgtgctcgtctccttgcagcaagctgactagtctttgattagaatattctattctatgatgaggctctagctccatcataattctttgattaattttgcttccttcacatgcgtacatcgatcatactgtaattagtaccccctgatgatagagattaatttattgttacc

SEQ ID NO: 21623 - DNA, 1209 bp, Oryza sativa
  ref <308>: DATABASE ACCESSION NUMBER: AK071887
  ref <309>: DATABASE ENTRY DATE: 2001-12-06
gagtaccaatcccctctactctctctctctctcttttccttttcataactgtctgaaagtctgaatatgatgcatgcctgcatggtatgtcctctcctcttgggctcttgagtgctactagtatctttatccaagcaagaacaacacaattgtgcacaaagcaagaaactcaagtagctacctcctctcctaatctatatacgctcatcagcttatgtgcaactccagataccgacctagcagcttgctatctagagtatatatcaactcaactcaaggaggagaagaagaagaagaagaagaagtgagccatgaaggatggagtagcaggaggaggaggcgagaggccatgcatgtgctacttccacccgcgggaggaggtggtgggcgtgtgctcgcaatgcctccgggagcgcctcctcctcctcctcgcctccaagacctcgcctgccgctgcccacctcctcgccgaccgaccgctccaccgcaagaacagcagcatctctctccccaaggtgttcgcgctcggctcctccttcctccagcgcctcgactcctctcgccaccaccttcgccccgccccccacgactccgacgccaactccgacgccgacaccgcctccatcgctagcctcgatgattccttcatctccatcaagttcgaggacaacggcaaggctacgtgggacagccagaaggccgccgccggcgagaaaaagacagatacgacgaccacggcggtggtggagcacgtgaagcggggcggcgtaacccggtggcggaagcaggtggtggggcggctgctgcagctggcgcggtggaagaggtccggcaacggcaaggcggcggcgtgccaccagctggggatcgacggcaagaagacggcggagcggtcgtcgtccaaggggacgacggtgagggggagggggagggggaggagctggatccggaccctcaccatcaccaggcgcccacccgccatgcctctcagctaggagtagcttcttacctccctcactctcttcacgtactcttaatctcgtcggattgctctgaatatagtaatactcttcatttgtttactgtaactacatgcatattactacctagtactccgtagtagtatatgatatgatatccacggaggatcggattggaggtacatgtatatggactgacgaatgaatcacagctagcagacaaacaagg

SEQ ID NO: 21624 - DNA, 1749 bp, Oryza sativa
  ref <308>: DATABASE ACCESSION NUMBER: AK071888
  ref <309>: DATABASE ENTRY DATE: 2001-12-06
ggtacacacccacgaaggtgaggggccccatccaatccacacgaaatccatccccccgccgcgcgcgccaccgccaccgccaccgccaccctcgccgcggcgccgcctccactccactccaccgccgccgcctatataacccacctccacctcgcttccccggcctcgactccactgctccaccaccatgcaggcgcacgcccacacgctcgggctccgcatctccccgccgccgcctgcgccgccgcggcgggagacggacccgaggaagcgggtggtgatcacggggatggggctggtgtccgtgttcgggaacgaggtggacgccttctacgagcggctgctcgccggggagagcggggtcggcgccatcgaccgcttcgacgccggcggcttccccacgaggttcgccggccagatacgcgggttctcctcggaggggtacatcgacggcaagaacgaccggaggctcgacgactgcctccgctactgcatcgtcagcggcaagaaggcgctcgagaacgccggcctcggcaagggctccgatggccacaccaagcttgacaaagtccgggctggtgttcttgtgggaactggcatgggtggcctcactgtgttttccgatggtgttcaaaaccttattgagaagggatacaagaaaatttcgcctttctttatcccatacgctataactaacatgggctcggcattgctagcaatggatgctggttttatgggtccaaactactcaatttcaacagcttgtgcgacctccaactactgcttctatgctgctgccaaccatatacgtcggggtgaggctgatgttatcgttgctggtggtactgaagctgcaattattccaattggccttggaggttttgtggcctgtagagcactatcgcagaggaacgatgacccagaaactgcatctaggccatgggacaaagagcgagatggttttgttatgggcgaaggtgctggtgtactggtcatggagagcctggagcatgcgatgaagcgggatgcaccaataattgctgaatatttgggaggtgcagtaaactgtgatgcttaccatatgactgatcctaggtcagatggactgggtgtatcgtcctgtattactcagagccttgaagatgcaggtgttgcgccagaggaggtaaattacatcaatgcacatgcaacttcaactcttgctggtgacttggctgaagtaagagccattaagcaagtcttcaagaatccatctgatattaaaatcaattcaacgaagtctatgataggccattgcctaggtgccgctggtgggttagaagctattgccgttgtcaaagccataactactggatgggtgcatcctactattaaccaatttaaccccgagcctgaagttgattttgatacagtagccaacgagaagcagcagcacgaagtgaatgttgctatctctaattcatttggatttggaggtcacaattcagtggtagtatttgcgccattcaagccatgattccaattttttgcttcagaaaatatatagcctgcagcattttctggcagttggtaattagtgaggaattgctagatgtagcatatttgattttaccggcctccatcttcaagggagaaattttgatttgagtgtaaccggattatgatcattagatgccaattcttttcgggttcccgttgtgtatgttatggtgtgacagatctgaaatagtgtaaagacatcagtgatcc

SEQ ID NO: 21625 - DNA, 2064 bp, Oryza sativa; identical to SEQ ID NO: 15396
  ref <308>: DATABASE ACCESSION NUMBER: AK071889
  ref <309>: DATABASE ENTRY DATE: 2001-12-06

SEQ ID NO: 21626 - DNA, 1874 bp, Oryza sativa
  ref <308>: DATABASE ACCESSION NUMBER: AK071890
  ref <309>: DATABASE ENTRY DATE: 2001-12-06
gggcgcacacagtcgctcgctcgctcgcctgcctccccacctcaccagctcaccccacgcctcccctcccctcccctccccaaccctaatcccctccccgccggcgcgctcccctcgccgctcgccgccccccacggcagccgcagggcaagggaggggggagacactgcccctgcaggtgcacgcgccgtggcggcgcgcgcgctctctctctcgcggggaggaggcggacgcgcgcggcccccacccgccgggatcggcgcgctccagatccagcggtgacggcgggagccgagtgctaccgtccccaatgatcctacgagtagagctactggacttttactgggactgaggaccctgtacaaactgcctcatgcatgtgctttcttattggggctaaaagaatggagagttccagctctggttcttgtcctcagggtacagtgtatcattggtttgtcttgtttgcggtttggctttgtggcagccagcatgttctttcgcagaaaacaccacttgaaccaaaagataaattccttctatctgatccgccaattggtctctttgatccaatagagatttcaccatctgttcttccacacaatgctaacccagttgagccactgtcaccgatgtatccaaactacacatcatatgatccggtcttgactggaaaatgccatgtaaatttctcagcgctttcttatatgatggataaaacagcatctgattgttccattcctttagcaccactagttgctgatgtgatatgctgcccccaagttaatagcttgatgaatattttccaagctacatatggtgctggaaacaatacactagttctgaaccaggcttcagcaaatgcttgtttctctgatgttatgagcattctggcaagcaaaggagcaaacactaacatccctgagttatgtactctaaggccatcaaatcttacggatgcttcttgccctgtgaaggatattagcacatttgagaaaatagttaatgtaagcaagcttctagacgcatgcagcgatgttgacccactgaaagagtgttgtagacctgtttgccagcctgcaatagtggaagcagcagttcacatatcctctggaggagcaaacatgtttggaagttctagcatatctggaagtgatgctgggatcaacgtcgttagtgactgcaaaggggtagttcactcctggttatctatgaagctttcatcagaagaatcaaacactgcttttagagtattatctggctgcaaggtgaacaaagtttgtccgttggagtttgatgatccttcttccgttgttaaggcatgtggcaaggcatcttcttcaacgccctcatgctgtggggcattgcactcttacattgcaactcgccagaagcaaatatttgtaacaaatttgcaagcaattaactgtgcaaccatgttcggatcaatgctacagaaagctggtgtatcaaatgatatttatgagctttgtgatattgatttaaaagatttcagcctgcaagcatttggtcagcaaggctgtctacttcgcagcttacctacagacattgtatttgacaatgctacgggcattagttttacatgtgatttgagtgacaacattgcagcgccatggccatcatcatcatctgttcaatccttgtcactttgtgctccagaaatgtcattgcctgcattgcctgtcgcgccaacatctggaagctcaggcccacgtgtaaattgaattgcatttcattcttgtaaatgagcctttcccttctctgttcttttttgttcggtggatagcattgctgttatgtgttagagaggactgttgtaccatcagatatctgaacaatggaggtaaatttct

SEQ ID NO: 21627 - DNA, 1858 bp, Oryza sativa
  ref <308>: DATABASE ACCESSION NUMBER: AK071891
  ref <309>: DATABASE ENTRY DATE: 2001-12-06
gaaacggcccaaaaagcccaggaagcaaacatgttcagccttctgatccagtccgtcgacttcaccgacgacgcggccgcggccgcggccaccgccgtcgccgccggcgaaaccagcggcacctctcaccccctctccccgcgctccggcgaccctctccccaccaccacctccgcctccgtaacggcgcctctcgagctgcccggcgcgacctccgcctcgcccgcccgaaaccctaagatcaactacacccgcggcatcctacacctctaccgctcctcctcctcctcctcgtcgaccgcctcctacgcttccgccgtcgccgccactccatcctcctcctcctccggacccgccgccccgcagctcgcctccgactgcctactcccgccatggcgcggcacacggctcctggtgctcgccgtcccaacccacgtctcaccagacgacttcgtccgcttctgcggcccttacatcgagcacgcctccgatatccatgtcgtcagggatgatggggtggaggaccggtatagcgtgctcgtggagtttgaggatcagaagagtgccgatgggttctacttggacctcaacggttggaggttctcgtcatccgaggtagaggtttgccatgttctgtttatagttgctgtccaatatacaccatcaaccaagcctgcggtgactccaccagttggatccactgagctcccaacatgtcctgtctgtattgaaagattggatcaagacatcagcggaattatggcaacgacttgtgatcattcgttccagtgttcatgtgtttcaatgtgggtcaattcatcttgtccggtttgccagttttgtcagaagcagtctaagaatcctacatgttctgtttgtcaaacctctggaaacctatggatctgtataatatgtggttttgttggatgtgggaggtatgaagaaggccatgcaattaggcactggaaagaaactcagcactgctattcacttgatttggaaactcaacgtgtttgggattatgttggtgacagttacgtccaccgacttaatcactccaaaagtgatgtgaagcattccaagttcaagtcaaagtgtaaatattctggtgacaaatgtgcaaactgctcctgcaatgatgaggaagatatcggtggtgctattttcagcagcaaagcagaaacaattgtggatgaatacaaccgtcttcttgctagccaacttgaaactcagagagagtattatgaggctcggctgtcagaagctaagaaagaaaaggaacaacacatttctgatgcagtggataaagctgtaaatgataagagtaaagaaatccaacaaaagattgagaatgcaatgttggagaaaaagaaacttgcagatatgaatgaaaaactcacgaagaaccaggatatatggcgtcgaacactaaaagaaattgaggaaagggagagggctcaactgaagttgaaagatgatacaattcgtgatctagaagaacagataaaagatttcaaattttccatcaagttacagaaatcgatcgagaagaataaaaatgctgatgatctcaaaggaggtttgctggtgccactcccaatggtgccagattctggaaccaaaggtaaaagatcgtcaagaacaagcaagaggaggaaccagtagctgcatctgttgtacatgtaacaagcaattgcttggctaatctgtgccaaccaggataatatgatacattctgaaaaaaagagagagtgcaatattattctactacagatagctgccttttatggaacagaaaattgaaccaaaggatagcatagtttacaattttacattacatacagggctatatatattt

SEQ ID NO: 21628 - DNA, 1416 bp, Oryza sativa
  ref <308>: DATABASE ACCESSION NUMBER: AK071892
  ref <309>: DATABASE ENTRY DATE: 2001-12-06
ttatgggcatctcgttgggatgtctatcttctttcaagtgatagccagatccattggttctcaatcattaactcactgatgattgtccttttcctttctggcatggtagccatgatcatgatgagaactctttacaaggatattgcaaactataatcagcttgacaaccaggatgaggcccaggaagaaactggctggaagttagtgcatggtgatgtcttcaggccacctgtccactcaggcctcctttgtgtttatgttggaactggtgtgcagttctttggaatgacactggtaaccatgatgtttgcgctacttggattcttgtcccctgcaaaccgtggtggactaatgactgctatggtccttctgtgggtgttcatgggtgtattggcaggatacacctcatctcgcctatataagatgttcaaaggcactgaatggaagaaaatcaccctcaagactgcctttatgtttcctggtataatctttgcactctttttcttcctaaatgccctgatctggggtgagaaatcatcaggtgcagttccctttggaacaatgtttgctctgttcctcctttggtttggcatctctgtgccgctagtctttgttggaagtttcttgggcttcaagcagccagccattgaggacccagtgaagacaaacaagattcccaggcaaattcctgagcaggcatggtacctgcagccagctttctcaatacttgctggtggcatattgccatttggcgctgtcttcatcgagctcttcttcattctgacatcaatctggctgaaccagttctactacatcttcggcttcctcttcatagtcttcatcatcctcatcgttacttgtgctgagatcacaattgtgctctgctacttccaactatgcagcgaggactatcactggtggtggagagcatacctgactgctggctcttcagcactgtatctttttgcttatgccatcttctacttcttcaacaagctggagatcacgaagcttgtttcaggcattctctactttggttacatgctgatcatctcgtatgctttcttcgtgctgactggtaccattggcttctatgcttgcttctggttcgtgaggaagatatatgcttctgtgaagatcgactgatgagacagctcgaaacatcatctgctacaaatgtgatacaatggtgtctcccaattaacatatataaatggaagtgggatgtgcgaccggattggatggtttttggtagaacatgtagtctggtaggaggtaagaattgcctgatgttcaagagagttcttgatactccctgtagcgtgacatgaattttgtaactctgaagatgtttgagtgcttcttgtaatattccatgtctctttatcttacggcttcacatatttctttttctgg

SEQ ID NO: 21629 - DNA, 1792 bp, Oryza sativa
  ref <308>: DATABASE ACCESSION NUMBER: AK071893
  ref <309>: DATABASE ENTRY DATE: 2001-12-06
tttcataaaatatgagcgagagggtacttcttacagagatccaaatgagcgtgtaaaagattggaatgaagttgcaattgaattggttcctgggccactgctaaagacgcaatctgctcggtgcatggattgtggcactcctttctgtcatcaggagggttctggtgctggttgtcctcttggaaataagattcctgaattcaatgaattggttcatcagaatagatggcatgaagccttggatcggctacttgagacaaacaatttccctgagtttactggacgagtttgtcctgctccttgtgagggttcgtgcgtacttggcattatagacaatccagtatccataaaaagcatagagtgcgccatcatagacaaaggatttgaagagggatggatggtaccacggcctccacttcggagaacaggaaagagagttgctattgttggcagtggcccagctggtctagctgctgcagaccaactgaacaaaatgggccatttcgtgactgtctttgaacgtgctgaccgtattggaggactgatgatgtatggggttccaaatatgaaggctgacaaagagggcattgttcagcgacgtgtcgagttgatggctaaggagggggttcaattcattgtgaatgcccatgttggaagtgaccctttatactccgttgaaaagctccgctctgagaatgatgccattattttggcctgtggagctacaaagccaaaagatctccctattcctggacgggagttggcaggcatccatttcgctatggaatttcttcatgccaataccaaaagtttacttgacagcaacttggaggatggtaactacatatcagcccaagggagaaaggtggttgtcattggtggtggagacacaggcacagattgcattgggacatccattaggcatggttgcaccaaccttgtaaatcttgaacttttgccagagccaccaagaaagagggcacctgacaacccctggccccagtggcccaggatcttccgtgttgattatgggcaccaggaagcaactagcaagtttggaaaagatccaagaagttacaaagtcctgacgaagcgatttatcggagatgagaatggaaatgtgaaggcccttgaggtaatacgtgttgaatggggaaaggtgaacggaaggttccaattcaaggaagttgaaggatcagaagaaattattgaggccgatcttgtcctcttagctatgggattcctgggtcccgaagcgactgttgctaacaagctgggtctagaacaagacatgaggtcaaacttcaaagctcaatttggaaactttgcgaccaatgtggaaggtgtatttgctgctggagactgcagacgtgggcaatcactggttgtttgggccatcacagaggggcgccaagctgcagcagccgtagacaattacctgtcgaaggatgatgaaggtgaaaccaatggcacagaggacattgctgtctcaagtgaaggtctggtccaacccgtagttgcataggccgagagaacatttctgcaattttgatacagcattgatgatgcgaagatagtagggccatgcattttttagctataaaaaggtaaaataaagggcctgtaaataatttacaagaaaagggggcccttttgtttatataagtatgataaaagggaaattttgcggacgcgtatattttttccctgtttcttcttgtgaagagatgcaaatcctgtgattataagagcaatgtctggtttttgttaaataaatgtgaggggattctgt

SEQ ID NO: 21630 - DNA, 2123 bp, Oryza sativa
  ref <308>: DATABASE ACCESSION NUMBER: AK071894
  ref <309>: DATABASE ENTRY DATE: 2001-12-06
ggtctacttacctcatctcatctcacaccaaaaacaaccaatccaaagttccaaaccaccacgacgacgacgagctagttgttagctacaccgatttggtgccagcgacaagagaagattttttggattgaggtgatgggggtgctcttctcgtgcccggtggacgatgagaccgcggcggtggaggacgccgctccggtggcggagcaggcggtgctgaaggcgtcgctgggctccggggggaggctgcggatcgaggggtcgctgagcttcaagacgagggagcagcagagtctccaggtggagaccaagatccccgccgtcacctcgccgcgcgccgcgccggcgccgatgccgagggagctcctccgcacgcgcttcgctgatgccgccgccgccgccgcgccggagagccccaagcacgaggccgcggcggtgacgctgcagaaggtgtacaagagcttccgcacccgccgccgcctcgccgactgcgccgtcctcgtcgagcagagctggtggaagctgctggatttcgcgctgctgaagaggagctcggtgtccttctttgacatcgagaagcaagaatccgcggtgtccaagtgggcaagggcaagaacacgagcagccaaggttggaaaggggttgtccaaggatgataaggctcagaaactcgcattgcagcactggcttgaagctattgacccgaggcaccggtatggacataatcttcactactactatgactgctggctgcagtgcgaaagcaaggagccattcttctactggcttgatgttggagaaggcaaggagattaatcttgaagaccggtgcccgagatggaagcttctaagccagtgcatcaaataccttggtccccaagaaagagaagactacgaggttgtgattgaggatggcaagttcatgtacaagaacagccgggaaatccttgacacatctggagggccaagagatgacaaatggatctttgttctgagcacatccaagaatctgtatgttggtcagaagaaaaagggcaaatttcagcattccagcttcctcgctggcggcgcaacgtctgctgctggccgactagttgtcgaagatggaacactgaaggcaatctggcctcacagcgggcactaccgcccgacagaggagaacttccaggagttccagggcttcctcaaggacaacaatgtcgacctcactgatgtcaagatgagcccaactgaagaggatgaggagttctggagcaggctgaggagtatcccttctgaccggtgcgccgatgccgctgacaacactgaagaagagatgaactcttctgaacaaactgtcaatcgccaaacgcctgaagccactgaaaccccaactgaagagatctcatcacaacacatccaagaaacaatcaacaatcctagcacaactctgccaagggtggcttcatcagaaggccccgcgacatcgaatgccggcgacaacggctcgtctgaagaaggaggagaagatcatcatcgtcaggaagagggcgatgagccatcatcgccgtcgtcgtcgtcgtctgtgccgagggagaagatccttgagaggatcaactccaagaaggaggccaagtcgtaccagctggggaagcagctgtcgttcaagtggaccaccggcgccgggccacggatcgtgtgcgtcagggactacccgtcggagctgcagctccgggcgctggagcaggtgcacctgtcgccgaggagcgccgccgccgccgccggcggcaggccgtcgtcccggttcgcgtcgccgcagaggtcaagcagcccgatggcgagagggtgcagcgagccattgacgccgagagaggcattccgctcgcatctgcagcagggagtgctgatcaggtgaactgatcatcgctggatggggagtggaaaattgtgatgatacaattcacctgttctttgccttgaacagggtgatgatacaaattgtgcatagaaagaataaggggtgggggtaaagaaaatcctacccatgtagatcttgtagtagagtctcaaaaaagagatcttgtagcaagagtgatatacacaaatcaaagcaaatcaatacaaattctttcattctttgttctt

SEQ ID NO: 21631 - DNA, 2074 bp, Oryza sativa
  ref <308>: DATABASE ACCESSION NUMBER: AK099207
  ref <309>: DATABASE ENTRY DATE: 2002-08-28
gacgtctctctcgcacactcccactattctcctgctcctcctccctgatcttccctctctcgctgccgctcctcttctcgccggccgcctcagcctgcggcgagctcttcgtccagccagtgcacccgaggagcttaggccggatcctgggatccgtaggagaaaccttgctcgggttccggagaatgtgaccggagcaaccgcggcttcaaatcagaaaaggctacagcaggggagcaacaggggcggtggtggcgcgcggcagcagcagcaccaggccggccaatggcgcagttgccatcaatgctgccgcgccggcggttggctcggcgccggcggaggtggccagattccactcccaaccaccacaacaggataggcagagtagatgggctggctgtttttctgccttgtcatgttttggatcacagaagggtggaaaacgaatagttcctgcagcacgtatacctgatggcaatgcgtcaactagtcgtggaaatgcacaccaatctggtagcaattccaaccaaaatgtggctctgaatttatctcttcttgctccaccatcttctccggcgtccttctcaaattctgcaattccttcaactgcccagtcacctaatcgcttcttgtcaatatctgcaaactctcctggtgggccaacatctaatatgttcgctgttgggccgtatgctaacgagcctcagcttgtctcacctccagtcttctcaacttacacaactgagccttccacagcaccactgacccctccacctgaactaactcatgcaactactccctcctctccagatgttccatatgctcggtttcttttttcagctatggatcttaaaactgctggcaaggatcacaacatgccgtacttatctacagcatattccggaggttcaggactccaggcatcttatccgctttacccagaaagcccttctagcagcctcatatcgcctgcttcagcaactccaaggactggtctttcatcacctatccctgagcaagaggtgcctactgcacattggaagacatctaggtccgcctgtggcacaccatattccagggcttcaccaatacctgagcaagaggtccctacggcacagtggaagacgtctaggtctgcctgtgacacaccatattccaggaattcaccgtccaatatttttgggcttgattcagctgcttctagaaactacatgctagataataacttctttcggccagctgcatctgcccagttctacctggatcaggctcagcagtcatttccatataataatggaggaaggattagcgtctcaagggacaaacaagacgctgaggaggttgaagcatacagagcatcttttggatttagcgcagatgaaatcgttacaactcaagcttatgtggagataccagatgcgcttgatgagggattcagtatatctccatttggaaacaatgctcctgctaccgaggtagataaaccactcttcaatgtaaaagtgaccacaagcccaaagaaatctgcagaccagctttccaacgactctccacataatgtggtgcacttggacatattcaaaggaacaaaaggaggggatctatctgaggatgaaggggtcgtgaaagattgtcatcctttcagaaaggcgatggatgaaatatctctaaaacccatagaagtcaggaagaaagttcagcctggacagtcatcttcctcagatgcagaaatcgagtacagaagggctaggagtttaagagaagccaatggagttttgtcatggcgcagcaccctggcaaggcaactacagtaacgatgtggtaatacgcaggataagatagaatgcagagttcccttggcctagcgttcatcaatttgagctgttgttagaagtaaaatctttaggcgaagagtagcccgtactgtatttctggggatttctactgccagatcatgctctggatatgtgactatcagcctgtattctatttaaattccaagttcgtcttttgtagacactctgttcgttagctgaatcacagaatcagtgaaatggaagtgcattttgaggag

SEQ ID NO: 21632 - DNA, 1536 bp, Oryza sativa
  ref <308>: DATABASE ACCESSION NUMBER: AK071895
  ref <309>: DATABASE ENTRY DATE: 2001-12-06
gttagtgaagtttattgaatcatgtttatactttatattttttttccaagcctagtgatctttgttacttgcattcacagttctcagtaacagagcattttagagatgggaatattcgccccaaaccccagcctggagtatttttcttctatgatttctcacccataaaggtagtaacaatggagagaaattcgtatgtagtcatgttcatttttctctttttatgattctatcttagcttgctctactcatcttctcaacctgtggatatgtgttgccaagctcatctgttgaatggctggctgtgttggtgtgaccattcttgctgcacatgcagaatgctccaaattcaccatctgttattattcagtactatttaattactttggacacaagagaagtctacaatacctttgtttcacctttatctattctgacactgcaggaccaaactggaatttgtaggctttaggtcatggagagtttctaaagttagttattatactagtcagtagctaaaagaatcagttcattgatgagatatatctgttaggagtatcctagcataaaatttggtattatccttttattatttttattatttgctgaatggctccaaaaatgtctgcatatgcatcgtaacactttgaatacaaaattgacagtgcatgtctatactcattcaaaagcctctagtggtggtggcagggaatttgccaccccactattgctttttgcagtttttacaaattgtcccctgatatttttctaatattgtggaatagttcaatatttggttcaaacaagtgaatagcagataatgaaataaacaaacaattgatactaagatatttgataaaatatatatttttcttacatattatgatattgtttttcttctgcccatagcaaagcttgggcattttgctagtactcaaaagtcaaaacttatacatgtggataacatacagtttcgtatcaatataacgattaactaattctcatattctcttatcagattgaaaggtactccttttaagttttaactctttagttctgtgacccactaaaatcttagttctccaccttatgtttttgcaggtaatatttacagaagaaaatagttccctgctccactatctgacgaacctatgtgctatagtgggaggggttttcaccgtctccggcatcattgactcgttcatatatcacgggcagaaggcactcaagaaaaaaatggagctaggcaagtacagatgatttacctgaaacatggactggccctcatgttccccaagttcccaagttccgtggcttgtaaaggatccattgcttaagacctgaagacgttgctttgctggaaggttttgctaaggccatcagaattgacgatattgcacattagttgatcaaaaactcgtttacatgtaaaaaaagacaatatcatagcgttgggcctgggggagtgctttgatgtctcagtgagactctttttgagtggccaaaactggcgaaatgagatggatagattaaatc

SEQ ID NO: 21633 - DNA, 1861 bp, Oryza sativa
  ref <308>: DATABASE ACCESSION NUMBER: AK071896
  ref <309>: DATABASE ENTRY DATE: 2001-12-06
ggtcggctcgccccccgtcgcctccctttcttcctcgtctcctcctccttttcacacgcgcaagctgctcgagcgagcgcgctcacactatcacagggaggggagcaggagagggaggagatgccggtgccggggagccagaacgggcggccgaggccggcgaaggcggagaccatccacggcctcgcccgcgccggcgacctcgccggcgtccagaggaagctgcaggagaatcccgccctcatcaacgaccggaaccccgtcatgtcccaaacaccgcttcatgtcgcagctggctacaataacactggcatagtcaaattcttgcttgatttccaaggcacggataaagttgagctggaagcaaagaacatgtatggagagacacccctgcacatggctgtgaaaaacagttcttgtgaatcagcaagattgctacttgaacgtggtgcacatatagaagccaaagcaaataatggcatggcaccattgcatttagctgtctggcatgcacttcaatctggagattgtagcaccgtaagcgtgttgctaagctacaatgcggattgctatgcaaaagacgatgaaggcaaaatcccttcgaatcatattcctggaggagctggtaatgagaagctgcagaaactcctcactcgccatatggaagagcaaagaaaacggaaagccctcatgtcatgccgtgaaggaaaagcaatggcggagtttgaagaagcaatatcacaaattgtaggattacaggacctcaaaatgcaattgcgtagatgggccaggggaatgctttttgatgagaaacgacgagctatgggcttagggattgctagcagaagggctccccatatggcatttcttggcaatccaggaacaggtaaaacaatggttgctcggattcttggaaagcttcttcatatggttggggttctccctaccgacaaagttactgaagtacagcgaactgatcttgttggagaatttgtggggcacactggaccaaaaactaggcgaaagatacaggatgctgagggtggaattctgtttgtggatgaagcttacaggttgataccgatgcaaaaatctgatgataaggattacggtgtggaggccttggaggagataatgtctgtaatggacaatggcaagatagttgtgatatttgctggatactgtgagccaatgaagcgcgtcatcgcctccaacgacggcttctgtaggagggtcacaaagttcttttattttgacgatttcaccacaacagaattagcagagatcttacatctgaagatgaataacccaactgagagcagtttgctgtatgggttcaagctggacccaagctgcagcatcgaggtcgttggagagctgattgccagggagacaactgaacagcggcgtaaacagatgaatggtggccttgtagacacgctgctcatcaatgcccgtgagaatctagatctacgtcttgatttcaactgcgacgatgcgaatactatgatcacaatcacattggaagacctggaagctggccttaagcagatctccaaacagcggcagttgcagtgacaccaaccaatttggagacaaatttttggttataattggaagctcatcgacatcagacaaagtttcagtcaggttcaaggattttgatggaatcaaatagtgtgatttggtccaatttttttgctggctattctttctgttgtatctattcacattggtaggtaagatttatgcccttctacaatagcactaatacgcatgtagttctttattattcccattgaggtatataagcctttgtaaatacatttcttgcattacgaagcatcttttagaggtgatg

SEQ ID NO: 21634 - DNA, 2346 bp, Oryza sativa
  ref <308>: DATABASE ACCESSION NUMBER: AK099208
  ref <309>: DATABASE ENTRY DATE: 2002-08-28
gcctcctccccctctcccgtctccgctactccaaacttaattttgatttctcgccggagaattcctcctccgcctcccggctcctcccctccgccctcgcttccgcaggcgaactaaaccatggcgacaggtcaaattttctccaaaaccacccaagcgttattctataattataagcaacttccgatccaacggatgcttgattttgacttcctatgtgggagagaaacaccttctgttgctggaataatcaatcctggttctgatgggtttcagaaacttttctttggacaagaagaaattgccattccagttcatcctacaattgaagctgcctgcaatgcacacccaactgctgatgtatttatcaactttgcatcctttcggagtgctgccgcttcttcaatgtcagctttgaagcagccaacaatcagagttgtagccatcatagcagagggtgttcctgaatcagatacaaaacaacttattagttatgcacgtgccaacaacaaggtaatcattggaccagcaacagttggaggaatccaagctggtgctttcaagattggtgatactgctggaaccattgacaacattattcaatgcaagctttacaggcctggatctgttggctttgtttctaaatcgggtggcatgtcaaatgagatgtacaacaccattgccagagtgacagatggtatttatgaaggaattgcaattggaggggatgttttccctggctcaactctgtcagaccacatcctgcgtttcaacaacataccttaggtcaaaatgatggttgttcttggggagcttggaggaaaagatgagtattctcttgttgaagccctgaaacaaggaaaggttcagaaacctgttgttgcatgggttagtgggacatgcgctcgtctattcaagtctgaagtgcagtttggccatgctggtgcgaaaagtggtggtgagttggaatcagcacaagctaagaaccaggcactaaaagatgccggggcagttgtccctacttcatatgaagctcttgaaactgcgatcaaggagacatttgagaaactggttgaggacggaaagatctctcctgttactgagattacaccacctcctattccagaggatcttaaaaccgcaattaagagtgggaaggtccgagctcccacacacattatctccactatctcggatgacagaggcgaggaaccctgctatgctggtgtccccatgtctacaattattgaacagggttatggagttggtgacgttatttcgcttttgtggttcaagcgcagtcttcctcgttactgcactcagtttattgagatgtgcatcatgctttgcgctgatcatggtccttgtgtatccggtgctcacaattctatagttactgctagggctggaaaggaccttgtttccagcttggtatctggtttattgacaattggcccccgttttggtggtgcaattgatgatgctgcccggtacttcaaagatgcatatgatagaaatctcacaccttatgagttcgttgagggtatgaaaaagaagggaatccgtgtccctgggattggtcacaggatcaagagcagagacaacagagataagagagtgcagcttctacagaaatatgcccacacacatttcccttctgtcaaatacatggagtatgctgtccaggttgagacctacaccctgtcaaaagccaacaatttggttctgaacgtcgatggtgcgattgggtcgcttttcttggatcttctttctggcagtggaatgttcagcaaacaagaaatcgatgagattgttgagattggttaccttaatggactctttgtgcttgcgcgttcaattggtctcatcgggcacacctttgaccagaagaggctcaagcaaccactctaccgccacccatgggaggatgtcctctacaccaagtgaagactcggttgttcttaatattacctagatattccagctttgtacacacttcaaaaggtcaagcgaaattgcataaaagtgaacgccgatgaaactagggggagaagaatggggtcaccggtgaccgctgttgttgcgtgtttcaagttagttgcaaattgagatctgttcctgatttttgtcaaagcaagaaccattaggacaacatgggggatattggaaatttactgtatcatcgtgtactatcgattctctcaacgaaaaaaaaaatctagtctgatgctaatgtgttcaccggtcgtggagagtgttgtaatgtttgtgattgtcaatgtgccacttcgataggcatcatttttgctattaaaaataaaataaaatttgcatgtctttcctgct

SEQ ID NO: 21635 - DNA, 2222 bp, Oryza sativa
  ref <308>: DATABASE ACCESSION NUMBER: AK071897
  ref <309>: DATABASE ENTRY DATE: 2001-12-06
gggagcaagtggtattgatggtttgcttagtacatcaattggatttgccattggatcaaacaagcatgtattctgtgtgattggtgacatatcttttcttcatgataccaatggattgtcacttctgaaccaaaggtttacagtttgaatctattctatgctatccaccaccgtttgtttttctgcgagtcattggctcattgtcatttccttaatttatttttcattgacccaagcatttgtttttgcattactacttagtcaaagaaataaaaagaactacagatattctctctgtaaagctattgtataaccatctacttaaatgaatatttatttctgataaagtgataatgcatctcacattcctgaaggacgcagaggaaacccatgacagtaattgtcattaacaaccatggtggtgcaatcttcagccttctaccagttgcaaaaacagcttcactccaaattttggagaaatttttctacaccttgcttatagaaatacaattttaacaatatgcctgcctgatgctaacgtagcatcgctgttactgattctgggatttattagatgttttctgctgagacttctgcctgttacattattggttatggagtcagctgtggatacaacaaataactttctggtggcaattttgcatccccagcattctcatgagttgtatttcaggataaaacatattctagttcagacaaaagctgaacttcatgatgccttagtgaagtcccatgaggggcatgttgattgtgttgtcgaagtggagaatcgcattgttgataatgccaactttcataggttttatattcaaactagttcttttgattattttggtctacatcgcgtttatatgctcattctcattctgcagaattataagcatgttcacagaccatagtgcaaccatgcatctggcatatcttctgggaggtccatattgtaaggatggggtaaatggcttttctgttggtagaatacatgcagcagaatacatgttttacaggatccaacttgctgcaccacgtacatctgggatatcagaaagcagcttctttcatgaaggtttcatactaaagttatgtgtgggtgacagcattgtgggattcggcgaggttgcaccaattgaaattcatgaggaggatctgttggatgttgaagaacagcttaggtttctctttcacagaatgaaagatgctgagctagatgttgttcctttgttgagaggatccttctccaattggatatggacaacccttgggattcctgtaagttgacttaagaaaattttctgtgaaaaacatacgagagactgatatttttccgcgtgttcttcttcacagccttcttcagtattccctagtgttaagtgtggtctagagatggctattcttaatttgctggagtcacaacgaatagatagatcctatggtatttttactggctccaatgtggtcgaatataatcagagcagcactgcaaacatacagatatgtgcactcgtagactcctgtggcactccaatggatgtaacacttgctgttgtcaaacttgttgctgaaggtttcaccaccgttaaactgaaggttgggcgtcgcgaaaatcccgctgaagatgcagctgttattcaaaaagtaagggaaattgtaggatacaagatcaatatccgtgctgacgcaaataggaaatggacatatgaacaggcaattgattttggatccagggtaaaaggcttatgtttgcaatacatcgaggaaccagtggactctgtaaatgacatcatcaagttctgtgaaaatagtggcttgcctgttgcactagacgagactatcgacaaccttacaggggatgtaatccctaagctacatcaattttcacatccaggaatagttgctcttgttataaaacccagtgttgttggtggctttgagactgcagcttatatagcaaaatgggctcacatgcatgataagatggctgtcatcagtagcacctatgagagttctgtaggtttggcaacctatatacagtttgcacattatgttgacagacaaaatgacataacatccagaataaagaacagaggttcttgtggaaatgtggcacatggacttggaacataccaatggttaagggaagatgtttcagatcaaaagttaaaaatccatgcgccaccacttggtgatggaatcagagcttcggc

SEQ ID NO: 21636 - DNA, 3055 bp, Oryza sativa
  ref <308>: DATABASE ACCESSION NUMBER: AK071898
  ref <309>: DATABASE ENTRY DATE: 2001-12-06
gtcttcttgcattggagtagcagcaaagcaagctgaacaagctgtccctcccgggaaaaacacacaggagctgaggtgcaagatgtctgcttgattgcctcctgcttcacttcactgcttctcttccttctccctctcctctctgcaatcttcttgtatttttctccctagctctcctgcatcagcatcagttcttgcctgtggctaaggatcttttgatcttcaaagggagagaaaaggatcttgcctgagcttcagtttcttgtgctgcctcctcctctgtgtttgtgtgatccaatttccaacttggaggagttcttggtttcctggcattgtgctttattggacccagagcttgacaagattgggtcaatagtttgccaatctagagagagagagagaatacttggtttcttggcaagggggacaccagggcatagatctttgtagttaatagttgctcttgccctctggactgaggagtaaatagttgtgtgccagtggtctcttgcttcatcttggtcttgtggttctgattttctggtgattgttggagacttggaggagtaaagtaaagggtgaaaaaaagaagggaaataagaagaaaaaaaggtgacagattgaggttgttcttagtgtgtcaagatgaagtatatgaagcttggatcaaagccagatgtgtttcagacagagggaaacaatatcaggttgtcgcaactgagttggcaacggacatcgtaatcattgtaggggaagtgaagttttatcttcacaagttccctcttttgtcgaagagttcgcgattgcaaacattggtggcatcgacaaacgaagagagcaacgacgaaatagacatctccgacatcccggggggacctgcagcattcgagatctgtgccaagttctgctatggcatgatcgtcaccctcaacgcgtacaacgtcctcgcagcccgctgcgcagccgagtatcttgagatgttcgagacgatcgacaaggggaacctcatctacaagatcgatgtgttcctgtcctcaagcatattcagaacctggaaggactccatcatcgttcttcagacaaccaagtcactgctgccatggtcggagaacctcaaggtgatcaaccactgcgtcgattcgatcgcgacgaaggcctccatcgatccgtcagaggttgagtggtcatacacctacaacaggaggaagctaccgtcggagaacggcctcgactcgcactggaacggcgtaaggaagcagcagatggtgcccagagactggtgggtagaggatctctgtgaccttgagatgtgcctgtacaagaaggtcatcatggccatcaaggccaaggggagaatcagcagtgaggtgattggtgaggcactgagggcttatgctcacaggaggctgttcagctcactggaaagtgctgtcagcaatgggcttgactgcacaaggcactctgcagctcttgagaccatcatctccctgcttccatctgaggaaggttcagtcccatgctctttcctccttaagcttctcagagcctcatgcttgttgggatcagatgaggcgtgccgcgacaatcttacgaagaggatcggcgcgaagctggatgaggcttcggtctcggacctccttatccccgctaactccgacgaggccgccatgtacaatgtggacatgatctcggcgatgctggaggagttcatggcgcagcaccgcgaggacgatgatggcgccaagctacaagaggatgatgatcaggaagccatggatggtgatgatgacaacctgaatggtgtctcccgcagctcgaagctcgcgatcgcgaagctggttgatgggtatctggctgagattgcgaaggaccccaacctcccactctcgaagttcatcgccctcactgagatggttcccctcgcaactcggcccgtgcacgacgggctataccgcgccatcgacatgtatctcaaggagcatccgggtttaacgaagggggagaagaagaggctgtgcgggctgatggactgcaagaagctgtcgccggaggcgagcatgcacgccgtgcagaacgagcgcctcccgctccgcgtcgtcgtgcaggtcctcttcttcgagcaggtccgggcggcgtcgtcggcgtcggcggcggcggccgccgacatgccgccggcagcgcgctccctcctccccagggagcaggacggcaactcgtacggcagctcgaggtcgacggcgaccgaggacgaccagtgggcgccgccgccgacgacgacgtccgtcgacgtcacctccttccggtcgatgagcctcgccaacaacaagaacggcggcgtctccggcggcggcggcgatcaggccgcctgcaagaagccgccgccgtcgtcggcgtcagcgaaggggagcggcggcggcgggctgatgccgaagaagatactgagcaagctgtggtctggcaaggcgagcagcggcgagaacagcagctccgacacgtcggagagccccggcgaggagacgaggtcgacgccgtcgcggaacacgaggcattcggtgtcctagctgaccatctctccttcttcttcctcctctcgctcttgggagaagtacacgctgtacgcgacgacgccatggatatggtctactccctccgtccaaaaagtgaatctagctctgtatgtgacacattatagtacaacgaatctggatagaaatatgtctagattcgtagtactaggatgtgtcgcatcgagtgttggttttttatgggacggagggagtggtaattactggcaaaatcatcatcatcttctggttaatcttgagccctaacagttgatctacttagtgtgatggcttggttattattagggataggttttgtaaaatttttggtggcaatataaaggagaattaatgtatgtttcaaaatggggaagaattgaagtaggtttcatccgccaagttgtgtacacacacacttgcatttccattgtacagctgttatttatatcattgttatatgtgtttcctatacaatcaattattcaacagcg

SEQ ID NO: 21637 - DNA, 2088 bp, Oryza sativa
  ref <308>: DATABASE ACCESSION NUMBER: AK071899
  ref <309>: DATABASE ENTRY DATE: 2001-12-06
gcgggagtatttgtgcgtttttatttttgtttttgggtcgcactgttcgatcgtagcatccatgaccactgtggcatcgctgtctttgctgccgcacttgctcatcaagccttccttcaggtgttgctccagaaagggtgttggtagatatggaggaatcaaggtgtatgcggtgctcggtgatgatggagctgactatgcaaagaacaacgcatgggaggccttgttccatgtcgatgacccggggccaagggttccaattgcaaaaggcaagttcttggatgtcaaccaagctcttgaggtggtccggttcgatatccagtattgcgattggagggcgcggcaggacctcctcaccatcatggttcttcacaacaaggtggtagaggttcttaatcctttagcaagggagttcaagtcaattggaaccttgaggaaagagcttgcagaattacaggaagaattggcaaaagctcacaatcaggttcatctgtcggaaactagagtatcatctgcccttgataagttggcacaaatggagacccttgtcaacgacagactgttgcaagatggaggctctagcgcatctacagccgagtgcacttcccttgctccaagcacgtcatcagcgtcccgtgttgtaaacaagaaacctcctcgccggagtctgaacgtgtctggtccagtgcagccatacaatcccagtctgaagaacttctggtacccagttgctttctccagtgacctaaaagacgatacatggtgccaatagattgttttgaggagcagtgggtaattttccgaggaaaggatgggagacctggatgtgttatgaacacatgtgctcacagagcttgccctcttcatcttggctcagttaatgagggcagaatccaatgcccttaccatggttgggagtattcaactgatggaaaatgtgagaaaatgccatccacaaagatgctcaacgtgcgcatccggtcattaccatgctttgagcaagaaggaatggtttggatatggcctggcaatgacccaccgaagtcgactatcccttctctgctgcctccttcaggatttacaattcacgcagagatagtggtggagctaccagtggagcatggacttcttctggacaatctattagatcttgctcatgctccttttactcatacatccacctttgccaagggttggagtgttccaagcttggtgaagttcttgacaccttcatctgggcttcaaggatactgggatccatacccgatcgacatggaatttcgaccaccatgcatggtgttgtcaaccattggcatctcaaagcctggaaaactagaggggaagagcaccaagcaatgttcgacgcatctccaccagctccatatctgtttgccctcctctaggaataaaaccaggctgctctaccggatgtctctcgacttcgctccatggatcaagcatgtccctttcatgcatatactatggtcacattttgctgagaaggtcttgaatgaggatcttcgactcgtgctcgggcagcaagaacggatgatcaatggcgcaaatgtctggaactggccagtatcatatgacaagcttggtatccggtatcggttgtggagagacgccattgagaggggagtagacaggttgccattcagtaaccaaagtgagagtggatcatagtagctgcattgccaatagcctcttttcaattcttgtcgtatttcttggcgagatgaagatgaagatgaagatgatgatggccagaactagtcagtggatgtatatgcacagtttgtttaggcgtgcgtccctgcatggttggttcaccatctccctgagcttcgttgcagattgaattgggttctggagaggaaaggctaatggaaggagagaatgataggcgacgtcattctgtgtaattttaagtgtacactagcgacagcatcacgggatgcaattgtaatctgaggttgatttgtttttcttctttttttttttcctccccttttacccatgtaaaagtcgatcgcatgtcacgctatgatgcatatatatgatcatactattgattattgagccacg

SEQ ID NO: 21638 - DNA, 1589 bp, Oryza sativa
  ref <308>: DATABASE ACCESSION NUMBER: AK071900
  ref <309>: DATABASE ENTRY DATE: 2001-12-06
gtacttgtagacactgaggattctatgaaccaagactctaagaaagagcaggcacttgtagatattgaggatcctacaacccaagagactaataaagagccaagccaaagtgccagtgtgcagtcaccatttgagcaactagcgcttccagcacctccggtgtcaaatggctcagcaaccccagcaccaaaatccgatcttggcgtcgatcttcttagctgggatgacaacccatctacaacagaaaattcactagcgcttgtcccagttactgatccagtagttgattctactccaagtcaaaatgcactagctatcgttgacatattctctcaaaacaacacaaccaataacattgccaaacctgcggatccctttggtgttaattctagctctactcttcctggatcacagccatacaatgctccaacccagcatcctctgcaagcacagcagcagcctcagcaggtgggcctctatcctaatgggggagctgtgaaccctggaacatcataccccacaagttctgggtggaatggtcaaattgcgaacaatgcgacgcctccagcgcagcaaacagtgaattatgatgagcaaagtggagcccttcccccacctccttgggaagctcagtcagcgccaagcggcgacatgtcaaatggcggtatgcagtctcacccggtgtcaaacggccaatttggaggtatgccatctctcccaacaccatcaaaccagatgggtgggatgcagcccttgcacccgcagatgaaccagatgggaggtccacaagcccaccaaatgtacaacaaccaacaaccgggagccatgcaacccagccaacctgctgtaacccagatgcaatcaggctttgcgaaccaattcggttcgatgccaccacactccatgccaggaatgcaattccccgggatgcaaccttcgccgatgccaggagcgcagccagtcatgatgtatgcgcaaccgatgatgatgccgggtatgcagtttgcagccatgccgcaaccacgaatgtatggcccccagatgtcccagtaccggcttgtgcagcagcaagcggcacaatactacagcaacagccaagggaggccaacatactacgctggtatgaatgacctctcccagaaaatgtatggcctctccatgcaagacagctcttacatggggatgaacagctcgccctactctacaacaccttcatcatcatcttccatggggcaaccatcgaagcctgaggacaagctgtttggagatcttcttagcattgccaaaacaaagcagaacaaggcttaatgagaaacaatcaaatggagtattaaaaaaaaagtgtgaagaggtctaatatctcttgtgtaattgttacacatttttttccccacgtggcttgatcatacgctgttgtagcatttgaatgtataatcttgttccggttttgtacgatgcccggccccgattgatttcatttgattcgttatacatacagtaccgtgtgtactgatcacggccgctgagaggatacgctggtaaattaattgatgatctagtataataagcatgtatttttcccccctctg

SEQ ID NO: 21639 - DNA, 2072 bp, Oryza sativa
  ref <308>: DATABASE ACCESSION NUMBER: AK071901
  ref <309>: DATABASE ENTRY DATE: 2001-12-06
ggttgtgagttcgcccgccgccgccgccatcccccatccatcccgcgagcgggcatgggcgccgtcgttcgtcctgctgcttccgcggcatcctggtgggcacatcctctgcctccaccgccgtctgcgccgatccccatccatcccgcgagcgagcaggggcgctgttgttcgtcctgctgcttccgccgcatcctggtgagcacatcctcggccgccgccgccgcctgcgccgatccccatccatcccgcgagcgagcagggacgccgtcgttcgccctgctgctgcttccgccgcatcctgatcaccgatttgaaaatcgccgctgatggaagggatgctgccatctgatcctccgggcagtgatgatgatggaaatggaacgaacatgtggacaggacagaaggacaagctggccctagacccttgtgtttccggtgacaccaatgagaatgcacatgcctgcacctcattgacagctgtgcatcaggttcttgaagaatctaccaacaatactgtgcatgctatggacatgggcgtagttacaaggcaagatgatccgctgaaagcctcagaagaagatatcaatcaacacaaagatgaacaagagctttggggcccaaacgtgcaaactagccaggacgactactttgattacgtcaagcagttgtctcccaacagtcgtcgcatagacaaatggtccttgctgagtcatgacgaaatgattgaggttaaggagcggcatgcacgctatcgcatcagattttgcaagatgctaaacaaagaatttgaggatacgatgaaggatccagcagagtactctcgaggcgaactgttgaaggagaattactttttgcgatatgagcgggatgaaactcttggttggtacttccatcctgtccacacctggcttgcaggcttgaatgactaccagaagctcgtcctcgtaaatcatgatgatagcactgaattccttgccagggatgactaccactcatgttttaatacatatgaagttgatgaggattatgtcaaatattgtgaagaactaccaaagaaaatcaagtggattggagactatgtagatttggatcggtcttctcaggagtggtcaaaaatggacaacactacgtttttccaagcgttaaagattgcaacaaacttttgccatatgactgttggtttagcccaatttgcatacatggagtatgtatgggacctgcgtgaaattagtcgccttaaggaatggccttatttcttacatgagatttggaagctagttgctaagcaaaagatgaatttcaatgatgctttgaaggtagtctatgaaatggatatgtttcatagtttcaaatttgcagtggaggctggactaaatggggacaaattgtttggattggaatataggttctctatgtgctctaaggatatttctggtgatgttgaagagggtaaagctctagatttgattacaaaggcagtttacagagaatttcatcacactcagaccatgtgtgggtatgcggcgaagaagatggatatggcgaaaaagattggtttggtctagctgacttggctgtagagatgcactttgctttcctctggttgatgactgtgattcaatactgctttcgcttgctgcgggtggtgtttggagtgaagtgccagggctcagtggtacgatagttgaggtgcgtcctgaagcagacggtgagataggcaggaagtgctgttttggggcaccagatgatacaatgctattgacctgtaaggattcttgattccgtttaactgtgtgttcagtgaagctgacattccatacaaaggcttgatctacaagagcttggatctcagctgggataaagtcaggtggattttcttcgattagagactccactggtctgtgtattaggcgatgtgcaattcgtccgaagaggacaaatgcagcttcagaagtgttgtctgcggtagtgagcacaactttgtatctgtatgtgtacaatatatatggtcattacaatttgtattgggaattcataaatgtgtagaatattgtgtgcggtgtttttcc

SEQ ID NO: 21640 - DNA, 1633 bp, Oryza sativa
  ref <308>: DATABASE ACCESSION NUMBER: AK099209
  ref <309>: DATABASE ENTRY DATE: 2002-08-28
gtggggcccacccgcaaaaaggacaccaccgccgcagcccaagcccaccaccaccaccgccgccgcgcggaccaaccaaccaatcactcgctcgccgccggccatgtccgccgccgccgcctcctccgcggcgggggactccgccaagcagccgctcctccaccaccagcgcgggaaccctccccacgtcgcgtcggtctcctccccgtctctcccctcggctcccccgggggccctcgcgggcggccgccgcttccccggcggcctcgacgtccccaacctcaagaagcgcggcggcgggacgcggagctggatccgcgtcgaggccgccacggcgtccgtgcagacgctggaagtggacaaggccaccatgatgcggcggtgcgagctccccgcccgcgacctccgcctcctcgacccgctcttcgtctacccctccaccatcctcgggagggagcgcgccatcgtcgtcaacctcgagcagatccgctgcgtcatcaccgccgacgaggtgctcctcctcaactccctcgacagctacgtcctccagtacgccgccgagctgcagcgccgcctcctccagcgcgccgagggcgacgagctccccttcgaattccgcgcgctcgagctcgccctcgaggccgcctgctccttcctcgacgcacaggcagctgaattggaaattgaagcatatcccttgttagatgagctgacatccaaaatcagtacactgaatttggaacgtgtacggcgattaaaaagtaggctagttgctctgacgagaagagtccagaaggtcagggatgaaatagagcagctaatggatgacgacggagatatggccgagatgtatctcagtgagaagaagttgagaacggaggcatccttctatggcgatcagtctatgttaggctacaattcagtaggtgatgggacatcgttttcagctcctgtatctcctgtctcgtcacccacagaatcacggaagttggagaaagctttcagcttgtgtaggagtaggcatgacagtgtgaagagctcagataacacagcaacagaacatattcaagagctggaaatgttactggaagcatatttcgttgtgattgacagcactctcaacaagctaacatcgctgaaggagtacattgatgacactgaagattttatcaacattcagttggacaatgttcggaaccaactgatccaattcgaacttttactcacaactgcaacatttgttgtcgccatttttggagtggttgctgggatatttgggatgaacttcgagacctcagttttcagcatacagaatgcattccagtgggtgctcatcatcactggggtgatcggcgctttcatcttctgcggattcctatggttcttcaagtacaaaaggctgatgcccctgtagatgatcatagcatccataggaccaatgaatcaaactcaattgtcgtctacgctgttgaggtacttgatcagaagcctgaatttctgcccgatgtaaattaccattcttttagaattctacagcatacctaccaaagaaattgaatgaaaaacaaaagttttcataccacgaggcctctactaaaaaggggtgatattataggaaaaataagatttaccc

SEQ ID NO: 21641 - DNA, 3294 bp, Oryza sativa
  ref <308>: DATABASE ACCESSION NUMBER: AK071902
  ref <309>: DATABASE ENTRY DATE: 2001-12-06
gggagcgccatctctttccttttctccctgttttgttctgattctcgacgatttcttggcccacgcatagggatttccccctctagaaccagcgcaggggaaggaaagatgggtccggtcgatcggcgcgtgccgttgtttccgccggcgcaatgatccccttggagcaatggaggtggtaggcggagggaaggatgggtgtggtgttcagaaccaagcaccggcggggagatgcggctgcataaggtgctgcgggtgtcgtggcgtaggaaaacggagaagaaccggaagatcaatgtgctacactgcgaagagttgagtccctgcgaaggtagaggtgttgcgggcgtatttcctttcgcgcagatggaaaaagctaagccgggtaaggtaacatcaagcacttgttcttcctttcagtttgaaagaaatgttgcaattgactggagcttggaaaatagagatagtagttttgaatacatggctgataattgattggaaataacctagatggaaaaacagtgttgcataatataaaagtttagatagatacacttagatggaaatacagtgtttcaaagatgccactaattggcttcaaagcttcattgtaacttcagatgtggacgaattttctgaatgtagacgtctgatgtcgtcgtggacagcaagcactatatttagagtagtgttgattaggttggcggcgacctttagtctgaaaacttcattcggttcctgaagtcaagagggagtgaaaaatatgtgtaagagatgtgtaacactaataaaatgtgagtcatagtagcttagtacttttcggagcagtaccatatttaagaagtcgctcgttaattcctttccatcccaggtctccatgaacttcaaagcatttaacccacatgaccaactaaccatagaaattgagaatgtcagttagcaataattgttagttaaaagcgtattgatgatatttcacctgtctttctgttgaggtacactctttgggcacagtggccattttgcaacatttgtgtcagtccaggatgttggaacaggacgttctttcaccgtgtaatcaatatacttggccacgccattgatctgttatgtgttaaaattacttagaacatatgttattatagcatataggaactgttattgcgatggagcttactaggtttttaatatcttcgcttgcattgtaccattgtggctgcatctgcattgagtcaagaatttgaatttcttggcatcttgcattaataacaattacgtaccaatgcgatttgtccctatttattggtaggaagaccttcaggaaatagcataagttaaagtagtttttggaaaggcataaaaataaatgatgacctgatttagtaccatatcatggaccatgtatctttgggcaaacgttgatctggattcaatgtatcttttacttggctttcctcttgtcttaccaacggcacaccaaacctggacttgcgtctctttctcaattagagcagaaccgtactgcctggtgtggccttgttgattgtcgtttatgagttctgtgtaagcttcaatgacctgttgcaaaataaaaaaaaatatagaaatgtatgggaaaggtagaaattattataacagataaaaataatcttaacgaggtgttcaaccattttgattttgatgaactatcaagcggcgttacaagtggcagtagatgtgcacgtgatagctctatgtcttgtatactggcaagaaccttagttttttctgactggaggatgtaattgattgttattttatctttcaatgtcaaaccaaggttcgctgatcctgaattggatatttgaattttgggctcgaatgtttttttgttatgtttgtagaatatgaaatcactttgagtttgatatgatggcttgactgtccttccgaactgacctcttagtctttctgcaatggttttgttattgtcatctgtctcagttgcttcatccccagtgattatgaacggagcttcctctgttccattaccatcaatctctttggctaaatttgtctcatcctagagaagaagacataaaaaattgaatgctcgaacaatagttttgtaaattagttcagtacaactcaccgtattatcttcatgcatctcttcagtatggtaggcatcctttcattgcctaaatcgaatgttcgattatcctcgactttgttgacatcagcttcttgtttgggtctaaatgcatcggcttgtatagggactgacttcctttttttggacagggtgtttttgatgtcctgtaagagttgcagttcatttagctatatattatgaacaaaagctatatattatgcagttcatttagccagtgctgctttatgcttacctcgatggctagtgtgtttttccggcatatttgttccacggaaagtaacttgtttgtcaatttgttctccatgaactgaatggacctttctaactgttggagcatgtcaacaagtactttgatgtgacctgaatgctacaagaaagaagcagttggttatgacattatgtgtaggaagtaattttttgttgataatgtgcactcaaaaaaactgagctaagaatgtattacctctacggctgcaatttttgctggagatttgattttcgtttcatggtcatcctcacactgatttagctctctgtcatcatctttttccttctcattgtcagtaccgtacggcatgtgatcattagcatatgcaaaagattgttgtgcatctatttcttcgttgtcagaaagtatgggatagtcattttctagttcctcaaaggcagtgtcttcctcaattctctgttcattgatataaaagtcattttctctgtcttcaaagccatgcgtgtcatgctcatacctctgttcatcattcaaaaagtctggatgttctatctgttcaataatctgtataacatatggcagcaattagcatatgatctactactgcaactagtatttctgtatgtgcagtaacttaccaatccccccccttcagctgttctgcagtcatatttgtttctcaacctgacattggctgcattccagaatgaaatcaggggaatctgacgtccattgtaattgatgttgcagaactcagagtttactgccttcacatgttcccaataccaacactgaatgcaatgtaaaaaataagcattttgagtacaataagaaaataaattcagcatgtgataggtttgtatagtacctgcagtaatggaagattgccttcaatattttttagtcctcc

SEQ ID NO: 21642 - DNA, 1833 bp, Oryza sativa
  ref <308>: DATABASE ACCESSION NUMBER: AK071903
  ref <309>: DATABASE ENTRY DATE: 2001-12-06
gtgcggcaaagcaaaagaaaaagttagatcagaggagagctcagagctcaaagagttgggaagccatggcgggagggcagctcaacgtgctgagcacgctcgaccaggcgaagacgcaatggtaccacttcatggcgatcgtcatcgccggcatgggcttcttcaccgacgcctacgacctcttctgcatttccctcgtcaccaagctgctcggccgcatctactacaccgacgattccaaggacacccccggcgcgctcccgcccaacgtgtcggccgccgtcaccggcgtcgcgctctgcggcacgctcgccggccagcttttcttcggatggctcggcgacaagctcggacgcaagagcgtgtatggtttcacgctgattctgatggtcgtgtgctcggtcgcgtccgggctctcgttcgggagctcggccaagggcgtcgtgtctacgctctgcttcttccggttctggctcggcttcggcatcggcggcgactacccgctcagcgccaccatcatgtcggagtacgcgaacaagagggcgcgcggggccttcatcgccgccgtgttcgccatgcaggggttcgggatcctcttcggcgccatcgtcgcgctcgcggtgtcggcggggttccggcacgcgtacccggcgccgtcctactccgacaaccacgccgcgtcgctcgtcccgcaggccgactacgtgtggcgcatcatcctcatgttcggcaccgtcccggcggcgctcacctactactggcggatgaagatgcccgagacggcgcggtacacggcgctcatcgcccgcaacgcgaagcaggcggcggccgacatgtccaaggtgctgcacacccagattgaggagagcgcggaccgcgccgagacggtggccgtcggcggcgagagctggggcctcttctcgcgccagttcctgcgccgccacggcctccacctcctcgccaccaccagcacgtggttcctcctcgacatcgccttctacagccagaacctgttccagaaggacatcttcagcaaggtcgggtggatcccgccggcgaagaccatgaacgcgctcgaggagctctaccgcatcgcccgcgcccaggcgctcatcgcgctctgcggcaccatcccgggctactggttcaccgtcgcattcatcgagatcatgggcaggttctggatccagatcatgggcttcgccatgatgacggcgttcatgctcggcctcgccatcccgtaccaccactggacgacgccggggcaccacaccggcttcatcgtcatgtacggattcaccttcttcttcgcgaacttcgggccaaacagcaccaccttcatcgtgccggcggagatatacccggcgcggctccggtcgacgtgccacggcatctccgccgccgccgggaaggccggcgccatcatcggagcgttcgggttcctgtacgcggcgcaggaccagcacaagcccgagcctgggtaccccagggggatcggcatcaagaacgcgctcttcgtgctcgccggcacaaacttcctcgggacgatcatgacgctgctcgtgccggagtccaagggcatgtcgctcgaggttatctcgcaggaggtcgccgacggcgacgacgaggaggcggcctacccgaagtaatttgaccgcgcgcgtgatcacgcagggagtggttgccgctaaccatttgtgtcatctcttttcccaactgtaacaactctagtcgtcgcttccgtacgagtggtagttttttctttttcttggataagtttgtagaaatttcaattagtgactagtttgtagtatatgtgagtgagatgtgtgt

SEQ ID NO: 21643 - DNA, 1462 bp, Oryza sativa
  ref <308>: DATABASE ACCESSION NUMBER: AK071904
  ref <309>: DATABASE ENTRY DATE: 2001-12-06
gaccggtttcccttgggcaacgaaagcttcacggcgagcgagggaaagagaagagaagaaaagaaaaaggaaatctctcattcccctcgtcgctccccgcgaggaaggcaaggaaaggcaggaagccgtccacttcccacttcggcctccgcgccggccactgacgtcgacggcgaaccactcgtctcctctcctcttctccctgctgctccgagtcgtcgcctctgcatggagacgggagagagagagacaggggggaggcggacgtccggcgtgcagtacagctgctagctagcttgctagccagtgcagcccggcgaaccatcgatataaggaaagattttgtttgatcgaggtggggatggatcagctttgcacgagtggaggcagcgacagcgacaagtctttggcggccggcgatgagccggcggtgagagtccgaggtgaagtggaggcggaggcggcggcggcggcggcggcggcagaggcgcaaggcggtggctgcttcgactgcaacatctgcctggatttcgccacggagccggtggtcaccctctgcggccacctctactgctggccctgcatctacgagtggctgcaccccggcggcgacgacgacggaagcaacggcgacgcgagctcgacgaggcggcgtccctgccccgtgtgcaaggccgcggtctcgccggacacgctcgtgccgctctacggccgcggccgcggcggaagttccaagagggcccgatccggctcggccatcccgcgccggccgatcgtacatcgggagcccgtcgagcggcagagcgatcggctcggcgacgacgacggaggacaccgacacgggagcacgggatccagcccgccagtccggtcaccgtggcacgccaatcaccacgccgccgccgctagcacgccggcgccggcgccggcgcggttgttcgacgtggtctaccctccaccacctgctgccgtgggcggcgtgggcatgttccactcgacgacgacaacgaccggagggatgctcggagggatggccctggcggtgctcccgtgggtgtcgcgcgggcagtcgccggcgacggcggcggcgagcgcgtactacacgagcccttaccacatgagccccaggctgagacggcagcacatggaggtggagaggtccctgcaccagatatggttcttccttgtcgtgttcgcggtgctctgcctgcttctcttctgagagcggcgcacaccagatgatctgcaccttccaggagatccaagttgtactcctaactttcgtgtacataggtcgtgtacataggtaaaaaaaaaaaaaggtgcgtcatgccgcccagtaggcagtagcagttccgtactgccgtgccatccaaagcaaccctcttgcaactcctcgagcatgttctgatttagggcgctgcttaagcaaaggccaatgtgaatcgatgactcattttgc

SEQ ID NO: 21644 - DNA, 1633 bp, Oryza sativa; identical to SEQ ID NO: 21640
  ref <308>: DATABASE ACCESSION NUMBER: AK071905
  ref <309>: DATABASE ENTRY DATE: 2001-12-06

SEQ ID NO: 21645 - DNA, 3064 bp, Oryza sativa
  ref <308>: DATABASE ACCESSION NUMBER: AK071906
  ref <309>: DATABASE ENTRY DATE: 2001-12-06
tggcgccaccattatcaagtctcgtcggctcctcttcccctacctctgtcctccgcccctcccatctaagcctggacgccgacgccggcggaggctctggagcacgcgcagatggagacgagcaggtcgcgaggaggtggggctgccgcgactgccggcgcgattgaggaaatcggccagcaacaggcgcccccgccgccgccgccaggcaggcctcatccgctaccgcatgccctcctcacctaacctcttcgttccggcgagcggttgatttatgtagagcaagcggctggcaaatgaggaggttgggtggtggagctctgggacccagcgccgtaggcgggggatgtggtgcgccggctcgacctacaggctaaggacatgattgccgcagctcaagatccaacgactcaaggacgtcatcttcgcgcagagcaagctgctagcgagcaccaagaccttcgcttcactcattgctgccaagtccatcccaagctgctccactgcctcgcaagcgacaagtactatccgtttccttcatctgctccagccgccagcaccatcaatccctttctaacttccacagaacatcagaatgggaatataggatgcattccttgatgaaagacaggtagaggtgtccaaccattacgaatttctaaatcgaagaagaattcagcatggaaagataggtaccaatggctgacttgcctctccagcaccactcatctatttacttctcatatcattttgattacaaaatcatccttgcataattcttgcagttccttaatttgctaattgttgtgcatagatatctacctgcaatagttcttctggtgcagattagtggcaatatattcttaaatggaaatagtccaccttatcctttcttttctgcctcctctgctaacccctgctctttgacacaaccaatttacgatcagagtatgcgctggcatatatgtacctagaatagtgctttgttatattattagtaacccatttagtaaaaaaaatttctctaatttgagcctcacttttagtctaatccttgggcgctaaacaattgatgctttctcttttttttttcaattcaagtaggatgattaatgtcgccaaagcgatggctgttatctgggcttgcctatgatcttggtgtttttcccttccattttatgtagtaggtgctcagatattatatgtaggtatattgtttattcttggcatccccatcttcttcgaggtatctagatggatatcataccaatagttgtcaaagagtcatctttcagggagagatggtttggtgcacctatgtttaggtttctacatgttgcatttatgacagaatgtcaatataacttttcaagctaagaataattctatgttatttattttatgccctacatttacttaattaagataaacttaattaagaaccaattcatccaattaaggtttggattgtggatgcaatcatcttgatactcatgcaaccaatgcatgtgagttgatttatttcacctgtttgtatgaatcagtttcttttatcgcacaggatttaattgtccatgctttcttaatttggcacaagcattgacacatgataacttggtttgcctgatttttatgattggcaacactctaattggaaaccaattcaatatacactagctttcatgcaggtaactagctattaatgcatgtgttctacaatttggtcttgggttctaaattgtgagaattattaagaactactcagttatctcttcaggaccagtaacacctctagactcactagaaatagatatattatctcttcacggcactactgtgttcttttctaattgagcatctaaatagaagaaattatgcctatgtaccttttctatataatcagtgaaataggttttgatagcaaaaatatgcttgcagtgctacataaatagcgatatagcagatatggtgcatttcaaatggcaaattacgtaccattttaatagtgcttttagtttatccgtttgaaaagctcttggatatctgattcagtcacctgataagcttgccaccttgcattcgctgttgatgaattggttcttttcatgtgtgctttctctcatcagtcacaattcttggtgtagtttccaggaacttttcagaaaaagcagtgatatccaatgtgttttataacacgctacgatgtacatgcatcttccattttgtgttttgtgattcttaggactgtcctgaggtagatcattgaaccgactagattcttttatatttttgaaatgcacttacctggcaatttgtgtttactgcagggtattttactctctttctcttccatgatttcctatggagaggggtatggtgaaataatgagtgcctttaagatgcgaagaaacagttttgaggatgttgctacatcaatagcacaatcatcacctaccgatgcctcacatgaagtcatcgtggctcacaaatttacatctcatcaatgagggttaggatcaggactgtcaactactccaagtgatctgtacattagatggtcagctttttttttttacttctcagcagagcaggtgatagattcaataactattggagatatttagagcaggtacaatagcgggctataagccagctgcaaatatattttaaggagataaatgaggagagagaagggcagcggactacagatttgtagccagctgtagcacggactccaagacacagtgtgtgtatgacaggtgggaccaagtattaatagtgtagtatgtaactattgtatgaatgagctattagattggttatagataaattggagctagtagttagctatactattgaactttctcttagaaacaacgtgtagttgaactggcagaatatttgtggctttgtagcatctgacttttctgttaatgaattatttcaatagttttttattgaatattatctgcccttatgggaaaagatttgtattctctggccatttatgcccctatacaatgagcattattattggataagccgggagacactcttccaaagt

SEQ ID NO: 21646 - DNA, 1486 bp, Oryza sativa
  ref <308>: DATABASE ACCESSION NUMBER: AK071907
  ref <309>: DATABASE ENTRY DATE: 2001-12-06
gtggaagcaaccaatccaattccgaacaagcaaggcaccaaatccccccaccatggatcaccgcctcctcctcctcggcctcctcctcctctccccggcggtggccgccgcctcagtccccggcgaggaggagccgctgatccggcaggtggtcggcggcggcgacgacaacgagctggagctgaacgcggagcgccacttcgccagcttcgtccagaggttcgggaagtcctaccgtgacgccgacgagcacgcgtaccggctctccgtgttcaaggccaacctccgccgcgcgcgccgccaccagctgctcgacccctccgcggagcacggcgtcaccaagttctccgacctcaccccggccgagttccgccgggcctacctcggcctccgcacgtcgcgccgcgccttcctgcgggggctcggcgggtccgcccacgaggcgcccgtcctccccaccgacggcctccccgacgacttcgactggagagaccacggcgccgtcggccccgtcaagaaccagggatcgtgcgggtcgtgctggtcgttcagcgcgtcgggggcgctagagggagcgaactacctggcgacgggcaagatggacgtgctctccgagcagcagatggtcgattgcgaccatgagtgtgattcatcagaacctgattcatgtgatgctggatgcaatggtggattgatgactaacgccttcagctatcttttgaaatccggtggccttgagagtgagaaggattacccctacactgggagggatggcacctgcaaatttgacaagtcgaagattgttacttcagttcagaacttcagtgttgtctctgtcgatgaggatcagattgctgccaaccttgtcaaacatgggccacttgcaattggcatcaatgctgcgtacatgcaaacatacattggtggtgtttcgtgcccgtacatctgtggcaggcaccttgatcacggtgttcttctcgttggctacggcgcatctggttttgctccaatccgcctaaaggataaggcctactggatcatcaagaactcctggggcgagaactggggagagcatgggtactacaagatctgcaggggctccaacgtccgcaacaaatgtggcgtggattctatggtctccaccgtgtctgccatccacacctcaaaggagtagattctgatcagtagtcccccgaccatcctgtggatggttcacagttggtgattctgatattatatataagctagaactacgaaatatacttagtttatgctccatctgcgctgttattgcagttatgataagcagcgatgatgtgaagctgcaactgaatgtttgtcctaagttatatgcttggtttgctacgcaatgctacacgctatttggaggtagctttaagtattatcgccattcacgaacttgtatttttactattaccaatcttttgaatggtctgtattatatgcatgtggtctgtttacatgg

SEQ ID NO: 21647 - DNA, 2952 bp, Oryza sativa
  ref <308>: DATABASE ACCESSION NUMBER: AK071908
  ref <309>: DATABASE ENTRY DATE: 2001-12-06
ggtcagagaaagcagctttgagcttagctatggcaatggccgcgccgctgacgttggtggtggtggcggcggcggtggccgtcgtcttcgtcggcggcggcgtggaggggtgggtgctcaaggaggggttctacgagcagagctgcccgcgcgcggaggcgctggtgaagcactacgtggagcagcacgtccccctcgccccctccgtcgccgccaccctcatccgcacccacttccacgactgcttcgtcagggggtgcgacgcgtcggtgttgctgaacgggacggacggggcggaggcggagaaggacgcggcgccgaacctgacgctgcgggggttcgccttcatcgaccgcatcaagagcgtggtcgagagcgagtgccccggcgtcgtctcctgcgccgacatcctcgcgctcgccacccgcgacgccatctccgtcatcggcgggccgttctggcgggtggcgacggggcggcgcgacgggagggtgtcgatcaagcaggaggcgctggaccagatcccggcgccgaccatgaacttcaccgacctcctctcctccttccagagcaagggcctcgacctcgccgacctcatctggttgtcaggtaaactaactattcactcttccatatattaatttcagtattaatttcaccatccatttcagagttcagacttcaccatcaatagtatttccttcgttccaaaacaactataagtttccgcgcacaactttaatcgtccatcttatttaaaatttttttataattagtatttttgttattataagatgataaaacatgaataatattttactcgtaacttatgtttttaatttttttcaaaaaaaaattcaaataagacggacggtcaaagttgaacgcggaaaaccatggctgtacttaaaatgggacggagggagtaaacatttttagactttgacatagtctttgagatggtattttgatcaacaatatctataaaagtgagatgttttaaataaaaaaaagttgtaatagtttgttaatgataagtctagtaacatcaattttacatgattgatttttttttatttttttactattaatagttaaaattaaaaatgtttgacttgacactattctaaaattgcttatattttgaaaattagttgcggtcgatcaaaaccccagtttcagcttatgacagcatcgtttctgaaaagaaaagtaaaaccattcacctaagctaatgattggttaacttgacacaaacggcagccaaagatcgattttcacgttatatcctaattaagtcgattgattactagtcttcaggatacacaactcgatcaggtttggtgttttatctagcttgatgtagctagctatgtggtgtttgcaaatgcgtagtacaagccaccgacaaatagtgaattggtgatgtgatatcgtgctgcaaaatctgcaatatgcagagaacgatagttaacttttgcaaattctttgtgtgttgagtcggcaactaggacacgctctcactctcactcacatcacaccccagtaatgctgtccccaaagattcagaagatgaaagatatatagcctcaatcacaccgatttccatgtagtaacaatactaacaaacaacgatcctaataggaacactacagatgcagaatttctatccattatctaaaaaactctcgtgccacgacaatccagaattgaacagacagctacgtccaacagggagggttggatctacttaattcatagaaggccaaaacttagctgaatcttgttcacgggtatcgcatcaaatcaaagttaaaaacagtttagtaggtatagcgatctaaccaacagataacgaggcttttggttgacggctggcaagtctgttccgtgcaataaaatgcaattcataacactgcactataacaaatatatcttatagagatattttcatttttctaatactatagaggcatttttaaaatgcctttacaatgttatagagacattttgaagagtgtctcataagtgccttttggtgaattgtcgcatttttaaaatgcctttacagtgttatagagacattttgaagagtgtctcataaataccttttggtgaattgtctctacaaactaagaggtgaattgtctctacgaactaagaggacattttgaagagtatctcataagtgccttttggtgaattgtttctacgaactaagaggcattttataagatgtctctatgcaaatagaggcacgcactaaccatctcaacctcatataattatatgtaagtatgtgatttgtgttacttatatctagttacttgatatatattaatatttgaaaaaatgcctttacatcgttttaaatgccttaagaaaatgcatttacatatgagacaaattttaaagtgccgaaaatgtgtctctacgagataaacttaacaaagtatactaaaaatgtctctagagtaaaaatattttagacgattttgaaagtgcctctaaaaagtgtctctagactatagagcttcaaaacttagaggcattttaaaaattgtctctacaaaagattctttatataaggtttttgatgtagtgctgttttatttagagagtgtagcacagatattgacacactaactgaccaagatttttattaacgttagtggttaaaggtgtgcaaaaaatgccaagacaaacattcagctcttgtactgtcctgtatctgtacttgtgagttagtagcaaattagtagctagctagattctataaaaggggggaagtgatgcagcttatataagggagaaacgtgatgtaactggcctcctacttctctgagagagtgactatttactaatccttaatttgaaagatcaagaaatgagttacattgtatttattcaatgtgtaaaagctgaaataatatatacatacacgtcaagtgc

SEQ ID NO: 21648 - DNA, 1852 bp, Oryza sativa
  ref <308>: DATABASE ACCESSION NUMBER: AK071909
  ref <309>: DATABASE ENTRY DATE: 2001-12-06
gtctctctccccccttctccgtctgcgttgtgctgcgcgagcccccggaggcgaggcgactccgcgtcgccttcccccccgagcgcgcggccggcgagaagggcgggaggcgcgggcggcgaggtgctcctcttctctctctgtgtctcgcgtcggcgacctcgcgcggtagcctcctctccggtggtggtcgcgcgcgcgcggacggtcgacgagggaggtttggagggtgggggcgcgactcggggttgaattcgctcgagctgactcactccagagggttttatagtttcaagcacaacgctgctcaagatgccagcactgaggatgaagaggaactttgacgatgatgtttttagggatgagtttgattccaaacccacaaaatctatgaagatctcacattttcaagtcagcgaactagagcagtcagctgtgttgaacttgccttataaagatccccacgatgagctggatttgacaactcagttagctggccaggacattatgatcatggaagctgctagtttggatgatgctcttggaggagcatctttgctcaaggatttaatatctgaggtggcagtttcaccaaatatggagaatgatatgttagttaattatgaagacatcagatctcggttaaatgtagtaaattattttgacaaagatgaagatgcaaattctgcatcatataatagctgtaccgttaattgtcatgaagaaagctggggctcgaatgagggttgcagtctgttggacatttataatcctgatgatgctttctctttcctattggatacgccctctgagtttctgggtagttttactgcattatatgatgaagttgtaccaattgattcattggtgaatataagtggccgatgtggagtattcccacttactgagagcactacagaagccagtattggtaatgagccatgcagatctgagggggatatgctatttagtaactcagaggtgttagagtggctcaatccacatctggctgaggaggatttgcctaatctcgttgattttactgagctgaactcacatgctgtatcaaaggagcaaggggccaggaaggtcactcttgtacttgatttggacgaaacccttgttcattcgaccacagagcagtgtgatgactatgactttacctttccagtgttctttgatatgaaggagcatatggtttatgtgaggaagagaccacatctccacatgttcctccaaaaaatggctgagatgtttgaggttgttatattcacagccagccaaagtgtttatgcagatcagctgcttgacatcttggatccagagaaaaaactgttctctaggcgttatttccgggagtcatgtgtatttacaaacactagctacacgaaggatctgacagttgttggagttgaccttgctaaagttgtcataattgacaacactccgcaggttttccagttgcaagtgaataatggtatacccatagagagttggtttagcgacgactctgatgaggcattacctcagctgattccgttcctggagacccttgcttctgcggatgatgtccgacccataattgccaagaagtttggcgacaaaaaggatattgctgagattttccaataaatgttagggatagctttttgtttactcagatagaggaacagaaacttaattaacatgttaaccgggcttgttgacctttttcttttccttttttacagtgggtggttttcataggattaagaattttggtgttagagctagttgtgaattgtacatatcctcgtatttcttaaacagttctgtacatagtatgctgccggaaatgaaagtgaacttcacg

SEQ ID NO: 21649 - DNA, 1587 bp, Oryza sativa
  ref <308>: DATABASE ACCESSION NUMBER: AK071910
  ref <309>: DATABASE ENTRY DATE: 2001-12-06
gatagtcatatttcatcagttcctcgtaagaacagagaactcgagaggttgcgcttcagtgccgcgaagaaaggacgagctattccaccctcccggtcggtgcgtttgcgatgaagaagacggtggttctctaccccggcctcgccgtcggccacctgaaccccatgatggagctcgccgacgtcttcctggaccacggctacgccgtcgccgtggcgctcatcgacccgtcggtcatggagaacgaagccaacctcgccgccgccgtcgcccgcgccgtctcctccaagagctccaccatctccttccacacgctcccgggcatcccggaccctccctcgctcgccttcaacgatcagttcttcaagaactacttcgacctcgtgcgacgccacaacgagcacctccacgacttcctccgctccgtgcggggcctccatgccgtggtcatcgacgcatcgtgcgcccatgcccatgaagccgcgaggaagctgggagtccctgtcttgatgttctacccgtccaacgccggccacctcgccgttaacttgcaggctcctctgcttgttgacgggttcaagaagcatctgggaggagatagtactagtcctgtcgagttcttgggtgttcgacccatgtcggcttctcacttggctggcctttttgggccgattagcgaggtgaacaaggatttcgaggccatgatttttgccggtgcgcgcatgaaggcggagttcgacggaatcctgatcaacacgtccgtgtcgctggaggagcgggcgctgcgagctctcgccgacccgcgctgctgccccgacggcgtggtaatcccgccggtgtacgccgtggggccactggtcgacaaagccgcctccgccgccggtgatgagagcagccgacatcagtgcctcgtgtggctcgactgacaacccgaccgcagcgtcatgttcctctgcttcgggagcatcgccgacgcatgtgaacagtccgaccagcagctgaatgagatcgccgccggcctggacaagtccggccaccgcttcctgtgggtggttcgggcaaccagcacccaacacctcgacgcgctcctaccggaggtgttcttcgcaagaaccagcggccgcggcctcgtcgtcaacagctgggtgccccagccgagcatcctccgccaccgcgccaccgccgcgttcgtgacgcactgcgggtggaactcggtgctagaggggatcaccgcgggggtgccgatgctctgctggccgctgtacgcggagcagaggatgaacaaggtgctcatggtggagggcatgggcgtcggcgtggagatggagggatggctggaagggctggtgaccgccgaggaggtggagacgaaggtgaggctggtcatggagtccgagcatggaaggaaggttagagagcgtgtcgaggcgcacagagatggcgtggccatggcctggaaagatggtggctcgtcgcgtgtcgcgtttgcccgtctcatgtctgaattactcaacgtgtaaggttgaaaatagtatggaatttcccaattgtatcttactactccgttcaaaaatataataatttttc

SEQ ID NO: 21650 - DNA, 1446 bp, Oryza sativa
  ref <308>: DATABASE ACCESSION NUMBER: AK099210
  ref <309>: DATABASE ENTRY DATE: 2002-08-28
gagtggatgagaggaggcgatgagaatggccgcgccgcagcaagtgcatgtgcgtgccgccccgctcgcgcgcgcgctccgaactcgcgtcgccgccgccgccgcgtctgcgagctctcccgaacgcgcgctcctcggcctctccgaaccggatctccggcagctcgccgtcgacctcggccagcaaagttacagggggaagcagcttcacgacctcctctacaagtccagggccaagcaaatccaagaatttagccacgtaccaaaggtgttccgtgaggccttggtcggcgctggctggaaggttggccgctcgccagtgcaccatgctgtgacggcctccgatggcactaccaagatacttctcaagttggaggataacagattgatcgaaacagtagggatccctgtcgatgatgacaaaggcccgtcaagactcactgcctgcgtttcatcacaggttggctgccccttgcgttgctcattttgtgccactggcaagggagggtttgcaagaaaccttcatgcacatgagattgttgagcaggttttggccatagaggagacgttccaacacagggtgacaaatgtagtgttcatggggatgggtgagcctatgttgaacctgaaatcagttttagaggcacatcgatgcttgaacaaggaactaaaaattgggcaaaggatgataacaatctccacagtaggtgttcccagcactataaaaaagttagcatctcacaagcttcagtcaacacttgcagtcagcctgcacgccccaaatcagaaactacgggaaacaattgttccaagtgcaaagtcatatcccttggaggcactaatggatgactgcaagaattacttcctcgaaactggacgaagggtatccttcgagtacactctgctagctgggattaatgacgcaaaggagcatgctgaagaacttgcagagctactgcatacatgtggcggtggttatcatgtgaacctaattccttataatccgattcaaggttctgaatacaagaggccctacagaaaagtggttcaagcgtttgttgatgcgctagaagctcggaagataaccgtaagcgttcgacaaacccgtgggcttgatgctaatgccgcttgcggacaactaaggaatgagttccagaagaatccactgcttgaatcatcaccttcatcagagcccaacctcgtaccagcttgatgagaagactgagttcatgatggccatgcacaatgattgcagattatcagtccatcacactgaaagctgatattgtactcgtagttgttttcggcatttcctgatgtatttgaattttcaagagttgttataagtagatatatatttagtgccacatacgggtgctatagaatcattatgcacattgcttaggtatgtaatctgcctgacgttgtgaaaaatggctcttcctg

SEQ ID NO: 21651 - DNA, 1443 bp, Oryza sativa
  ref <308>: DATABASE ACCESSION NUMBER: AK071911
  ref <309>: DATABASE ENTRY DATE: 2001-12-06
gatcgcctcgcccgcggattctcctcctcctcctcctcctcctccttcctcgccgccggcgacgcgccgccggctaccttttgacgctccgaccgtggtgccctttttctgtgggacccgggatcctagctcccctcctcccccgacgattcccggtcgcctcggcggctctcctcccgtcctagggttccggcgaggtcccccgcggctgcgccggcgagatgggtgagcgcaaggtgctgaacaagtactaccctccggacttcgacccgtcgaagatcccgcggcggcggcagcccaagaaccagcagatcaaggtgcgcatgatgctccccatgagcatccgctgcggcacctgcggcacctacatctacaagggcaccaagttcaactcgcgcaaggaggacgtcgaaggcgagaaatacctggggatacaaatatttaggttttacttcaagtgtacgaaatgttcagctgagataactttcaaaacggaccctcagaattctgattacacggtggaatctggggctagtcgcaattttgaaccttggcgtgaagaagatgaggtagcagacagagaaaagaggaaacgagatgaagaggagatgggtgatgcaatgagagcattggagaatagagcaatggattcaaagcaggacatggatatacttgctgctttagaagagatgcgatccatgaagtctagacatgctggagtcacagttgaccagatgcttgaaattttgaagcgctctgctcatgataaggaggagaaaacagtagctgagctagatgaagaagatgaaaaacttatcaaatcaatcacttttcgaaactcccaagattatgtaaaacggatagaggatgatgatgacgatgatgaagatttggtgataccgggccagtcgagtagcacatcaaagatgaatggatcctcccagtcagtatcaaatgcaacagatgtcctgaccaagactagtggatctgataatgccaataaagaaggaaataagatctggccatctaagatgccaaaatttatagtcaagccaaagtctacccctacagatcctatcaagaaacagaagacggaaaccacggctggcccggatactggcaaagcgccagtcgcagaagaaaatagtgagcctgcgcagaacaatgtcctccaatccctctgccaaaactacgatagcgatgaaagtgagtgatgactgcgtggctgcttcgtgccgtaagcccgtaacaaccgtaaccgcgaatcgccaccaactgctgtggcattggttgcagcggatgacaattccactcacagaagaagaatattacgttgtgctaacattggataaccagatccctgaggatctattgttgccacaaatctgaatcccgggaattcattggttaagtatatacagtacttcaaaatctgtggctgcc

SEQ ID NO: 21652 - DNA, 1487 bp, Oryza sativa
  ref <308>: DATABASE ACCESSION NUMBER: AK071912
  ref <309>: DATABASE ENTRY DATE: 2001-12-06
gaattgttgttgggagaagagcgagttgttgggagggagaaaggccaagaagaggaggaggaggaggaggaggaggaggggatcaatggagatggagagcccgcggagcccggaggcggagatcgggcacagggtggaggacctgtgggaggtggcggagccgcagctgtcgccgtccgagaagctcaactcctgcttcgaggacatcgccgtcgcctccttcccccgcccccttggctcgcaagtaatcgagataccttcaaatgctagtctggctgatactgttgaaatattatccaaaaacaaaattttgagtgcacccataagaaatgttgatgctccagaagatgctagttggattgacaaatacattggcattgtggaatttgctggtattgctatgtggttgctctatcagtctgaggctgcagctaatggcacggctggttctgccgtagggtcaccagtagccaatctagtatctaggctaggctctttcacattcagaaggacatcatctggcagggtagaaaccaccactgacccagaatcagatgaaaccgcatcggtcggtgggagctttttcgaaacactcacttcctctgaattctacaagaacacaaaggttggcgatatctcaggaagcttccgatgggcgccattcctggcactgcagacatctgacacattcctcaccatgttgctgctgctgtccaagtacaggatgaagagcctcccagtagtagacattgggggagataagattgagaacatcattacgcaatcttccgttgtgcacatgcttgcagagtgtgttggacttccttggtttgagagctggggaactaagaaactctccgagctggggcttcctctcatgaagccatgcaaactcgttaaggtaaatgaagaccaacctgtgttaaaagccttccaactgatgagggaaaaaggcgttggtggcctcccggttatggacacaagtggcacaaaagcaattggcaatatcagcatcagagatgtccaatatcttctaactgcccccaacatatacaaagattacaggacaatcacggccaaggatttccttaccgcggtccggcaacaccttcaggagcaacacgaggcctcgccgttgctcggctccgtcatcacatgcagaagggatgatgaagtcaaggacatcatactgaagctggactcggagaagatccacaggatctacgtgatcgatgacaaggggaacaccgagggggtcatcacgctgagggacataatctccaagctggtgcacgagccacgccattactttggggatttcttcgatggtgttgttcccctgcctccaaacagcactgtatgacacggcccttgagatttcatcacgctggtgtgctcttgtaaattgtacattatgtccctttacgacaatggttccaaatggatgggaatagtgtacagtttgccttgtgtagttctttggcagt

SEQ ID NO: 21653 - DNA, 1774 bp, Oryza sativa
  ref <308>: DATABASE ACCESSION NUMBER: AK071913
  ref <309>: DATABASE ENTRY DATE: 2001-12-06
gatctactcctcttctacctctcctcctcctcctcttcttggtcgtcttctcctagctcgccaagatgaggatttccatggctctcgcggcggccgcgctgctgctgctgctgtcgctggcagcggcggacatgtcgatcgtgtcgtacggggagaggagcgaggaggaggcgcggcggctgtacgcggagtggaaggccgagcacggcaagagctacaacgccgtcggcgaggaggagcggcggtacgcggcgttcagggacaacctccggtacatcgacgagcacaacgccgccgccgacgccggggtccactccttccgcctcggcctcaaccgcttcgccgacctcaccaacgaggagtaccgggacacctacctcggcctcaggaacaagccgcggagggagaggaaggtcagcgacaggtacctcgccgccgacaacgaggcgctgccggagtccgttgactggaggaccaagggggccgtggctgagatcaaggaccagggaggttgcggaagttgctgggctttctcagcaatagcagctgtagaaggcatcaaccagattgttactggcgacctgatatctttgtctgagcaggagctagttgactgtgacacttcatataacgagggatgcaatggaggtctgatggactatgcatttgatttcatcatcaacaatggtggaatcgacaccgaggatgactacccttacaaaggcaaggacgaacggtgtgacgtaaacaggaaaaacgcaaaggttgtcacaattgacagctacgaagatgtaacaccaaacagtgagacgagtctgcagaaggcggtagcaaaccagcccgtcagtgttgcaattgaagccggtggcagagcattccagctctactcatcgggtatcttcacgggtaaatgtggaacagcactagaccacggcgtcgctgctgttgggtacggcacagagaatggcaaggactactggatcgtgaggaactcgtggggcaagagctggggtgagtccggctacgtccgtatggagcgcaacatcaaggcgagcagtggcaagtgcggcattgccgttgagccatcctaccctctgaagaagggcgagaaccccccgaaccccggccctactccgccgtccccaaccccgcctcccaccgtctgcgacaactactacacttgccccgatagcaccacctgctgctgcatctacgagtatggcaaatactgctacgcctggggctgctgcccactcgagggcgccacctgctgcgatgatcactacagctgctgccctcacgagtaccccatctgcaatgttcagcagggaacctgcctcatggctaaggacagtccactggcagtgaaggctctgaagcgtaccctggcaaagccaaacttgtctttcttgtttggcaacggcaagaagagcagcgcttgagcaatttcagaaccgtatcagaccgtccagagccagcgtggttgcatcatcaaatgatcagctggtaactgacgaagacgattgcgcagctcggcggcgaaccctgcgcactaagtatatctgcttttataatagatttctcgtgtacataaaatctaaaaaaacgggttcagttggttacagaactgccagatttgcttctgaatgtatatgtaaaattcagctaggtttgctcctaagctcctagatgccagttcgacggaactgcaaattgatattggaacaagataaggtcattgccatattaatccatcattcatgtattccatacc

SEQ ID NO: 21654 - DNA, 1994 bp, Oryza sativa
  ref <308>: DATABASE ACCESSION NUMBER: AK071914
  ref <309>: DATABASE ENTRY DATE: 2001-12-06
gaccgatggatgcgaccaagaagcgtgtggccatcgtcggcgccggcgccagcggcctgacggcgtgcaagcacgcgctggcgaagggcttccggccggtggtcttcgaggccgccggcgacggcgtcggcggcgtgtggaggcgcacgctggcgtcgacgaggctgcagacgccggcgttcgcctaccggttctccgacttcccgtggccggcggacgtgtcgggcgccgaggtgttcccgcggcacgaccaggtggtcgaatacctcgccgcctacgcgcggcgccacggcgtgacggagtgcgtccggttcggctgcaaggtgctcgccgccgagtacgccggggtgcccgatgaggaggcggcggcgtgggagcggtggtcggggaatggcgaggccttcggcgacggctccggcgagtggcttctcacggtgcagcaccctggatccgaagctacccagatacacagggtcgatttcctgatactctgcactgggagattcagtggagttgcccacaccccaacatttccacccaaccgaggccccgaagtgttccacggccaagtgcttcactccatggactactccaacatgggccacgccgccgccgacgagctgatcagaggcaagcgcgtcgccgtcgtcggctccggcaagtcggccttcgacacggtggcggagtgcgccgctgcaaacggtggcaggtatccgtgcgccatgatctgccggagcgggcggtggatggtgaacggcgggttcgtgtggggcgtcagccttggacacctcttctgcaaccggctggccgagctcaccgttcacaagcccggcgaggggcttgcattggccctcctcgcaattctgctcacccctttgagatggctgctgtcgaagccggcagagacctacttcaagatgcagatcccgatggagaagcacgggatggtgccggaggagagcttcgcgggatcaatgtcgggctgccggctcggagtcctccccgacaagttctacgacagggtggaggaaggcagcatcctgatcaagagggcaagatctttcagcttctgcacggacggcttggtgctcgacgacgacgacaccggcgagcgcgtcgacgccgacgtcgtcgtgctcgccaccggcttccgtggcgaccagaagctcacggacatgttcgtctcggcgacgttcaagcagcagatagtagcagctcctctgtacaggtgatactccgcacatcgccgtcaacgatccgttcgccggcgagccggccagcgtctcgccgccgatgagcattcattcgttcgtgcaggcagtgcgtgcacccgcggatcccgcagatggcggtgatcgggtacaccgagaacctgacgagcatctacaccttcgagatgatggccaagtgggtggcgcacctcctcgccggcgcgttccggctgccgagcgtcgtgcggatggaggcgagcgcggcggagtgggacgaacacctggcgatgaggaggcacggcgagggcggcggcggcaagccgtgcctcggcggcgttagcacgtggtacaacgacgagatgtgccgggacatggggtacgagccgaggaggaagaaagggattcttgcagctacgctggtatcctctgaagtctgaactcaagtgaaactgatcagtgatcgatcgatcactgatgtgttgatcacgagtatacgataaaaaagaacatgaactttggaattgttgggctttcagaaaggggaaaataagttgggctgcgatatgaagaggaaaataagtcgaggaaataagcgttgttccaaaactttgttgcatcgcccatcgttcttctgcaaaacattgttcgtgtatatctatttccgtctggctaaaatctaacagagagcacgataccttttcgagatatacatgtgtgatgtgtctgaaaaaaacaagagtatatggcctcatttgatttaaaggaaattcataaaaattttag

SEQ ID NO: 21655 - DNA, 3160 bp, Oryza sativa
  ref <308>: DATABASE ACCESSION NUMBER: AK071915
  ref <309>: DATABASE ENTRY DATE: 2001-12-06
ggggagatcagaacgaatcatatcgttcaacgagcgtccggccggcgggcgacgcgctgtcgagcaagagcgccgccgcccgatcaatcgctcgccaccatgattcaccccaaccagccgctggcgctgtccgcggcgaagaacgcgagcaccgtcgtcgtcggctcgccgctcctcgcggcgtcgccggcctcctcccccgcggcggcgtgctgtagcagccagctgcagcagcggcgagccgccgggcccgggaggaggggcgccggtaggctcgcggcgccgaggtgcagcaccatcgagcaggccgccggcgtgtcgtcggccgtgacggtggacaggacgctgacggtgaccgccacggtgatcgtgcagccgcccatcggcgtcgtctacgccgcccgcggcatcgacgacctcaccgacctcatcggcaagacgctcctcctcgagctcgtcagctccgagcccgacccaaggacggggaaggagaaggagacggtgagcgcgttcgcgcacaggacgatgaagcaggacacgtacgaggcggagttcgccgtgccggcgacgttcgggccggtgggcgccgtgctggtggagaacgagcaccaccgcgagatgttcgtcaaggagatctggctggtcaccggcgccgacgactcctccggcgtcaccttcgactgcaactcctgggtccactccaagttcgacaaccccgaccgccgcatcttcttcaccgtcaagtcgtacctgccggcgcagacgcccaaggggatcgaggcgctgaggaagaaggagctggagacgctgcgcggcgacggcaccggcgagcgcaagttcttcgaccgcgtctacgactacgacgtctacaacgacctcggcgaccccgacttcaagatcgagcacctccgccccgtcctcggcggcgacgaacacccctaccctcgccgctgccgcaccggccgcccccacaccgagatcgatccgcggacggagaagaggagggggccggtgtacgtgcctcgggacgagcagttctcggacgtgaaggggatgacgttcagcgcgacgacgctgaggtcggggctgcacgcgatgctgccggcgctggggccgctgctggcgaaccaggagctgaggttcccgcacttcccggccatcgacggcctctacagcgtcggcatcccgctgccggcgcagctcgccgccgccggcgccgccactgccacggccggcggcgccgcggcctcctcctccacctccaccaacatcgtcggcggcgtcatcccccgcctcgtccgcatgatcgaggacaccaccgaccacgtcctccgcttcgacgtccccgagatgttcgagcgagataggttctcgtggttcagagacgaggagttcgcgaggcaggtgctggctggcgtcaaccccatctgcatccagctcctaacggagtttcccatcgtgagcaagctggacccggaggtgtacgggccaccggagtcggcgctggcgaaggagttgctggagagccagatcgtggagtcggtgacggtggaggaggcgatggcgcagcggcggctcttcatcctggactaccacgacgtgttcctcccctacgtgcaccgcgtccgcgagcggccggagacgacgctctacggctcccgcacggtgttcttcctcaccggcgccggcacgctgtcgccgctcgccatcgagctggcgcggccgcagtcgccaacgaggccgcagtggaggcgcgcattcgtccacgggcccgacgccacggcgtcgtggctgtggaagctcgccaaggcgcacgtcctctcccacgacaccggctaccaccagctcgtcagccactggctccgcacccactgctgcgtcgagccgtacatcatcgccgccaaccggcagctcagccggatgcacccggtgcaccgcctcctccacccacacttccgctacaccatggagatcaatgccctggccagggagagcctcatcaatgccgacggcatcatcgaggagtccttctggcccgggaggtacgccatggagctcagctccgtcgcctacgccgccacgtggcgcttcgacgccgaggccctgcccgaggacctggtgcgccgcgggctcgccgttcgacaggaggacggcgagctcgagctcaccatcaaggactacccgtacgccaacgacgggctgctggtctggaactccatcaagcagtgggcgtcggattacatcgacttctactacaagtccgacgaggaggtcgcctgcgaagaggaggtgcgggcgtggtgggaggaggtgcgcaccaaggggcacgccgacaagaaggacgagccgtggtggccggcggtggacacccgggacgggctcatcggcgtcttgaccaccatcatgtgggtgacctccggccaccacgccgccgtcaacttcgggcagtaccactacggcggctacttcccgaaccggccgacggtgatgaggaagaaaatgccggtggaggagaacaaggaggaggagatgaagaagttcatggagatgccggagcacgtgctgctggacaccatgccgtccaagatgcaggccatcacgatcatggcgacgctggacatcctgtcgtcgcactcccccgacgaggagtacatgggggagcacgccgagccggcgtggctggcggagccgagggtcaaggcggcgttcgagaggttcgcagggaggatgaaggagatcgagggcatcgtcgacgagcggaacaacgacccggagctcaggaacaggtgcggcgccggcatcgtgccgtacgagctgctcaagccgttctccacgcccggggtcaccgggaggggcatcccaaacagcatctccatctgagtttcgctagctaagatagctagctgcatttgggacaagattggagatggttaagatttgtacactaagatcatgtaccaacactaatagctcccgtgtatgcctgcctgccacgggagaggcatttgctagtgtgtttgagttactagaatgccacaaattagtaaagaggttattgaactaaagctcagttcgctgagttttctagaaattggcagtatgtcatgcggacggatgggatctgctggattcagcacatatcatccaagaaaaattactc

SEQ ID NO: 21656 - DNA, 2103 bp, Oryza sativa
  ref <308>: DATABASE ACCESSION NUMBER: AK071916
  ref <309>: DATABASE ENTRY DATE: 2001-12-06
gaaagttgttctccgcttatcctcttcctcttcttcttcctcaaacccgcaaaaccccaagccccgagctcacacaccaccaccaccgccatcgccatggcgccacctgccatggccttccaagctctcgctctcggccccctccccctccccctccccgcggcgcgtcgccgccgccgcgtgcgagtcctcgccgtggccgcagaccacaccccgccgccgccgccgtcgccgtcctcccctcccgagccggcgaacagcccgagccggctcctccgtgagctcgcggagcggaagaaggccgtgtccccgaagaagaagcacccgccgcggcgcttcatcctgaagccgccgctcgacgacgagcgcctcacccagcggttcctcagcagcccgcagctgtcgctcaaggcgctcccgctgctatcctcctgcctcccgtcggcgccgctctccgccgcagaccggacatggatggacgagtacctcctcgaggccaagcaggcgctgggctacccgctcgccccctccgagacgctcggggacggcgacgacgacggctgccccgcgcggcacttcgacgtgctgctctacctcgcgttccagcacctggacacgtcctgcgagcgcacgcggacgcggcacgtccggagtggccactccaggctctggttcctgggccagtacgtcctggagctcgcgttctgcgagttcttcctgcagaggtacccccgggaatcccccgggccgatgcgggagcgggtgttcgcgctgatcgggaagagagcgattcccaagtggatcaaggcagctagccttcacaatttggtgttcccttatgacgatttggataagatgattcggaaggaccgggagccaccagcaaaggctgtattctgggcactgtttggagctatatatttgtgctttggaatgcctgaagtctaccgtgttctttttgaggcgtttggcatggaccctgaagatgagagctgccagccaaagctgcggcgccaactagaagatgttgactatgtatcagtggagtttgaaaagagacaactcacatggcaagatgttgctgcctatcggccaccaccagatgccctctttgctcaccctaggctatttcgagcatgcgtgccaccaggcatgcatcgtttcagaggaaatatttgggattttgacaatagacccaaggtcatgaacacactgggatatccattgcctatgaatgatagaattccagaaatcacagaagcaaggaacatagagcttggacttggtcttcagttgtgcttcttgcatccctcaaagcataagtttgagcatccaagattttgtttagaacgcctggagtatgttggacagaaaattcaggatctagtgatggcggagaggctgctcatgaagcatctcgatgcacccggtaggtggttggcagagaagcatcggaggttgctaatgaacaaatactgcggacgatacctccgggacaagcacctgcaccactacattatctacggggagtcggtgcaagacagatttgaacacaaccgccggctgagaaatccttccacgaccgccgtccagcaagcaatacacggccttgcttactgcgtctatggcaaaccggatgtaaggcgattgatgttcgaggtgtttgacttcgaacaggtccagccaaaagcagtatgagggtggtcacaaaacctgtgcttgtgctgagctgctgatacgctgacattaccggcgtttgaaagctgaaatgcttcagtgttgtgacctgtgaacagatccaagcgcagacagttctgagtctgatccccgaagtcgaaaagcaggttaacacacgtaactcatgcaccctcgtttctacgagatgaactggattagagatgttgtaaatcgaacgctgttgttttctgaatttacagttttgacgatttgatgtaaatttccatttgagcagaaaatgcaagcagcatcagagacaaaaaacagcataggaagaatttttcctgtgaaacatgcttgtaaaggagtttgtaatagatctgcagaacatctttgcaaccaatgatacaagcagcttcatctttt

SEQ ID NO: 21657 - DNA, 3171 bp, Oryza sativa
  ref <308>: DATABASE ACCESSION NUMBER: AK071917
  ref <309>: DATABASE ENTRY DATE: 2001-12-06
ggtgggggtgttggcgtagtggagaggacgagaccagtagtagtggaatcgcacctcgtcggcccacgggcacaccgtcgacagctccccgccggccgactccggcagcagctcctccaccgccgccgccgccttctccgacaggtacttctgcaagtacaacactccgtgttactctctagctgcagcctcttcaggtgctgtgcgaggagaggaggaaggggattagcaaagccatggtgtgcggagacctcggcgatcttgcagacgatgatgtggccctgcttgccccacgcctccgcacgccgaggcgccgcggtgagggagacgacggagacgaaggcggcgagaggcagcagccggaggcggagcagaggcgctgcgagtgccatctccggtggtggtcagctcagcctcgccggagtggttgggtcgtgggctatttattgggcggagaaagagcacgagaggagaaggtaacgtagcggtggcatgggctgggctagtgggccaagattatccggatgggccggatgcttgtgatgctgagggcaatttcggcccataaattttatacagatttttatcatgccgacaacagtctctggcgtttttatcggagaaaatttccagactacgacatgatacattgctactcctgccaaatttgttgctccattttttttctcatgaaatcaattggtgaggctgattttcatacaacgacaacactggctttgtttgagttcattgtacatgaagattaagtgtaaaacatgtaaaatgagaaaatcattagcttgattaagtttaaattattttgaacttaaaaaatggatttatctgatattttatagtaatttatatatatatttcttttttttgcaaaaaaatgtattgtttagcattttgaaaagtatactaatggaaaccacgagtaaaatatgtatcttaatagaaaaaaaaggggcaatacagctatgcagctagctgttgcattcatcctgcaggagaaaaacacacacactgaataacaaacactgctgtgaatgcacggacatggcaccaggagggtccagcagtagtcaggcgtgtgcatgggtatgaacatggcctcaattttcagcagcgtgtgaacgagattgccggccgtgcatgctccgtagttccgacagattcctcatcctctttccctttcttaaaataatggcgcgaaatgatacaatattccggaattcctattgggtgggtgatcgctcctccatccacccagcgatcactcccctgcctctctcctatactatatactcctccctcctctccccccttcctcctccccttcttctctttctactacagtacaccacacaaaactttttaaaaaacaaaagttagaaaaatttatgtatagaaatactatttataaaaaatttgaattcaaattcaaatttgaattgggcatgtaaacttttgacttataaactttggatctatacattttaggtgtataaactttagatgtatagaaataatatatatagaaaatatttgaattcaaatccaaattcaaatttgaatttgaatataattcaaattcaaatttgaatcgggtatataaactttaggtgtatgaactttagatgtatagaaatactatatatgaaaaatatttgaatttaaattcaaatttgaatcggatatttgaattcaaattcaaatttaaattggatatataaacttttgacttataaactttaggtatataaactttatgtgtataaactttagatgtatagaaatactatatatatatataaaatatttgaattcaaattcaaatttgaatcggatatataaacttttgacttataaacttttggtctctaaactttagatgtgtaaactttaggtgtataaactttaaatgcataaatttactaaagtaggaaagtaatgaggtgccaaaaaaggaaacaggtggagggagggagggggggcggggggcgacccgatcgctaccaggtaggtaggaactaccccactattcccgcttaaaaaccccatcaccgaggcactgatactgatcgatcgtctagctagcttcttctacctcgcatccgatcaggaattcaggatgcagcagtcgatcatgtcgacgctgccccttctgctgctgcttctcttctcctcgctcttccctgctccctcgcacgcctggggaatccatggccatctcatcgtctgccagatcgcgcagggccggctgagcgacgcggccgccgcggcggtgaggggcctgctgccgtcgtacgccgggggcaacctgagcagcctctgctcctgggccgacggcgtcaagctcaggtacccctggtcggcgccgctccactacatcgacaccccggaccacctctgcagctacacctacgacagagactgcaaggacgaggatagcttcagggggaggtgcgtcgccggcgccatcaacaactacacctcccagctcctcacctatgatgcaacatccccttctactcaatataacctgacacaagcacttctgctccttgcacactttgtgggggacatccaccagccgcttcatgtggggtttacctccgataaaggaggaaacaccattgatgtgcactggtatacaaggaagactgttctccaccatgtttgggatgacaacatcatcaaaacggcagaaaacgactactatggggaaggcgtggctgaatttgtcgatgcactgatgcagaatataacgggagaatggtcacaacgagtgccaggatgggaagaatgcagcaagaaccagaccacatgcccagacacgtatgcatctgagagcatcgctgcagcatgcgactgggcgtacaaggacgtgacagaagattcactcctggaagatgcatatttcgggagcagattgccggttgtgaatctcaggctagcgcaaggcggcgtcagattagctgccactctgaacagaatattcagttaaaggaagacgaactgcatacatcagacagttctctctcgaaggaagatttttattttctctgttttgctgtgtgccaaaatctcgagagatcaattttactatttccttgtcatgataaatcgaaatatattcttgagcatgtgtgaaatgggacttattcc

SEQ ID NO: 21658 - DNA, 3160 bp, Oryza sativa
  ref <308>: DATABASE ACCESSION NUMBER: AK071918
  ref <309>: DATABASE ENTRY DATE: 2001-12-06
gatgctagaaatgccattttctaattcacgaggctccaaccgcgagaaaggcgagacagaatgaatcctcgccggcgacgaggcgccgacacctccctccggcgactgggtctccgacctcgtcgccggtggccggacggggcagcctcgccgcacggggagccccatcgcctccgactccgtctcggagtcggattcccgccctccttatgggaaaaagaaaatatctcaccccgattcgatcgcgacgaaccctcgcactccgactccgattccaattccaactccaatgtcggtggattttatccctcgacgataaaaagggcgccacatcctccacccgagatcaccaaatctctcaattcccaaaatcaattcgcgcaccaaacctcccaaatccctctcccaccagttcttggattcgccgaggagctcttgtccttccatccatggcggcggggtggcgcgagacgcccgccgcctccgcggccttcccggtggcctacaccgccgtcctcgcgctctacctcctcctcggcgtcttcccgcgcccgcgtggcgccccgccgtgcgaggcgctgctgtgggagctcgccgactgggcggccgtggccgtctgcctcgccgccgacgcctacttcatctactgcatcgcctcctcccgccgccgccccgacgtcccaccgcggctgccgccccctcccccgcagatggatctctgctagggtttagggcagggcctcgccgtctcgacatcgtcagggagtgtccttaacccttcttttctcatcatgctgctactgttattttcttcagttaattaggaaggtttctttctggtgtagtttagttgttagcaacagcccttgaactgaaaccatggttagaatttggaagattaatgctgtagtctagtgtcaacaacgcttccttgtgctgctttaatgagcttctgcatcacaattgctacttctgctactagtcattgtgtgattaccttttgtcttgcaagtttctacacttattaggaagaattctgatgctcttagaatattgattagtcattagaatctagttttgttagatgtgtcgatgtagaaatagtcgattgcgttcgtgttcctttgataagccttctttccaaacttcaatcttgtttttgtaatgcatatgatcctccacatataaggatcaaatagtatattctattgtcatctgctctgcaagtcttgaactttggtttttatcatactgcaaaacacccctaatagtactttctgcagttactttttgtcacctgttctgctagtattactttctgcagttaggatgatttctgttgtactgtagttgttagcaacagtcttgaactgaaaccttggttagctagctgtgaaagtgtctcagccaattttctctcctttcttaatgaaacaacagagttcctgctttagtataaaaaaataccaaaaaaaaatggttagaattaggaagatttccaatgtagtgtagtgtccacaatgttcttcatgctgcttcaaaatcgctacttttactacagtcattatgtgattaccttttgtcttgcaagtttctgcacttaagtaggaagatttctgatgatattagtcattagaatctagttctattacatatatcaatgtcggaatagcatgtgccatgtttgtgttcatatgctcctacacatatagatcaaattgtatattctactatcatctgttctgcaagtcttgaacttcggtttttatcatagagcaaaacaccccaataatttccttttgggaaaacggttgagtgatcatgaggtcgagagttcgagcctctgtcaccccaaatattgagtgatgaggaaatgctcctgtgacaatcgggttcgtcacattcatctgaccatcagatattaagagctagtctgaactcaattaacttgaatcttctttttgtaatgcatatactgtactccacacatgtcgatcaaattgtatattctattttcatctgtgctgcaagtcttaaactttggtttttatcatagtgaaaataccccaataatttccttctgggaaaacctaactgccaactagatgcactagtctaaatatacagttaagggctggatatcaccattgacttggtctcttggttgatttattgctctgatgactaccaattcaggtcgcattattttgcacttgtgcctgcccccacatatttattggtcaatttagttggctccaaaagggtataaaatactagcagttactctaacatagttctgtgttttgcagtataaatccaggcacaccaagtggacacaaatatatagaatacatcatgacttttcaccatatcattcagtatgaatatgtaactagtaataaaaatgttattgatttgaatgttttcaatcaccatctatattttacctatctcagtaaacttcttagttgtatttgaccccatgtcctttagaattgcatattccttaacaaagggagcagttgatgagtgatcctttctaaaacagttatttggatttgtcttattgtagtaatattacttgatttgtcaccaaaagcacttccatgtgtaatatctttatactgaataaaatcgaaatagtaatgatcaaagcatttactgaagattgtgtcaatggtctaagacgacaatagatgtaattcaattaggtatgcctgcattctattttcaatggtttcttaatcttgtgcttaactttgctgcagccaaacactgtcgtagatgaagtggtcaagattgtctggaaggagcaaaacatgaagtcaattgctctccagaagacaaggtcaatcactgctgtgctgccaaacaaatcagttgttctccagagcgccaggtcaatcactgttgagttcgagaacttgagcgaaaactgaagttcgtgtatgcttggagctgcagtgttgagagcttactaacttcgtggctcactcatctgaactgagaagttacaaaacccagtggtggaaaccaaactacacaggtgtaaacctggagtagcagtagcactaaagtaattctggtctaacataagttacttgtatcattagctgtactgaatcattgtagagctaatactaatatatgaatggtatat

SEQ ID NO: 21659 - DNA, 2157 bp, Oryza sativa
  ref <308>: DATABASE ACCESSION NUMBER: AK071919
  ref <309>: DATABASE ENTRY DATE: 2001-12-06
gagggaaacccgaatcaaactcgcgcgccgcgaagcagcagccgcagcaatggcgggcgtcgccgccctcttcgcctccccggccttccccttcccatccacctcctccgtctcctcctgctcctgccgcttccgccccgccgtcgcccgcgccccgcgccaccagcctcccggccgccgcgtgacccggcgcttcgacgaggtggagggggtgtcgaagaggcggcggggcattggcggcggcggcggagggggctcgcaggcgtcgtcgtcgtcgtcgcgtaaggacagagggctcgccgttgacttcaaggagtcgcaggtctcagatttcgaggaccttgaagaggacaaattccttaatgctgtagttaaggtctattgcactcatattgcacctgattatgggcttccttggcagaagcaaaggcaacatgcaagcacagggagtgcctttatgattggtgatggcaaactattgacaaatgcacattgtgttgagcatgacacccaggtcaaagtaaagagaaggggagatgacaaaaaatatattgccaaggttctagcaaggggtattgagtgtgaccttgcattgctgtctgttgagaatgaggaattctggcgaggaacagagccacttcaactgggtcgcttgccgtgccttcaggattcagtaactgttgtgggatatcctcttggtggagacacgatatctgtaacaaaaggtgttgtttcacgcatcgaggtcactccatatgcacatggaacttcagatcttcttggcattcaaatcgatgcagcaataaatcctggaaacagtggtggaccagcctttaatgaccatggggaatgcatcggtgtggcatttcaggtcagatgaagctgaaaatattggatatgtaattccaactacagttgtatcccatttcttgaacgactatcagaagaatggaaaatatacaggatttccttgcctgggtgttctccttcaaaaattggaaaaccctgcgttgcgtgaaagcttaaaagtaccttcaagtgagggtgttcttgtccgccgggttgagcctactgctcctgcaagcaaagttttgcggaagggagatgtgataacaagttttgatggcgtcgcggttggatgtgagggaactgtaccattccgctccacagagcgaattgctttccgctacctcacaagccaaaagtatgcaggtgatgttgcccaactaggtatcattcgggcaggcaacaccatgaaagtacagaccgttttgcagccaagaaaacatttagtgccgttccatgttgaaggagggcagccttcctatctgatagttgctggccttgtcttcacacctttgacagaaccatttatagaggaggagtgcgaagaaactctagggttgaaattgctggcaaaggcacgctattctctatcaacatttgaaggggagcaaatcgttattgtatcacaggttttggcacacgaggttaacattggctatgaacacatgggcaatcaacaagtcattaagctaaatggaaccgtggtaaagaatattcaccatcttgcccaccttgttgacaactgcaaagacaagttcttgacgttcgaattcgaagacgacttcctagttgttttggatcgggaagaagcgactaccgcatcatcagatatcctaaaggaacatgcaattccctctgtaaggtcatctgatctatcagagccatatgtcgacacagagcaagaaatccaaaaaccaaacgatgattttggtgacagccctgtcacaaactatgaaatgggagttgactgtctcctctgggcatgaacagccaaggatggaatttgaatttcagttcaaacagtgacaatgccggtgaatttcatgcatctggatggcaggaaagagcatttccccaccatgttgaaatccactccatagaggcgaagccggagtcatgtttgttagtgtaggaagttcagagttatgttgtaccttagaaaaccacacaaatgcttgattcatcatcaatttttttaggggatgggactatgggactgtgggagattgggggagggctgtagaatttggcagggtgtaatcctgtaattttttgggcatgcaataaatcgtccagaaattttgttgcttt

SEQ ID NO: 21660 - DNA, 1752 bp, Oryza sativa
  ref <308>: DATABASE ACCESSION NUMBER: AK071920
  ref <309>: DATABASE ENTRY DATE: 2001-12-06
ggcctgctagtacttctcccctcccccttctcgccgctctactcaattccgccgtcaaagtcttcgattgatccgatctctcgtctcgtctcgtcatccccatcggaaccctagccgcctcccgtgcccgcgcccgcgccgccacatggagccgaagccaagcacgccgacggccgcggcgaccccgcggtttaagctggggaagcagtcgtcgatggcgcccgaccgcggcggtgcgggggagagctcggaggaggggtcgagcgaggcggtcggggtcatgggcttccagctgatgtacatggcccacgagggcgacgtcgaggggatccaggagctcctcgacgccggcgccgaccccaacttccgcgactccgacggccgcacggcgatgcacatcgccgcctgcgaggggcaagccgaggtcgtcgagctgctcctccagcgtggggcggatgccgtcgccgaggaccagtggggcagcacgcctttggcagacgcattgcattaccagaaccatgatgtgatcaagatcttggaaaagcatggctccaagcttaagattgctcctatgcatgttaaaaatgtccgtgaggttcctgagtacgagatttccccgaacgagctagatttcactaatggaaatggtatatcaaagggtacatttaggaaagcaacatggaggggcattctggttgctgttaagaagcttgatgacgatctaattatggacgagaacaaaacaagcattcagagatgagcttgatgtgctacaactaatacggcatccgaatgtcgtgcaatttttaggtgctgtaacacaaagcagcccaatgatgattgtaatggaatttatgcccaagggtgatttgcgcaagcacttgagtaggaaaggggctctggaaccgtcatatgcagtgaaattagctcttgatattgcaagagggatgaattatttacatgagcataaacctcaagctatcatccaccgtgaccttgagccttcaaacatattgagggatgacactggacatctgaaggtggcagatttcgatctgtgtaagatgctaaaatggagaagaaaagttagagaagagaaagctgtaacttctccaggcaatgcatgtaggtatgtagctccagaagtcctgcgaaatgaagaatatgatactaaagtggatgtcttctcatttgctttgatacttcaagagatgattgaaggatgtctccctttttatgacaagaaaaataatgaaattgagaaggcacataattctaaagaaaggccacctttcagagctcctccaaagcattatgcttacggattgagagagctgattgaacaatgctggagtgaaaatcctgctagcaggcctgactttagaacgatcattgaacaattgtcttatatccagaatgaaatatctcagagaaaccgttggaaggtgaaacctctcaaatgcttcctgagctttgagggcatgtggaagaaagatcgaaatgagggcagcaccactcgttcatcacgttcatcgagatcctatttttaacagtcagttgggcctgttgttgatttcgtgtggaggattgtatgcatgattgatagaaaatcaactcattatataccatagatttgtgtttcactggaaatagttttgcaacttgttgcttcactgtcgatcacaatgcggttgtacatcagacagcattgaaagcaatacaaactggaatatacagactgttgtttttgtt

SEQ ID NO: 21661 - DNA, 1328 bp, Oryza sativa
  ref <308>: DATABASE ACCESSION NUMBER: AK099211
  ref <309>: DATABASE ENTRY DATE: 2002-08-28
gacccacccaccggcgagcagctgctccgacaagcgctctctctctctctcaactccggcgaggctcacgcgcgctccgaagcttcggatagcggcagtagtcagtgcattgatggcgaccgacgtggcagcgactgagcccgaggtggcggcggaggaggctgcggccgccgcgcctgagaccacggccaccgccggggattccaagccggcgaaggaggccaaggccaagaaggccgccgcgccgaggaaggcacgctccaccgccacccacccgccgtacgccgagatgatctcggaggcgatcgcgacgctgaaggagaggaccgggtcgagccagtacgcgatcggcaagttcctcgaggacaagcacaaggaccacctgccatccaacttccgcaagcagctgctcgtccagatcaagaagctcgtcgccgccggcaagctgaccaaggtcaagaactcctacaagttgccgccgacgcgcgcgccggccgcggccaagcccaaggcgaagcccgccgccgccgcaaagccgaagccgaagccgaaggccgcagctaagcccaaggcggctgccaagccgaaggccaaggctccagccaagtccaaggccgccgcgaagcctaaggcggctgccaagccagccgcgaagccgaaggcggcggctaagcccaagtctccggctaagccagccgccaagcccaaggctgcccccaaggctaaagccaagccggccgcgaagccgaaagccaaggcggctcccaagccgaaggcggcagccgtgacgaagacgaaggcgacctcggctcccgcccggaggccggcgaaggcggcgaagacgtcagccaaggacacgcccagcaagaaggcggcgccggcggccaagaagcccgccgccgcggcgaagaaggcgcccgccaagaaggccgcgccggcgaagaaggcggccgctccggcgaggaaggtgcccgcccggaaggcgaagaagtagagctctctctccggcgagcgagcaatctagggcttcatggttgttttcttagctgtttttttttctcttctctttgttgttagttgcgaggaggggtcaggggtactagcttgtaaatttgatatcgcggcgggggtacactggtcatttcgtacccaggtggtggtgcgcgacgatgatgacgacgacgacgagacagtttgtttttagggcaatgtatttctgagtagattggtggagtttttattgtggtaacaatcttgtgatatttgtcgaaatcactttagctagtaattaattatgcagtaattttacttactgtattggcttgacc

SEQ ID NO: 21662 - DNA, 1732 bp, Oryza sativa
  ref <308>: DATABASE ACCESSION NUMBER: AK071921
  ref <309>: DATABASE ENTRY DATE: 2001-12-06
gactctttgccgctcgtttcgctcggagtagccatgctccaggcgagctcggagttgcagcagcagccggcggcggcggcggcggcggccgggatgtgggtgcccgggatgagcccgcaggcggtggacgccgggctgtcggcgagggcgcaggaggtcgcgcggaggcgggaggagatgctcgggatgctgcatgacctccccgagtccgagtacgagctctcgctcacggacctcgtcgagaaggccggcggtgtcggcgtggcgccgccttcgccttcgccgtcggaggggaaggcagagccgggcccggcgcggacggcgtccggcaggcagtcggagcagcagcagcaggcggcggcggcggcggggaggccggagaggagggggtcggcgaggcggtgggacagcgcgggcggcagcagcttccgcagcagcagcgacggcgtcctgctcaacttctacatgccacgctccttcacccgcagcttcaccgcgccgcgcaccactggccccggccggccgccgtcggtctccggcggccggaccgccagtgtctgctccgatcgcaacaagaggtaatcaatcaattctgactccaactaacactccatctctatgttctccatcagtttgattgcaaattaaggagattaattagtactagatcacgaagaacacacagaaattcgttagaagaaccaactttttcaacacaaatattgtactatttagtaaattcgtttttattcagctagcgataatatagtactcccacagcataggaccaatcaaacccgtacatagacagtcaacaaaagcaaaacgtataagcatcaaagccggcacggcaattccaaaggtaaagtaaaacgagtctacatagaaatggtcctactctagatgccgcctgctgatccgcgcaatctgtaaaacgaagatcaacctgcttgactgcttgtacgttccccacatcattccacctgttactgtttggtatatccagtagtacatgctacagattactgttttacacgagtagtacgagttactgtaaatgcgacgacctactccgatggagaaagcaagggaagcgagtgtcgtacaaacggatagatggttaccacgcaaccacatgagtcgggacaaggggacgcgtccttgtctcactgaattcgtggaccagatagcgtgcgcagcgtctggtttaatgccggcaattctgagatcgacttgctaatcgcgacgtgaaacgaactgatgatgacgatgatgcagggagagagatggcgagaccgtgcggtgctggtcgctgctgtgggatcggcggtggcgcaagtcgagccggggagatcacggcaacgagtccgccatccgggccgcgatcctcaaggcggcgaaacacaacgcttcttccccaaagaaaatctgaatgctgctgctagcgtccatcgttttggtcttagatagctagcgcagacttatctgcctgccaccactgggtgtatcaatactaatgtatggttttgtacatacttatgagtgtccattttgtgcttgtgaactgattgtgtgtgaaaaactgaagataggcatattggaaatgattccataattgcgtgcacatccagggtatcgttgtgaactcaagttcagtttataatgggaggcagtcgagatgaatcatatgtattgtttctgaagcattttacaaaattgagatgcaacattg

SEQ ID NO: 21663 - DNA, 1497 bp, Oryza sativa
  ref <308>: DATABASE ACCESSION NUMBER: AK071922
  ref <309>: DATABASE ENTRY DATE: 2001-12-06
ggcggaggatgggtcgggggcggcggcgatgctggccgtgccggagaacctggacgcgacgatgcggctgctgttcgcggcgtgccagggggacgtggccggggtggaggagctgctcagggacggggtggacgtcgacagcattgacctcgacgggcgcacggcgatgcacatcgccgcctgcgaggggcagggggaggtggtgcgcctgctgctcagctggaaggccaacatgaacgcccgcgaccgctggggcagcacgccagcggcagacgcgaagcattacgggcactttgaagtttacaaccttctgagagcaagaggagcaaaaactccgaaacaaaagaagaccccgatgacagtttcaaatcccaaagaagttccggagtatgagctgaacccacttgaactcgagttcagaagaggagaggaagttacaaagggtcactatgttgccaggtggtatggatccaaagtgtttgttaagatacttgacaaagacagcttctcagacgccaatagcataaatgaatttaaacacgagcttactttactggagaaggcccgccatccaaatttggtccaatttgtgggagctgttacacaaaatgtaccaatgatgattgtttcagagtatcatcaaaagggtgatttagccagttatcttgaaacaaaaggtcgcttgcagccttacaaagctatcagattttcccttgacattgcgaggggattaaattatctccacgagtgcaagccagagccaatcatccatggcaatctgtcaacaaaaagcattgtgagggatgatgaagggaaacttaaagtggcaggctttggctcacgtagtctgattaaagtctcagaagataatccacaaatggatcagacgacatcaaaatttaacagtgtatacaccgctcctgagatgtacagaaatggaacgtttgacagaagtgtagatgtatttgcatttggtctcattctttatgagatgattgaaggaactcatgctttccacccaaaaccaccggaggaggcggcgaaaatgatttgtttggagggtatgagaccaccgttcaagaacaaacccaaatactatcctgatgatttgagagagcttatacaggagtgctgggatccaacaccttcggtcaggccgacgttcgaagagataatcgtacgcctgaacaagatatccacgagttttactaagcagactcggtggagagacacttttaagttaccatggaaacaagcttcagagagatagcctggttgccgtcaagatttccgccctttttgcatatgtgagtaaacacggtgaaaattgtatcgagttgtcgaggagatagtggtcatttttcacgtttttgtatttccaaaaaatatttgtaactataatcagcccgcttttactttcttatgaattatatcatttttaactggaataatgtgttaattttctgaacgttcaacgctgctcgcaagcatttcccc

SEQ ID NO: 21664 - DNA, 1663 bp, Oryza sativa
  ref <308>: DATABASE ACCESSION NUMBER: AK071923
  ref <309>: DATABASE ENTRY DATE: 2001-12-06
ggataagcttcatcgtcgagagggaaacagcccggatcaccagctaaggcccctaaatgaccgctcagtgataaaggaggtgggggtgcaaagacagccaggaggtttgcctagaagcagccaccctttaaagagtgcgtaatagctcactgatcgagcgcccttgcgctgaagatgaacggggctaagcgatctgccgaagctgtgggatgtcaaaatgcatcggtaggggagcgttccgccttagagggaagcaaccgcgaaagcgggggtcgacgaagcggaagcgagaatgtcggcttgagtaacgaaaacattggtgagaatccaatgccccgaaaacccaaggtttcctccgcaaggttcgtccacggagggtgagtcagggcctaagatcaggccgaaaggcgtagtcgatggacaacaggtcaatattcctgtactaccatttccccaaggacgtcaacctctggaagctcatgggcgatttcaatctccacggcctcaccgccccagaggagtatggtgggatggggctcggctacatgtaccactgcattgccatggaggagatcagcagggcgtccggctcggtcggcctgtcttacggcgctcactccaacctctgcattaaccagctggtccggcatggcagccctgcccaaaagctcaagtacttaccaaagctaatcagtggggagcatgtgggggcattggcgatgagcgaacccaactctggttctgatgttgtcagtatgaagtgcaaagctgagaaagtagatggtggttatgtcattaacgggaataagatgtggtgcaccaacgggccatctgctcagacactggttgtgtatgcaaaaacagatatagctgctggatcaaaaggaataaccgcgttcataattgagaaggggatgcccgggttcagtactgcacagaagttggacaagcttggcatgagaggaagtgacacatgtgagcttgtgttcgagaattgttttgtgccccatgaaaacgttctcggggaagaagggaaaggtgtttatgtcatgatgtcagggcttgatctagaaagacttgtgttagctgcaggtcctatcggcctcatgcaagcatgccttgatgtagctgttccttatgttcgccaaagagagcaatttggccgtccaattggtgaatttcagttcatacaggggaaattggcagatatgtacacctccttgcagtcatcaaggtcatttgtttactcggttgctagggactgtgacaatggtaaagttgaccgcaaggattgtgctggtgtgattctctttgctgctgaaagggcaacccaggttgcacttcaggcaatacagtgtcttggtggcaacggatacataaatgagtacccaactggccgattgctgagagatgcaaaactgtttgagattggagccggtactagtgagataagaagaatgataattggccgcgagctcttcaaagaggagtgaaactattattttggaagccaggtatctgatatgtataacttggggaggtgagcatgatttggacaatttgtacacatcgtccctgatgtcctatatctgataatttgtccaagatttgtcatgactttgtatatttccaatttaataagaaataaaatgcacctttcttt

SEQ ID NO: 21665 - DNA, 4334 bp, Oryza sativa
  ref <308>: DATABASE ACCESSION NUMBER: AK071924
  ref <309>: DATABASE ENTRY DATE: 2001-12-06
gagggacgtgctgctcggaggcgtccatggcgtggatcgactgctccctcctcgcctggctcctcttccgcgtcgtctttttctcctgccacgccaagcagttcagcatcttctagcactcgatcagctaggctgaatccacatatactccagcatatatatacagcaactgattaagtaagctgttgctcgccgacgacggtggccgagcatgtccggtgcacggcggtgcggtggccggacgtcggagagaagctcggtggtgggcgacaacaggaatggatacgtcgagaccgacccaactgggcgctatggccgggtaatttattcacttcttcttcttcttcttccaaagagaaatttgacttgtttcctttcaaagttcaatcttatcatgattgccaaatgatcagcaagcaattccgagctattcagggtcaattcagttcattgctttttcgttcaaaagaaaaaaaaatcagttagttgcttttgattctacttggacatggattgtgcctatcatgcatgagtttagttgttcagctctatcatgttctttagatgtgggctggtacttggtaattacatttcaatacacgttgtaagcatcagttaaaacatgttggcttcattctctttcagaaaagcatgtaggctttatgttctttagcataattttctagagtagattccatgttgatgtacacatcggaactaacacctctaaactatgcaagacacaattattgtgtctttagtactttcatcgtatccatttggcttttgctgctatctatgggctgcataggacaattgaatattgcgcattgaaacatatcaggtttgaggtttcgttgttaatcctaagccattgctgtactgaaagataacatcatttttttctatatttggtcaaataacggaagtgcatcataaatttgagatgatgagtgagaattcgattatgatctcttccaatccaatcagggaaggtaaggtgttccttatcaaacaagctagagttgttgtttggttggcattcagtttcctaatatgttggatttgatctgaatagataagcatgttccatgtgtcagtctgccaataatcagatgttgaaaaagtttcaagagtggagtatatgccctgtctggtcatgctcatgcccaacgatttgatacgatccgctcacctttttcttagtgggatgaagacgtattggcaactttattagttcatctttttcagtagtttctctagggttagaggtgtacttaccggcaacttatttgtagttatgtgagctttttgcaaaagtgtcttacttttataaatttgacaactacccactactttgagttaactttttatatgtatagtaattttaacttttgatcagaagtactggttgtttagtgctaaattagggagagtagttaattgaggtgccaaattggttctcgtaactcaaaagtgttgattttatttgactagagattttctagacattactgtagcaaaaacccgtttggaatctgcatttttcacttcagaacattatgaaaataaaacttatataagatttttaaatcccatgtaaaattaaattttaaaagatgactataaaagtgcactacaataaataaataaataaataaaatttatctcattctcttgaagaaaagcaattcattaattgcactttctagtgtagtacaatacacaataatattgttttctgaccatgtgctcatgatctgtaagtatatattttctctacatatgcaagcatgtttgtttcaaaaactttttaaactgcacgaagtataaaatatttagaatttagtgaaagcaagcatttcgaatcaaaattaaacttgtcaattcagaataaagtagtctggctagcttgacaatatatagataaattaattaattcgctttgtgctggcatgcatatttctggtatttcagatatatcagaaatttcgttttgtactttctgctatttcagaaacttgaagaatttccccccccccaatatgaaattaatttggctgaaaaaaaattcttgtttttaagtaagcaaattttaactaaactttaaccaaaatttgttgaaatttcaaccttttcggcctgagatttccgaaatttcggttctatcgaaatttgttcaaattttgtactgtatacaatatgtgtgcagttgtcggaggtgctggggaagggtgcgatgaagacggtgtaccgagggttcgacgagctgcggggggtggaggtggcgtggaaccaggccaccatctccgacgtcctccgcaccccggacgccctccaccgcatgtacgcggaggtgagcctcctcgccgacctccgccacgacgccatcatcgccttccacgcctcctgggtccacccctcccgccgcaccttcaacttcatcaccgagctcttctcctccggcaccctccgctcctaccgcctccgctacccgcgcgtcagtcgacgcgccgtcgccgcctgggcgcgcgccatcctccgcggcctcgcctacctccacgcccgcggcgtcatccaccgcgacctcaagtgcgacaacatcttcgtcaacggccacctcggccaggtcaagatcggcgacctcggcctcgccgccgtcctccgcggctgcgcctccgcccgcagcgtcatcggcacgccggagttcatggcccccgagatgtacgacgagtgctacggcgtcggcgtcgacgtctactccttcggcatgtgcatgctcgagatgctcaccaacgagtatccctacagcgagtgcgacaacccggcgcagatctacaagaaggtcaccgccggcaagctccccgacgccttctaccgcctcaccgacgccgacgcgcgccgcttcatcggccggtgcctcgtcgacgccgcccaccgcccctccgccgaggagctcctgctcgaccccttcctctccccgtctcagaaccacgacgatcacaatatcattgctcatgccactgcgccgccaccgccattgccattggcgtgcagtaattccagtgaggagcaagaggaggcggcgccggcgccggcagcaaagacgacggacatggcgatcaccgggaagctgaacaaggagcacgacaccatcttcctcaaggtgcagatcggcggcggccgcaacgtgcggaacatctacttcccgttcgacgtggcgaacgacacggcgatggaggtggcgacggagatggtgaaggagctggacatcgccgaccgggagcccacggagatcgccgccatgatcgagcaggagatcgtgaggttggtgccagggtacaagcagcacgagtactcgtacgcggatgacaacgacgatgatgacgtcagcggacaccctaatcccttctactacctctcctcttcgccgacctcctctcagggatctctctgcggagtggggtccacatcgtcagaggggtttcctggcccacatggaaaagttgactggtcaagagattactgttactaccctccaagcagcgtcagcgtgagcgacgacgatgacagcagcacgagctcactctctgctgcagtcagtgcaagcagcctgcatcagcagcagcagcattgctcggcctcttccagcagattggggccagcatctgcatctgcatctgaagacggaggaggaggacacgccggacggccacggcagcgagagggggaggaggagcggcggcggcggaggatgagtcggaacaggtccatggtggacatgcggagccagctgctgcaccggacgttggtggaggagctcaacaagcgcctcttcttcaacaccgtcggcgccgtccacgacatcggcttccgcgaccctactgctgctgcttcttcttcctctagctcttcccaccaccgccggagaagcagcaacaagatcgaccacaagcaccactacatgttctgaataaacttttcagagcaacttaatttgctactccattatgtacagagaatcagatgcagagtattagcctctgataatggattagggccgttcactttgatgccactttgaaccttactaaattttggtaaaactaccaaaaaaaagtggctacatttagtttgttgtcaaattttagtaactatatataagaaatcctgctaaaattttaacaagttgccaaaatttgataaggttttttttttgacatcaaagtgaacatgcccttaatgtgcgcagtgcagagtatgcattgcgtgcgcggccacaaaattgtgtatatttggaacgagtgcatatatatatatgcgtgttatcaatg

SEQ ID NO: 21666 - DNA, 1224 bp, Oryza sativa
  ref <308>: DATABASE ACCESSION NUMBER: AK071925
  ref <309>: DATABASE ENTRY DATE: 2001-12-06
gatccctcctcctccctccctcgtggcctcctctctccagatccacatcctctcctcctcccaagctgttcggtggcacggccgcgacgaagggaggcggacgtcggggggcgcgacgatggcgactgcgacgggatggcgacgggggccgcggcgaagggaggcggtcgtcgtggggcgcgacgatggcgactgcgacggggggcgccgccgcctagtcccagctcctctccctctctctctctctctctctctctctctctctctctctctctctccattcggccgccgccaccaccccctctccctctctcagatctggcgcgcggggagcgatggcagtggcgtcgtcgaggcggaggctgcggcggggctcggtagcggcggcgtcaaggcggatccggcggtggtggttctcaccggccacttcaaggacgacgacggcaacctccgcagctggttgggttcagcagctgctgttcttgcgatgaggcaatgggtgatgctgggaacatttttttttctgcaggatcgacaatatcgttggccctcttaagaacgcgcttgcgaaaattggttttcgcaggcggttttatgaccgcttgtgaaaagcaatgattttctctggcctttacttattggcgggctgctcagccgccagcacataccactttttgccgccggcgtaaattttttcgtagtagtgtaccttttcttttctgaaaaaaacattacattatttgaatgacttgaaaaagatgagtgtacgtgcacgcacttaggtcgtaaagagattgtctccattttaaactcggtcactcggaagtatttatgatgttggctgtttgttgttcattccatgagtgcactttcagggaacgtgcagtttttttttcttctgaacatttcaaactgtgctatagtcaaatacaaagattttttttcccgttttattcatccttcaagagtacacaacagatcatgctcaggatttaaataggtttacattatcccgccaagaaaaaaaaaaggaaggtttacattacattggttttcgatcttgacgagtacaatctctgaaatttctctcattgcaacagtcgtagtcatacataacaataatgtgtactcgctccatcccataaaaaccaatctaatagtttcatccaatactagattggtttttatgacatgaagaaaatactatgttattttacgattgcc

SEQ ID NO: 21667 - DNA, 3448 bp, Oryza sativa
  ref <308>: DATABASE ACCESSION NUMBER: AK071926
  ref <309>: DATABASE ENTRY DATE: 2001-12-06
gagataggattaagtttcaagagttaatttcttgtactcttgggcgatccatgctgtcaaatcagcaactaacgaggcataatctcgatcactagctctgatctgatcttcagctagcgccggcgagctgcagaggtctccatccatggcgccggcggtcagtgcatcgcagggtgtcatcatgcggtccctgacgagcaagctcgactcgctgctgctgcagccgccggagccgccgccgcctgcgcaaccgtcgtcgctgcggaagggggagaggaagaagatcctcctcctcagaggcgatctccgacacctgctagatgactactacctcctcgtggagccgccgtcagacaccgcgccaccgccagactcgacggcggcgtgctgggctaaggaggttcgcgagctctcctacgacgtcgacgacttcctcgacgagctaacgacccagctcctccaccaccgcggcggcggcgatggcagtagcactgctggtgccaagaagatgatcagcagcatgatcgcccggcttcgaggggagcttaaccggcggcggtggatcgccgacgaggtcaccctgttcagcgcccgcgtgaaggaggccattcgccgccaggagagctaccatcttggcaggcgcacctcgagctcgaggccgagagaagaagtcgacgacgacgatcgcgaggactccgccggcaacgaacgccgccggtttctgtcgctgacgttcgggatggacgacgctgctgtgcacggccagctcgttggtagggatatttcgatgcaaaagctcgtccggtggctggccgacggcgagccgaagctcaaggtggcttccattgttggatccggaggtgttggcaagacgacgctggccacagaattctatcgtctgcatggccggcggttggatgcgccgttcgactgccgggctttcgtgcggacgccccggaagcctgacatgacgaagatcctcaccgacatgctgtcacagctgcggccacaacatcagcatcagtcttcggatgtttgggaggttgatcgactccttgaaactatccggacgcatttgcaagataaaaggtacttcatcataattgaagatttatgggcttcatcaatgtgggatattgttagccgtggtttgcctgataataatagttgcagtagaatactaataacaacagaaattgaacctgtagctttggcatgctgtggatataactcagagcacattattaagattgatccactgggtgatgatgtctcaagtcaattgtttttcagtggagttgttggccaaggaaatgaatttcctggacatcttactgaagtttctcatgacatgataaaaaaatgtggtggcttgccactagcaataactataacagccagacattttaaaagccagctgttagatggaatgcagcaatggaatcacatacaaaaatcattgactacttccaatttgaagaaaaatcctactttgcaggggatgaggcaagtactcaaccttatttacaataatcttcctcattgtttgaaagcatgtctgttataccttagcatctacaaagaggactacataattaggaaggccaacttggtgaggcaatggatggctgaaggtttcatcaattccatagaaaataaagtcatggaagaagttgcagggaactattttgatgaacttgttggtaggggcctggtccaaccagtagatgttaactgcaaaaatgaggtattgtcatgtgtagtgcaccacatggtattaaatttcatcaggtgtaagtcaatagaggagaatttcagcattacattggatcattctcagacgacagtaagacatgctgacaaggttcgccgactctcgcttcacttcagcaatgcacatgatacaacaccactagcaggtttgagactctcacaagttcgatcgatggcatttttcggacaagtcaagtgtatgccttccattgcagattataggcttcttcgagttctgattctttgtttttgggctgatcaagagaaaacaagctatgacctcacaagcatttctgaactgttacaactgagatatctgaagataacaggtaatatcacagttaaacttccagagaagatccaaggactacaacacttgcagacactggaagcagatgcaagagcaactgctgtcctattggatattgttcatacacagtgtttgttgcaccttcgtcttgtactacttgatctgctccctcactgtcacaggtacatcttcaccagcatccccaaatggactggaaagctcaacaatctccgcattttaaacattgcagtcatgcaaatttcccaggatgaccttgacactctcaaaggactgggatctctcactgctctttcgctgcttgttcgaacagcgcctgcgcaaagaatcgtcgctgcgaatgaggggttcgggtctctcaagtacttcatgtttgtctgtacagcaccatgcatgacttttgtggaaggagcaatgccgagtgtgcaaagattaaatctaaggttcaatgccaacgagttcaagcagtatgactctaaggagacagggttggaacacttggtcgcccttgcagagatctctgcaagaattgggggcactgatgatgatgaatcaaacaaaactgaagtggagtctgccttgaggactgcaattcgcaagcatccgacgccgagcactcttatggttgatatacaatgggtggattggatctttggtgctgaagggagagacttggatgaagatttggcacaacaagatgatcacgggttttgtatgctaccggaatcctcttcacgtcttcagagtagagagataagtatcgaagaagacatgcccaccggtgcggaagggacggtgattgtgccccacacaatggagcagttcgccctccacatgagccaagccaagcaatcccacaagctcgtagtcatccagttcactacttcccggtgccctgcttcacgctacatcgcgccagctttcaccgagtatgcgaaggagttcgctggtgcggttttcattaaggtcaatgtcgacagcgatgagctggagagtgttacggactggtatgacatcgaagggatagtgccaacatttttcttcgtcaaggatggggagaagattgacaagattcctggtgctaacaaggagttgctccgagccaaaattcgaaggcacacagcttctccttacttcctccgttgataatgacttcttttatcgtctttgtctagtatatatatggcacttatatagttaactaggaagggcaccttgtttaatgtagctttcatttttattatgaatgttaaggatgatattatattgttgaagtatttttttactccttgtaaacatgtattggttaataacgaagtagtttggacattagttatgattttcttc

SEQ ID NO: 21668 - DNA, 2848 bp, Oryza sativa
  ref <308>: DATABASE ACCESSION NUMBER: AK071927
  ref <309>: DATABASE ENTRY DATE: 2001-12-06
ggcgagcccacgcgctgtagagcgccgtcgtccccaggcgacgggcgaacggatcccgcgtgcggccgcgctcgcccacaaatttcccaggcaaccacgcgtgctgttctcccgcgctctgctcgcgagttgccccaaatttcttcgcccgcccatctgcgcggccgccatctgctcgccccccatctggtattctcgccggagttggtgcggcgggatgtccacgcccggcgcagcttggagtaggaatggatcgaggacattggatgcggcggcgacggccccaggccgaaccctaggtgtcggggcggcggcggcggctccctcattcggtcggggttcttttggtcacgctgtcgggctaccaccgccgccccattctcgcggacgcagtcacgggtcagtagcggcagcgacgaccgtcccggctttctccattgatggttctgtcggaggtgacttcaccagctcaattggtcctcatgcatcgtctcaaccttggtttgatgcggccggcggtgatccctcatctcctggatcatgggaccaagatgtacgtccacacagagaagattggtgcagattgctacatggtggtagatttgtcaccgaccaacactatactccctttttaattaaggtatatctaatatgtactttctccattctaaaatataataactactactgttttaaaaagcaatattatatatattatcgcttttattcgaatattggttccatcaataggctttccactcatcccatccctttcccatatatacccaatctcctcctaatataataaatcagcctaacctatttcagtgtaagaaaattatctcagtaacccactttatacatggtcacgttgtaaaaaaaattactagtggaaaaatattatcatcataataagatttttaatgttggttcatattttttttctaccgagagactaacgagagacccagtgataaataatttaccacgatatattttctacctgaaggggtcagagtaataatttttgcatcaggaggggaaggagaggatagcaagagaatattcgataaaattaataccaagataagtcaaagttatgctggaaaaggtgagagtagtaattcgttttttacattagggggagagggattgaaggaggcgggtgaaaacggtatgaaaattttccaaccgtatcgataccatttccgaaaaactaatataaaaataataattttatcggtggttactgttttcaaaattttgttttcatgaccgttttaaaagaaataataaaatatgatactggtcctgaccattaatttctgacgttagagaggctagcgataaccaatgttcgggtagatataaggccgtgtttagttttcccctattcccaacttttcatcatatcatatcacattaaaaacttttctatacacataaattttcaattttttttctaaacttctaactttcttcaaacttccgatttttttcaggaactaaacacaccctaagagtagtttttgtcacatcaccaggatagtgcaagagggtagaggagaggaggagagaacagttgggtgctacttgtgcaagtttgctcttccagttatccacggcaacaattaacttaaattttttcataacaattacatatatactttgcaggaactgtagctagcaaaattatcttcatttgtaattattatcatagcataaaacaatttaccctacattaccacgaccaattacatacttaaataagttttcaaagaatttactcagctggaagtctacttataatagattagtccataataaataaatattatcatgataataaatatgaattccgttttacttatgtcataaattatgtgtgcgtgttttcattgcaaaataaaaaactaactatgcatatctcatacttcttttgtaccaaattacaagggtttctatgcgtatcataaaatgtcatccctccgtcctaaaatataagcatttttagctataaatctagataactgtgtgactagattcatagttacaagttgttatattttgatatggaggtaatatctggaacgagggatgtgcatataaattttagaaaacacttcgaattctttatactacggaacggatggagttccataattttacctttaagattactaactcgttctctcatacacattttgctccttctagaacttcagtcttttagcaagtaacaaaactaattcccgttaagaaaatattaataaaagatgtgtactccctccgttttatattgtaagactttctagtattatccattcatatagatgtttatgaatctatatgaatgtgagcaatgctagaaaatcttacattgtaaaacggatgaagtatttatgttggaaatgtacaaactaaatctctttgaagtagatatacaatgtgtagggacttgaatgttaatttacaatactttaaaataatgagtgtggccatataaaacagggacttaaacggaaaatgtacaatttgctactaatgtttatttggattattctacaaacgtgtgtgactccgaactgtcacatgtatttgttttgttttgttaactcaaattttaaatcgttcgtagtaacaattgaaaattaggtgttaggtattaacagctccaatccacatcatctatttatagtaatgtcattatcttaaaaaaatgcagagttaggtagtgtcgttatcttaaggtatatgaatatagaaatatatcatgagtcacaattaaatataattatcatagttggtataattggattatcagaaaacagatactccctccatcccc

SEQ ID NO: 21669 - DNA, 1662 bp, Oryza sativa
  ref <308>: DATABASE ACCESSION NUMBER: AK071928
  ref <309>: DATABASE ENTRY DATE: 2001-12-06
tatatctggcttttaggtaaagactattcatttctttgattgttggataactaagccagggtgatgtgaattgcttcttgctgattctgctgtatttaatacaaatttttcctatctttttaacagtgcttcagagggcaatgaattcttctgaagttttccattgttacctgttttcagtttcagtaaaaaactaagctcttcaatgtaaatgggacaacaatttgaatagttactataagatcttttgggatcaaaagatttacttgttgcaggcttaactttcatttacattgcagaaacttatcattggtagataaggatgtgttaaaaggggcttgcttagtacaactcaaggcgaggctaatactaagccattcagaacacgatagccatgacagccaggcaaaggcaacagaaaaaggtaagctgcaggaatttctctttttacctcaccattaaacatttgcctttcattgtttgtacctttttatgatatgccatttacatgtctgatggccacagatggttctgaaattcaattatatttttgtgtaactttgcaaacagatcgccatatgcccatatattgccattctttgtaaatgacaggcgtagacatcaatcactcagtccagtaattgcataatagtagtatttccttgtttttatcttatcatgtgaaaaagtcccctataaaatttggctttctcactattattgctttgcagaattaacatggcaagttttgtacaggaactacatatgcttgcattgaagtttctttggggaaccaggagatgctttaatctttattgatgtattgtcctatggtttgttggatagtcgatctacaaaattaatcctaacactcccaatttacctacaagaggtattcttggatgggtacaacatgttagtttggttcggttttgtcaatacaaaatcatgaggatttctagatgtgtatattctgtgatattatctataatttgatatatattaaatttatctgattatacatgagtttatatatgcgacaccattacgaactgctactatagtctccccgtgttctcttcatacacatgaataacatatatggtacaataaaagagaattgtagttttacagcctctgtgcaagtagctttttaagtttaaatggtaaatatttagttttcccttaagagaagtttaccaaaaaaaaagttctttcaactgagatgcttatgatgtgtgcttgatgtcgccttagtcaatcttgataggcccaagatccccgctcaatcttcaaggaataggtttacttcatgataattcatgtctcatgttaatattgggagaggcaacccactatgctcagctcatggatcttcaggaatggagctgccagcatcttattgacaaacaaatacaaggaaaaatactccatgcacatcaacggttaatgcttttctatgagctggtcttaatatctcaaggctgcactgtgttaggctgaagcaccccagtccaattcttttgcctaccaaataaacttaccaacaccaagtcagttgagtgctgcaatgtgcaaattaaacaatatggtctctgtagcctgctcagcaggaaaaccatttgaaatacctgtggaaatatccctaaacatgcgttaacc

SEQ ID NO: 21670 - DNA, 2023 bp, Oryza sativa
  ref <308>: DATABASE ACCESSION NUMBER: AK071929
  ref <309>: DATABASE ENTRY DATE: 2001-12-06
gatcgccacacagaaaccttcagggcaagagctatagctaagctactgtgtcacccgttcgatcggtgagccgacgccagcacacgcgccgcaacgtttgcgcttagccggcatggcgtcgtcctcgtcgtcccggctgctcttcctcctctcgtgcagcgtgctcgcgctgctcgccggcgccgaagtgcaccatcatgaattcattgttcaagagacgccggtgaagaggctgtgcaagacacacaacgtgatcacggtgaacgggcagctgccggggccgacgctggaggtccgggagggggacaccgtggtgatcaacgtcgtcaaccacgcgcagtacaacgtcaccatccattggcacggcatccggcagttcaggacggggtgggcggacgggccggagttcgtgacacagtgcccgatcaagccgggcggcagctacaagtaccggttcaccatcgaggggcaggagggcacgctgtggtggcacgcgcacagctcctggctcagggccaccgtctacggcgcgctcatcatccgccccagggagaacaagacctaccccttcgagaagcccgcgcgagaagtcccccttattctcggggaatggtgggacgcggacccgatccaagtcatcagggaggctcagaggaccggcgccgcgccgaacatctccgacgcgtacaccatcaacggtcagcctggtgatctgtacaactgctccaaggaagagaccacggctgtcccggtgaagcccggcgagacggcgctgctgcggttcatcaacgcggcactcaaccaggagctgttcgtctcgatcgcgcagcacaagatgaccgtggtcggcgtcgacgcgtcctacaccaagccgttcaccacctcggtgctcatgatcgcgccgggccagaccaccgacgtcctcgtcaccatggaccaggcgcccacccggtactacctcgccgcgcgcgcctacgactccgcgcagggcgtggcctttgacaacaccaccaccacggccgtcatcgagtacgactgcggctgcgccaccgacttcggcccctccatcccgccggcgttcccggtcctcccggcgttcaacgacaccaacaccgccaccgccttcgccgcgggcatcaggagcccccacgaggtcaagatccccggccccgtcgacgagaacctcttcttcaccgtcggtgtcggcctgttcaactgcgagcccgggcagcagtgcggtggcccgaacaacactcgcttcacggccagcatgaacaacatctccttcgtcttcccgcagaccacctcgctcctccacgcgcactactacggcatccccggcgtgttcaccaccgacttcccggcgtacccgccggtgcagttcgactacacggcgcagaacgtcccccgctacctgtggcagcccgtcccggcgacgaagctgtacaagctcaagttcggctccgtggtgcagatcgtcctgcaggacaccagcatcgtctcgccggagaaccaccccatccacatccacggctacgacttctacatcctcgccgagggcttcggcaacttcgaccccaagaaggacgccaagaagttcaactacgtcgacccgccacagaggaacaccgtcgcggtgccgacaaacggctgggccgtcatccggttcgtcgccgacaaccctggggtgtggctcatgcattgccatcttgacgtgcacataacctggggcctggcaatggcgttcctggtggaggatgggtatggcaaactggagactctggaggcgcctcctgttgatcttccaatgtgctagtgatcagcattcggcagatgatgatactgcgttaagaatacaaaatcccgttcatgtcgtattccaaattgatgctttttgggggtttattttgtgatctccagtactaggggttgatttttcatcttgatttgagctttcccctgtaaagttaagagtttttatgtgatttctatgcattattttggaataaatcctttttgtagc

SEQ ID NO: 21671 - DNA, 1772 bp, Oryza sativa
  ref <308>: DATABASE ACCESSION NUMBER: AK099212
  ref <309>: DATABASE ENTRY DATE: 2002-08-28
gatctttccatatccatatccacccatatcacatctctgatcaatccttctgcgtgttcgtgaattgggaaattaatttggttttgagacaaatggaggcgacgtcgtcgtcgtcgtcgttgttgaacgggctgaactccggcgtggtgctgagcctgatcgcggtgctgtggacggtggtgtggcagaatctgcagcggctgcagctgcagacgctggtggggcggcacatgaaccggcacgcgcggcggctggcggcgctcgtcgacccgtacctgtcggtcaccatccacgagtacgagggcggcaggatgaagcggagcgcggcgtacgaggaggtcaaggcctacctcagcgcgtcgtcggcgcgcgacgtgcgccacctccgcgccgagggcgccaaggacgccgacaagctcgtcctcagcatggtcgacggcgaggaggtctccgacgtcgtcgccgccgacgacagcaccgacgtcaccgtctggtggtgcgcgtactccacgccgccgccgcgcaccgatggaggcgggtactacggctggggcggcggcggccgcgcgcaggagaatcgccggtactaccgcctcttcttcctcgaccgccaccgcgagctcgtcatcaacacctacctcccgagcatccgcggccagggccgcgccgtcatggtgcagaaccggcagcggaagctcttcaccaacatctccacgcacaactggagcgacgtcgacggcctcgtccggtcggcgtggagccacgtcgtgttcgagcaccccaagacgttcgacacgctcgccatggacccggccaagaagaaggagatcatggacgacctcgacatgttcaagaacggcaaggactactacgcccgcgtcgggaaggcgtggaagcgcggctacctcctgcacggcccgccgggcaccggcaaatccgccatgatcgccgccatggccaactacctcgactacgacatctacgacatcgagctcacctccgtccactccaacaccgacctccgcaagctcttcatcgagacgacgagcaagtccatcatcgtcatcgaggacatcgactgctcgctcgacctcaccggcgcgcgcaagaagaagaaggaggcggccgacgacgacgacggcggcagcaaggacggcggcgcgccgcccaagccggacatgaagaaggacgcaagcagcaaggtcaccctctccggcctcctcaacttcatcgacggcctctggtcggcgtgcggcggcgagcggctcatcgtgttcaccaccaaccacgtcaagaagctggacccggcgctgatccggcgaggccggatggacaagcacatcgagatgtcctactgctgcttcgaggccttcaagttcttggccaagacatacctcgacgtcgactcccaccgcctgttcgccgccgtcgacgagctcctgtcggaggtggacatgacgccggcggacgtcgccgagaacctgacgcccaagagcttggacgacaatgccgacacgtgcctcgcagcattagtgaaggagctcgagaaggccaaggagaataaatcaaaaggaaaaaatgctcatggcgaagacaaagacgaagacgaagacgaagaagatgacgatgtagaagtggtcgggaaggataagtagctagccgccattggcgccttgctggagtggttgctagcttctcgttttttctagtccacgtagcttatgatcacagtaatagactaagtttttttaagaaaattattttcattgtgg

SEQ ID NO: 21672 - DNA, 1991 bp, Oryza sativa
  ref <308>: DATABASE ACCESSION NUMBER: AK071930
  ref <309>: DATABASE ENTRY DATE: 2001-12-06
gtccacttgtctgacgggccctcgccttcccttcgcttcctccccatctccgcctccgcctccgccgccgcgccgccgccggcgacgactccgacgagcgacccctccgcgggcaccgggtcgccatgtaccgcgccgcctccggcctcggggccatcaagcggcatggactggatggtcaaatgttgaatgttgcgattaggtgtgctagcacaagtgttgcacagaggtcatcaggtggcttctggacctggctgacaggtgcacggtcaaatgcattacctcctccagattttacacttccaggggtcaccattccacctccgctacctgaccttgtggagcctggcaagacaaaaatcacaacacttgcaaatggtgtaaaaattgcttctgagacaactccaggaccatcttgttcagttggagtatatgttaattgtggttctgtacatgaagcacctgaaacactaggtgccactcagctgttgaagaagatggcctatacaaccactacaaacaggagccatttgcgtgttgtgcgtgaaatcgaggcagtaggtggcaatgtgaaagcatctgctaaccgtgagatgatgagctacagttatgcagccctgaaaacttacatgcctgaaatggttgaggtgcttattgattgtgtacgcaatcctgcttttcttgattgggaagtcaaggaacagataatgaaactgaaggcagagcttgcagaagcttcaagtaaccctgaaacttttcttttggaggctcttcattctactggttattctggtgctttggcaacccctctgattgcctcagaatcctcagttagccgattgaatacgaatgtcctagaatacttcttagctgagaattacactgctccccgaattgttctagctgcaacaggtgttgatcatgatgaattggtatctattgctgaaccacttctgtctgacatgcctggtgtaactggaccagcaaagccaaagtctacctatgttggtggggaatatagaagaactgctgattcatcgaacacagatgttgctttggcatttgaggtccctggtgggtggctcaaagaaaaagaatttgtaacagtatcagttcttcagacccttcttggtggcggtggcacatattcctggggaaggcatggaaaaggcttgcattcaagtctaaatcatctcgcaaatgaattcgaccagattagatcgatagctgctttcaaggatgttcacagtaacactggcatttttggaattcatacatctactgatgcagcattcgttcctaaggctattgacttggcaaccagagagctcacttctcttgccactcctggaaaagttgaccaaactcaacttgaccgtgctaaagcgacagctaaatcagcaatcttgatgaacctggaatcaaaggcatcagcaactgaagacatgggacggcaaatattggcctttggtgaaaggaaacctgttgagcaccttctcaaggctgttgatggtgttactctgaaagacattacagcccttgctgagaaaatcatatcatcaccattgacaatggcatctcatggaaacgttctgaacgtgccaacttatgattcagtcagtggcaagtttcgctcgaaatgagtagtaatgtggtcattgttttcctcctcctggacaagttttaactgttgatagtttttcctcaggccattcattggcagggtttcagagagaaaaataaggagcttcatacaattttgatcatttaactctggatgattgagaataccatattttacctttttctgcaacatttgtccacttgagttggaattttttatgctgttttcatcagttttatgggcctgtaaattttagggccctctttcggtggcggccagggcctgtacaaaataccggtctccttgcaaaatctttgacacgaatgctgaaacacttgaataaatattctatctatactcttgcatg

SEQ ID NO: 21673 - DNA, 1544 bp, Oryza sativa
  ref <308>: DATABASE ACCESSION NUMBER: AK071931
  ref <309>: DATABASE ENTRY DATE: 2001-12-06
gtgaaatcgatgcactcggtgattaatgacctcaattctaggatctcctttgtcgtggccgagaacgcaacactgcggcagcagcttagtggcggcagtgtgaattgcccaccacctggggtgtatccgccggcgccaattcccggcatgcatttcccatggatgcctgggtatgcaatgagaccccctggttcccatgtacctcttgtgccaatcccccggttgaagccgcaacagccagtgccttcatccaaagtagtgaagaaaccagagagcaagaagactgtggagaacaagagtaagagcaagaccaagaccaagaaggtggctagtgttagccttcttggtttgctgcttattatgcttgtctttggtgctttcattccagggtttagtcataactttggaatgtgtgggcagagtgataatgctatgtttaggaattttggtcagtctcatgctagggtgttgagtgtcagtagccaggataaaagtagtttgaacaatagcgacatgattggtgttgatgttggaaagatgacggggaatactgatgggccagggaagaaacatcagcctgcacacaactcaagtgagatcctccctgctttgttgtatgtgccgaggaatggaaagcatgttaagatcaacggcaacctgattattcattctgtgcttgcaagcgagaaagcagtggcacataaggcctcaaaagatgatagtgatcagtcagctagagatcacaaagagactagtgttgccatagctcgttatctttcgctgcctggaaaggatgtgaatcgacaggagacatcctcggcagatggaccattgccacaatggtttcgtgaaggaatggaaggacctatattaaattctggaatgtgcagtgaggtatttcagtttgacatttcgacggcttctagcaatcctggtggcattatacctgcatctcctgttgtgaactcgtcaagtgtcaatgctaccgagaaaatcccagcacattctgctgcttatctggcaagctgaaaaacagaagagtcatgtacaatgaagcgattccactcaccgatccaagggaggctggtaatggggatggcgatccgagagtatctccgaaacccctgtccaagatatttgttgttgttcttgttgacggtgtgagatatgtcacttactcctgcacgcttcctttcaagagctccagcccacatcttgtgaactaagcggctgggttgttcgccaaaaactgacagatgaatagatttatacaatgatctgatgctgtttcctaaccaaggactaaacttcctatgcactcaggctgaggtaattcaagtttgtcgaaggttcggagtgatgagtgcgagtttagttaatgtatgcagtttttgcagtgctgtgataatcgggttcgtttgctgtacctctagctgtaacggtgatgtaatcatgtaatactgtttgatcgttgagatataagtgcaactagtaatatgggtagtcgagaacacgtgcagaatatacatgcctttttttacctt

SEQ ID NO: 21674 - DNA, 1279 bp, Oryza sativa
  ref <308>: DATABASE ACCESSION NUMBER: AK071932
  ref <309>: DATABASE ENTRY DATE: 2001-12-06
gaaggaaggactaacgcctggacacgtcactacctcacccaaacggacccaatcctcaccgcgtcgcccccgccgccggccagccgccgccgccgtcgcccaggaggcttgcagagatgtccctctgctgcttcagcagcagcaccgccgccgccgccgccgcccgccgtttcctcctccctcacctcttcctaggccgccgccgccaccgccaccgccacgaccaagtccgctacacaatcctccaccacccgcctctcgccgtcgcagcagcgccaggtttccctctacgtggacgccctcctcgactggaaccagaggatgaacctcaccgccgtcaccgacgagggcgaggtcatgacgcgccacgtggccgactccctcgccgtgctgcccccgctcgagcgcgcgtaccgcggcgatttgggtgggatgaggcttgtcgatgtcggctccggtgctgggctccccggcctcatcctcgccgttgcgcgcccaagctggaaatttacgctgttggagtcgatgcagaaacggtgcttgttcttggagcatgctgttgaggtcatggggttgtcaaatgtggatgtggtgtgtgaccgagctgaggacagaatgttggccaaagtcctgatttccgggaggcatttgacgtagcagtagcaagagcagttgcagaactgaaagttttagccgagtactgcctcccgttagtccgaattgatggtttatttatagctgcgaaaggacacaatccccatgaagaaataaaaaatgctaaaagtgcagtacataagttgggtgcctccatgttagaaatatgtgatgttgaatctatgggacctcatggtcaacggacggctgttgtgtacataaaggagtgcattactccaaagaaatacccgcggcatccaggtactccttcgaagatgcccttatgagaagaatgttcactttgctgtagatttacaaatttacaatagccaaaagctgaaatccgtggttagcctcacttgaatgatattggctggaaggattattcataaatcatggaaggattgttacaccgtcctgatatcagttatttgatgaatcagactaacaaatcgttaagcattttttaaagtgtaataatttctaggattgtcactgtaacaatgttgcagtagaaaaaatagcatgaattgcttgttgtaccatccattttccgttgactatcaatgtttcttgtgaacgacatagaatatatgttgttagtaggatacatcccaaagtttcc

SEQ ID NO: 21675 - DNA, 1775 bp, Oryza sativa
  ref <308>: DATABASE ACCESSION NUMBER: AK071933
  ref <309>: DATABASE ENTRY DATE: 2001-12-06
gatttttccttcgaagcccctcgttcccctctctctctctcctccacctcgctcccacctcctcctcctcggctttgctgatccaggacgagccaatcgagctcgccgacgggcggagccaccaccaccaccacccatccccggcgccgccatgctggcttccgcgagggggttctgggggcggcaccggcggaagatactggtctcgctcggggtcgccggcgccggctacgccgcgtacaggtacttggactcgcaccggaggcagctcgtccgggtggagcagcgcgcgctggaggagcgcgccgccgaggagatcatcaagaaccaattgcagacccactttgaaaatgtgcagaagatctcagacacgaccacactgccttttgctatgcattatctccgttcaaggatcatggaggaattggatatttcacacctgactgagaagctaatgcacgggaagggagaatccagtgcccctgccctgacaccaaaggagaagtatgacacttgggagaagatcaaaattttgagtacgcttcttcttatcttacatggtttcgtgttgcatgccttgttgaatttttctttgtccaatgaactatgagaaattatggatttatattgttgttttaggtttcacaaggactgtttcttcaatatgggcgatgacgttgcttagcttatatgttagagtccaggtcaccatattaggcagacatctctacttagattttgctcgtgttacggatggtgcgcaattacaggagggttctgacacctttagcaaaagcgggcacaaagactttcttgcaactgctgattaccttgccacatatggtatcaatgcattaattacaaagatgcagcatgctgcaacagaaatcttgaaagagaaacaactgaaagaccctatgggcattgatgaagtcctagaaacaattttacaaatattgaagcagttcatgggtctttgtgaagataactcttggataaactaccttgtacctgagaatgccaatgtgtatgcacagttgatggctgtgtccagtagtggctttgatgattcttcacttctgaaggatgttaggaagcttgatcagttaatgtctgagacacgtatagttttgtcaagtgatgatttcagaaatatcatggatagatcattgaagaagatagctagcgtggtggtagaggacttggctgtacagattggagctccaattcctccacctggattgcccttagcaaagctcttggccaaagtagctcaactgagtttgccattgctcgaggagccagataagaacaagcacattcagattatccgaagtatgcctgaagtggaactcttttacactttcctctacgcaaacatgccaccagaaacataatgaagcacactaatgtggaatgcaatacattggtcccgaattttgccattagaacaagtctgatattttgagcactttctgaactccggaaacagaaggcggagagaagactgatttatgctccttgcccctatgtatgctggagatgtccagttgtcactaacacggatctaactgagcgcagtcctttcttaattcatttctctgcttgtgtgcttctagctagaaccagcactgtttcagccctttttttatatatatttttgagatcttactatggaaattgtacttgaccagggtttcaatggtttatgtaaagtgtgatatacatgttactatttctttgctccttcattcagaatgtaaaattttctaccc

SEQ ID NO: 21676 - DNA, 1790 bp, Oryza sativa
  ref <308>: DATABASE ACCESSION NUMBER: AK071934
  ref <309>: DATABASE ENTRY DATE: 2001-12-06
ggccgacgaccttcgagtgcgagccatgtccacctccgcacccacctcgtcgcctgagccgccggagttcatccgcgggagcctcatcccggctctccccgacgacctggccatccactgcgtcgccctgctgccgcgcgccgcgcacccctccctcgcgctcgtctcccgcgccttccacaccttgctgtgccgcgacccgggtcccctcctggccgcgcgccgccgcctccgcctctccgacccccacgtcatcctctccctccgcccgccggcctccgcctcgcctctcttcttcctcctcctcccgcatcccggatggccaccgctgcctctcccgtcccctcccgtccccgtctcctcctcctcctcggtcgccgtcgacggcaaccgggtgttcctcttcggcgggtccgtctccggagtgccgtccccgtcggtgcagatcttggacccccgcaccagatcctggtcagtcggcccgcgcctctcctctccgcgggagttcgccgccgccgttgcccactccggcgtactattcgtcgccggcggttgtgttccttcctcccccttctgggctgagtccctgaacctctcctccccggatgcaaagtggtctccggtccccagcccgccccacttccgggagaagtggatgcacggctccgcctcgctcgccgggaaggtcctcgcggtggccgatcgcggcggcttggcctacgacccggctgcgccgcctactgaggcatgggcgccggtttctccgatccttgacatggggtggaagggccgtgcagctgtggtcggtggaatcctctactcctacgattacttggggcaggtcaagggctatgatccggacaccgattgctggagcaaggtggaagggttggagcaggagctgcccaagttcttgtgtggtgccactctcgccaatgtcggtgaactgctctacttggtttgggaagggaagtggaaagggaaagggaaagcgaaaggaaagggcgaagcaaggagcatggtggtgattgattgggctgccattgcggtgacgaaagccgaagagggccggctaacggggaaggtgttgtcaagggacaccattgtattcaaggacatgccaaaggggtcagcaatcacacattgcatcgcattggagctgtgacgatggttgctccagtagcccagtcataaatcaaatggcatccatgttttaaatgttctctgctgatttgaggatggaaaaactcagtattgtggtaggctggtagcacctcctgctgagaaatgaggatgcttcactactgggcagcagagcactgataaatctggctggatgacaagttaaagataattcagaaaattgtgtttcaattccttatcgtctggatgctggaagaaggcatttggaattctacccagcaaaaatcatgcatttggatctctcttagacattgaacatatttgatgaagcagaagttttgccttaaacactatttattcttcattgccggtcagttgtaattgtaagataaccaatgtagcttgtagccctcttgtatagttgtatggcctattgctgagcttgctgtgcccgtgtgtggcagcattagttgtgtttaaacatatcgaattactttgctagcttgggccagtagtgcaaattgttaaaaccagtttggcccaagagaaacagcacctacagttgtctcattctgtgcagagtttctatccatggatgtacccctaaataaactatgaaattaattcatgcattctcttctaggacc

SEQ ID NO: 21677 - DNA, 1604 bp, Oryza sativa
  ref <308>: DATABASE ACCESSION NUMBER: AK071935
  ref <309>: DATABASE ENTRY DATE: 2001-12-06
aaaaaaaaaaaaaaaaaaagaaaagaggaagaaggggaaaaaaagaaagactgcgaaaaccctcgtagaagaaaacccaccggcggccgatggcgtcgccggcgaaggcgcagcggcggccggagggggcctcggtgctggagaccctccccgcgctcccgctcgcgatcatcatcgccaaggccggcccccgctgcgccgccgcgctcgcctgcgccagctccaccctccgcgccgccgcctccggcgaggccctctggcgccacttctgctccgacgacttcgccctcgacgcccccctcgctcccggcgacctccctctcccttccttcaaggatgcttacaaagcttggttccaatcttttgggatgtaccctttgccacttgttaagagggtgaagatcttctggagctcattcagggcatggctatgcgagtatttcccggaagggctgaggactctaggggaaggcgtttcggaagccgagatagccgtcgcggaatgtaacctgggccttgtgcttcctatgcccactaagctactgtacggtttctgcaacggccagctgcacattggccgcggcgaggaggtctcgtacggcgttatgggaggctatgattatgttcaccagaggtataccgtgcgcttgctaccgctcgcgcaccatgctgttcagaaaaactcaaactacattgtagttgcgacgagttgttttggggagaagatatttcttcttgattgtgcgagtggccgtctttatgtcggcaccaagtattggaatgaagaaagagaaatcatggcatgcgtgccaaaagcgacaataaggctcgctgtggatgatgatcatggcatgcctcaagatggatttctgctgtggttggaagagcaccttagtcgcctacaggatggcttgatcaaggtgcagagttgtaaattcccaatgctggcaaggcatatcagtttgtatccagtacaactcccttactgttcgtcggcaagtatgcatggtatcaaggttcgtgcctctgctgtctttgccccagaaaactctgctttcgctgattaccgatgcagatattcgtactatttctccattcgtctatcccttcctgaagcattcgttgtagatggcaagtggtattcttccttccagcttcagtcatgccactacactattcagattggagatgaagtcctcccttacacatgcaactatggcggccatggcaagtgtcctctcctgaggtgcggcgaggagctgtttgtctatgggtgttccatatcggcagcactggagcctggatccgtgatgggcaacttgacgcttgtcccttggaggtgtggtcagcctagaggaagcccttttattgccgacatagctcctttccctctgcacccgcctgactacatcttctgaagaattggaagctggtccatcaaagcatgcatgcagttgaggctaattcttgctagagcgccttgttggaaattttcctggatatatttttgtacgtgcagctctcggaattgttgtcttgacaagtgacgaaagtctcatgagctgtgaattatatatacacacacacacaacacacttttcggc

SEQ ID NO: 21678 - DNA, 2033 bp, Oryza sativa
  ref <308>: DATABASE ACCESSION NUMBER: AK071936
  ref <309>: DATABASE ENTRY DATE: 2001-12-06
gactttctgcccgcgcgatgactccgccgccacgaatccccgctgcctcctccctcctcctccctcccccatgcctagggaggccacgatgggctcctggccagtcaccgccgccagcaatgcccgacaacgcaacgccctactacgccaagggaaggccacgaggggcttcccgcttgccgtcgcggccgccatgccctcctccgcactggaccgctgccactcactccgcgcccggcgacactatggcctccctctgtcgcaccaaagggagcttcccattcaccgcctccatcgtgtcgtgagggacctccacttgtggcacttctgacgctgcgacgcagtggagggcattgcctctggtggcaccatggttctactgccatttaccggaatcatatcatttagtggtttcaatctcttctcccccttccaattcattgttttgtttctgcaatttggttgacaaagcaagttcctttattgtctggacatactgtattttgcccagtaggtgttcaattaaatgccactgaaataatctgaatcagagccggtttaatcatgcatctacgtggacacatcctttagttttattgtctaataggtattgattatgtatatagcagtgccataagaatttttctctacagctcattcaagcattcaacaatgctgggctgatttttggaatgagcaatataagtttaacattgttccatgtttttgcttgtaggatgtatacttctattgttgtccttaccctcatacctgcgtatgtgtagtaataaatattggttgcataagaatgacacagaagactgagtgggtctttgttgcgaacccaaaaggcctatagatcttactggtaattcctacaaggaccaaactccatttatagatatttgcacatttatgctatttgcttttgcttgttctgtacaatattctcctatttaccctctggggtcaacctgtactcaacacgtgccacaccaatctcaacctatatccaacatgtgccacactaatctcaggctggtattgaatctgccactgccagtgcaacaaaaaaactaatggtgaggatggtaatagaataaatcacaatgctaatgtgcagcctctagacatattgcaaggaatttggcatcaatgtttttctgttactgtattttctatgtatctgtcaatgcttgactgaatattttattgccatttaaccacccatgatgtgttaatgccacaagcagctatgatagacggtgatgatgacaacgatgatgaaagttatctcatgagaggtcaaggttgaatttgattggaaatcagctctgcaatgtcctctcaatcaaggaggagcctatgtcgattacttgagctttttagccatgttaatgattgttgatatcgcttgtaatctttgtctccaacaacacattgctcacaagtgggctggttgaactccatatgaatgtgcataaactcaagtgaaatttggggccactttaaagaagaggggcgaagaagatctgtaagttagaaggtgagcaacatggatggtgatggtgttctgacgtccaaatatgaaaccagccaaccagcttggcagcctgaagatcttttggaccaaaagggcaggcctctttcccaaggtgaagcacttcgtagctacaatatgcgagtgctcagcctatacaccatatccttatatgagtatgctgagagttttattctccattgaggtgaagtatgctcaaaagtttcgttaaaatatattcagtttagtgattttgttcatgaactaactcacttcactaccatgaactcatttctccaaaattttggatcttttattagcaaatctatggactgaagtggggttttggccagagctccaatcccctgcaaatcccaaatgcagtacgagtaatattttgcaaaattatgtactccagttctattggaattgatgtaaaaccaacaaattcttagttttgtcagttattaaaacgcatagatgcatattgtgt

SEQ ID NO: 21679 - DNA, 1361 bp, Oryza sativa
  ref <308>: DATABASE ACCESSION NUMBER: AK071937
  ref <309>: DATABASE ENTRY DATE: 2001-12-06
gggctggatcggagacgtcgcgcgcggcgcgccatatcctgctcgcgtttccccggtttttcgtattaaaaccaacggcgcgccgccgccagacgaccggacagagtgctcgctcgctgctgtctcttcgagcttgctttgcgtttgcgttgcgttgctttgctcgatcgatcgatcgatcggtcactctctgtcttccccatatgctgaggtcagtgtccgggtccaactcgtcgaggggcatcgccgccgtggtcggcgtcggccccaggctcggctccgccgtggctcgcaagttcgcctccgagggctacaccgtcgccatcctctcccgcgacctcgtgaagctgtcgcagctggcggaggagatcgcgcaggaggcgaaggcgcaggtgttcgcgctgcgggtggactgcgccgacgcgcggtccgtgcgcgaggccttcgaaggggtgctctcgctcggccccgtcgaggtgctcgtctacaacgcctgcgagccacccgccgacggcgacggcgacgcctccccgcgcccgactcccttcctcgccatctcccccgacgccttccaccgcgccctcgccgtctccgccgccggcgccttctactgcgcccaccaagttataccggggatggtcgagcggggcaggggcaccgtcatcttcaccggctcgtcggcgtcggtcaccggctacgccggctactccgatctaagctgcggcaagttcgcgctgagagggctgtcccagtcgctggccaaggagttccagccggccggcgtccacattgctcacatgatcatcgacggcgtcatcggcgaacccaggtcagggagggggaggtgcggcggcgagacggcgtcgtcggcgggggcggacccggacgcggtggcgcagagctactggcacgtccacgcgcaggacaggagcgcgtggacgcaggagatggacatccggtcgccgtcgctcatgtagtcggccggccgatcgggggggtggagaggcatgcactgtagctccggcggcggaatctctactgttgccaaggaaggaaagaagaaaaaaagaaaattcattgatcgtgtcatcgtgtggtgtggtgtgcatgtgcgcggctgcggaccgggcatcgtgtccccgttccgcgtcgcatgtcttctttttttcgcgctgcgtgcgcgcgccgcttggcgcttcgcgcgcctaatttttagtgtgtggttgatgcatcatccgtccgccgtccatcggcagcatccagcagccggtgcacggggaagttgccgacgacggcgacctgcaaaaattcatgtgatttttctgtacggttttctataaatgtatagtagtattatgtct

SEQ ID NO: 21680 - DNA, 1675 bp, Oryza sativa
  ref <308>: DATABASE ACCESSION NUMBER: AK071938
  ref <309>: DATABASE ENTRY DATE: 2001-12-06
ttgtgataagtttattgatgaaagaggttgtattgtcccccttgatgataaaacttccagtaagctcaatgatataatcaaagccttttctagtgaagcgctcagaacactttgccttgcttatagggaaatggaagaagggttttctactcaagagcaaataccgttacaaggatacacttgcatcggcattgttggtattaaagatcctgttcgtccaggtgtcaggcagtctgtggcaacttgccggtcagctggcatttcagtgagaatgattacaggagacaatattgatacagcaaaagcaattgctcgggaatgtggcatacttaccaaggatggcattgcaattgagggtgctgagtttagagagaaaagtgctgaagaactccatgatttgattccaaaaatgcaggtactagcccgttcttccccacttgataagcatacacttgtgaagcacttgcgcaccgcattcaatgaagttgttgctgtgactggtgatggcactaatgatgcacctgcgctgcgtgaggcagatattggacttgccatgggcattgcagggactgaggtggcaaaagagagtgctgatgttgtaattctggatgacaacttctccacgattgttactgttgccaaatggggacgctctgtttatgtgaacatccaaaaatttgtgcagttccagcttactgttaatgttgttgcattactagttaacttcacttctgcatgtttcacaggggatgctccacttacagctgtacaacttctttgggtcaacatgatcatggataccctaggggcgcttgcactagccaccgaaccacctaacaataacttgatgaagaaagcaccggtaggaaggaaagggaagttcatcacaaatgtgatgtggaggaacattgtggggcagtcgttataccaattcgctgtcatgtggtatctacaaactcaagggaaacacttgtttgggctggaaggctaccatgctgatattgtactaaatacaatcatattcaacacttttgtcttctgccaggtgttcaatgaaataagctcaagagagatggaggacatcaacgttctgaggggcatggcagggaactccattttccttggtgtcctcaccggcaccatcttcttccagttcatcctagtccagttcctgggcgatttcgctaacaccacacctctgacccagcaacagtggctcatcagcatactcttcggcttccttgggatgcccattgctgctgccatcaagttgattgctgtagaacctcatgaaaaagccgatacacgtagaacgccgtaaaccacacacaccaggataagacattcaatcaattttgtgcaccaataatccaagtatacctccactctatgatcaaagattggcagcattttgcgaagaaaatttgatgcaatggagttcctgttgggtttggccaatctaaccagccacgaaactgatgagataagagagccaattagtggttctgggaatatgtagaagtgattttttttgaggtattattttgtacacgctgatctagtattatgaaaatgtaaagccaactggcatagttgcgtagagtgtaaacagatgagattgtacataaatacaagactgacatttgatgatagcaacaacgatcatattcttaag

SEQ ID NO: 21681 - DNA, 3745 bp, Oryza sativa
  ref <308>: DATABASE ACCESSION NUMBER: AK071939
  ref <309>: DATABASE ENTRY DATE: 2001-12-06
gggttactcctcttcctcgctcgctcgctcgctgccttagccttgacctccatcgatattgcaaccataaagaggaggaggaagaggaggcgagaaagagagagagatcgtcttcttctccagccagccagccagccgtgattgatctcaagggggaaggcagctgcagggatcaagaagaaggagaagaagtgatcaaggaaggaaggccacggaacaaccgacagggcaggagggcgctggccggatcgccggagaaggaaccactagctagctagctagctactcctattgaagatatcgccggccggacatatgcgcaggatgttcggggactgccaggtcctgtcgtccatggccgccatggccggggccgcctcctccgccgacgcgctcttcgccctcgccgctcatccccaaccccgctctcgccggcttcatgtcctcctccgccgccatgcccttccaccacttctccaacgccgccgccaccttaatacctaaggaggaggggttgatgggcggcctccatgtggccaaggacgaggggatggacctcgagatggacatggagctcagtggcggctccggcagcgcccacctcgacggcctcctcagcttcgccgacgtcgacgacgaccacaagccgcagcacagcggccatgaccagccgcccgacgccgcccagcccagcggcgccgcggggggcaacgccaagaagaagcgctaccaccgccacacggcgcaccagatccagcagatggaggcgctgttcaaggagtgcccgcatccggacgacaagcagcggctgaagctgagccaggaactgggcctcaaacctcgccaggtcaagttctggttccagaatcgccggacccagatgaaggcgcagcaggacagggcggacaacgtgattctgcgcgcggagaacgagaacctcaagagcgacaacttccgcctccaggccgccatccgcaacgtcgtctgccccaactgcggccacgccgccgtcctcgccgacatgtcctacgaggagcagcagctccgcatcgagaacgccaggctcaaagacgagcttgaccgcttggcctgcatcgccacccgctacggcggcggcggcggacggcagccggtgctgtcgacgtcggccctgagctgcatctcggcgccgccgccggtcctcatgccaccgctcgacctcgacatgaacgtctactcgcggcacttcgccgagcaggcgccggtcatgggctgcggcgacctcatcccgccacccgtcgtgccgcagcacgatggcgcggcggcgtacatgggcgccatgatggcgcccgtgcaggagcaggacaagcagctggtggtcgacctcgccgccacggcggcggaccagctcgccaggatgtgccgcgccggcgagccgctgtgggtgcggcagcgtggcgcggaggtgatggccgtggaggagcacgcgcggatgttcagctggccggtggacggcgcgaagcagggagacggcggcgcggtggcgagggcggaggggacgcgtgacaacgcggtggtcatcatgaacagcatcaacttggtggacgccttcctcgatgcgaacaaatggatggagctgttcccgtcgattgtttgcaaggcaagaacaatccagatcataaaccacggagctgcgtctggtcacctcggcagtggaactctcctcttgatgcaagcagaggtgcagttcttgtcgcctctggtggcggcgcgcgaggtggtgttcttccgttactgcgtgcacaacgccgacgaggggagctgggcgatcgtggatttcccggcggaagggtttgaggaggggctcctccaagcctcggtggtcaggtgccggcggcggccgtccggctgcatcatccaggacatgcccaatggatactccagggtggtgtgggtggagcacatggagatggtcggggaggagaagccgctgcagccggtgttcagggactacgtcgccagccggcgccgccttcggggccacgcgctggctctccatcctccagcgccagtgcgagcgcctcgccagtgagctcgcccgtaacatcgccgacctcggagtgatccgcacccctgaggcaagaacaaatatgatgaagctgtcgcagcgggatgatcaccactttctgtgctaacatcagtgcttctggaacccaatcttggacggccctctcggattcaacccaggacactatcagggttacaactcggaagaacactgagcccggacagcccagcggtgtcatcctcaccgctgtctccacaagctggcttccttttacccatcagcaggtgtttgagcttcttgcagatgaacaacagcgctgccagcttgagattttgtcaaacggcggctcccttcatgaggtggcacatattgcaaatggatcacatccaaggaattgcatctctcttcttcgcattaacgctgcaagcaactcgtcacagaatgtggagctcctgctgcaggagagcagcacccaccctgatggtgggagcctggtggtgttcgcgacggtggacgtggacgcaattcaggtgacgatgagcggcgaggatccttcctacatccctctcctccccctgggcttcgccatcttccctgccaccagcccatcacctgctgctgcacccaccatcagctcaagcaccaccaccaccactggcaatggcaatggcgaaaccagtagcactcctccaagaaacagcagcagcaacaacaacaatgcagatgagctgctgcctcccaatggctgcctcctcaccgtcggcatgcaggtgctggccagcgccgtaccttctgccaagctcaacctctcgagtgtcactgcgatcaacagccatgtctgcaacgccattcaccagatcacagctgcactcaaaagttcagcaggtggtgctgggggtgagccggcgtccgatcagtagcaaaggagacctggaggagaggggatcggagcaacatgggatcagacaccaaaatgcctcccaatttatttcgctaacatcgcagtttgtttttctgttagctctcggtctggctggttcatcaggtgcaagggagggtttgacaagaagccaacactaacagctactcaaatctctcctctcttcccgccatatttctgcctctcaaaatgacgaaaatacccccaaccagccaacaagcaaagccatggggggcattttgatcattttgggaagctacttctgctgagaaagaaagaaagaaagaaagggtcttgtcaagctctcacttgcaccaaccagctgattcatgaatttgctgacatcagctctgcaggcattttggtcgtgcatcggtttcttgctactccatccatccctctttaggttcttcctccctttcctcatcaaaagtgagaactgcatgtgaagaaggttagctccttgttttgaatttttgtaataataagatggaagaagaagacttggtagcttgagtgtgtggtttgtgttaagatcgagctagactttgtgtaaggttgaagaagaagaagacattaagcagattgttattaggagatgagataagagaaaggaggagaggagaagtcaagagcgaaccagttgtgacccttcttcacactagaagggggtcttggttcgggaattgacttgttacctctctgcactctttgtctgtaacctttgccctatcttattattactactagtattgttc

SEQ ID NO: 21682 - DNA, 1472 bp, Oryza sativa
  ref <308>: DATABASE ACCESSION NUMBER: AK071940
  ref <309>: DATABASE ENTRY DATE: 2001-12-06
gaaagaaaccgccgccgccgccgccgccgccgccatgactcccgccgatgccttcctcatcctcgacttcctcgccggcaaccgcctcatcccccactccgtcttcaccaccctcctcgcctccctcccatccgtctcgccccacacctctcctcgcctccgcgcaggcctcgctctccgcgctctcgactccgccctctcgatctcggagtcgtcggagatggacgcccccaccctcctgcgcaaggcgcgggctgtcctcgcggatccagaccttgcccccttctttccgcagcacctcgctgcacccgcctctgccgacgacgccccggccgccgccgtggctcacctcaaccgccttctcgacgttgagtgggcgagcctccctccttcctcgctcgagatcgcggccgaacggatcgttggctctcaagccctccattcgtgggcaaatgccgaccacgcccaacgttcaaagcttcgtctactcgtaggagagtccacagcgcttgagattttagacacgcttcaacggccggatgcatccacaaatcatccaggaacgctgcctcaagttgataatgcaccggaaacaaacggtgcttctcattgtgctcaacaaaacgatggggccaagagcggtcttgttaaacaaaatgctgaagccgatcgtcctcaacaagatagcactcgacatcaacaagactcggtgcaaggagcatccaattcccaacttaaagaaagttcagtaacaatggaatctattagaggcacgggtcctgatatcacaggctttatggaagaagctacacctcgtgttgctggacagtttgcccctgacaacatcaagaaccatcaagtcacaggttctaagcgcagtttaatggagaggaatccggctgccagcacttatgagtgggatggcagcgattccgaagggaaaaggcctgcagcaaagcgccggttacccatttttgaaaggacagcaaaaccttctcctacagctgcacataagacgagaaaaaagtggagcgaggaacaagaaaaaaccatgctggaaggggtggagaagtatggaaaaggcaactggaaagatatcaaaatggcataccctgatgtatttgaagatagatcgacagtagatttgaaggataaattcagaaatttggaaaggcatctatgcgcttgaggcgtgcctactttaggaggaattgttatggtatatatatagcgacttgaagttagctatgccaaagcagacgcattctgtagtcctggatggatgatggtagctatgtttatagtgccttttttggttgtgattttgtgaagtgtagccagctagttttatttggtcggctatccttgttttgttttgtacaggatagaggagcgatatcggtggggaacttcctgctctgaacgcttattttctatcttctatcttcatggctatccttgttttgttttgt

SEQ ID NO: 21683 - DNA, 1401 bp, Oryza sativa
  ref <308>: DATABASE ACCESSION NUMBER: AK071941
  ref <309>: DATABASE ENTRY DATE: 2001-12-06
ttttggtggcgtggtggcggcgatggaagatggaaggccgacggtgtggagatgaaaaggggaggtgctcggcgatggcagtggcacgggggtcggcagcgatggggatccgaaggcggagtggctgtggcagtggaggaacgacgacggccgtgatggtggtggcgagctggctcgggaaggtgaaggtgagggatgcgatggtgaaccgtaacgaggacgacaaggatgaatggatgatggttttgatgctgctagcttccaggggaaggaagttaggcagtacagcgacggcaacagtggcagcgacaacgacacatggtgaggatcgtaccaggtaggtcttctcgctggtttcccattttcggtgtggactcagcttgtgggttccttttcattgtttcgtcggttgtgctgagggctccgatggacggggagcacgggtgcaggggaggccgttggggcggggtcctcgcctcctcggctttgaaagccgtcgctttcttgtgcgtgaatcctgggcggcggggtggaagaggatgaggacggcggacggcgtcggtgtgggccggtggtcgtcatcggcgccgaggagtggagcacaaggcaggtttggcttcctgaacttgggctcagttcgtttgtccatgttccctaccccttctctccgttctccgcgcgcacgcttttcaaactgttaaacaaagtgtttttttttaaaaagtttatatacgaaagttgcttaaaaaatcatattgattcattttttttaaaaaaaatatctaaaacttaattaatcacacgctaaacactgcttcgttttgcgtgctagggagtgagggttctctttgtggggtcgtctctgtgatggcatgggtgttggggtggggttttgtccacaggggtttatggtgcatgaaagctgttgtgtagctcctcagggcattagatggccgtccaagttggtacaatacactgctctgtcttgcaggcatttgatcgaacacgtcctgggcatgcagctgagctgagggaggcaaaacagactttaggctgaaacgagagagggagtgggctggcagtaaaagggagtccactgtaataggagcttttgtatcattctgggatttgtagtttaggaaattgaaaggggatttggatggggaaaacaacatgtgcatttggacttatgattcgacagtgtaattgtaatttgactcggctctgtataaatggactgcataatatttattctggccctgtgtctggactagatatggcttgtatggttgtggcttggacaacattctgtaattgggattgtatagatcggacttgtgatgtggttctgtatattcataatttggactctgcagggtactgtatgtttggcatggattt

SEQ ID NO: 21684 - DNA, 1514 bp, Oryza sativa
  ref <308>: DATABASE ACCESSION NUMBER: AK071942
  ref <309>: DATABASE ENTRY DATE: 2001-12-06
cactgcaagttactagcatagtggtttgtaaaacgctctcgcatcgccctcccctaggggcagcacgggaggcatcgaacccaggccgccccctccccccatcttcctcctccgcctcgccgccgcctgagcggccgccggcaaagccgcgcggccacaaggacggcggcggcggggctcctcgttcctcgtcgagctcgcctcgtttcgggcggcaaggggagcagcccaggacggcggcgacggtgaccgctaaatccgcgccgcctcggccggatctggcggtgtggcagctggcggctggcggcggagacggagacggagacggcggcggggatggcgacggcgacggtagaggagcggctgggtcgacggcggcggggatggcagaggctgggtcgacgccggcggggatggcgacggtggcgacgtcggcagaggcgccggatccaggcgcactggaggcgggtccggccccccagcggcggatctggccacccggctgccggatcgggcgagctcgtggcgggggcagcagagctcgcgacgacgtggtggcggtagcaaggcgagctcggggcaggagcgcccgtcgcggcggcggcggcggcgtcagccgccggcaggagctcctggaggtggtgctgtcggcggcggtggccgccgacggcggacgcagtatcggcaacgtccacggcagctctcggccggatttgggtgtggccgagtggtggtcggctggcgacgtctgttggcgacagcagcggcaacggcggccgtgactgtggaggcggtggtgacgtcggcagcggggaagtagtcgggtgcgaggtgaggatggcgacggcgaggtggctgagcgttcggcagcagcggctgcggtggtggtgaccgtgtctgcggtcatcagaggcatggtggcctcagacggcttgccgagggcgtgggagatggctgcatctggctagcgcgacatcatttggtggagaggtcaaagaccggcttggcgcagagaagcgcagtcgatggcagcggaggtcggctcggcgcgagaggcacgggcagcggagatggaggccggcttggcgcgagaggcgcgtccggtggaggaggccggcttggcgcagagaagcacggccggcggtggaggaggcgacctaggtgtgaggaggagctgctggtgtgtatggagtggtcttcggcgcacgaaggctggccggcggggggtgccggtgcaggggtcctatatgtcggcagagctagtatggtggtggagcatcggtgcgctagccgtgggtccctttgttagtctagtggtggtcgatcccgcttagcggcggccggtccggtgctagccttctgctgggcttgtgtgttggcgatgtcggtgtgtgggtggtggtataattttttctttttcctggctacaaccctccagtgtcataatcttgtaatttttttctgttttatcaatagaactcgttaaaaaaaaagttacaagcatgattcttcag

SEQ ID NO: 21685 - DNA, 1222 bp, Oryza sativa
  ref <308>: DATABASE ACCESSION NUMBER: AK071943
  ref <309>: DATABASE ENTRY DATE: 2001-12-06
ttggggatatcgaagtgaagatcaatttctgcactgtctcccactgcaccatgttcatggcctgttcaatgctctatttgcacccctctattctggatcagtggttgagttcatgccgaaatttagtgtgaggggaatatggcagaggtggcgtgagtcatatcccaacaatggcagtaaaaatgatgaagcaattacagtatttactggagttccaacaatgtacacacggctattgcaagggtatgatggtatggatcctgaacaacagtctgcatcttcctttgctgcaaagcaattgaggctaatgatgtgtggatcatcggcccttccttccccacttatgaaacggtgggaggaagtgacaggtcaccgtcttttggaacgatacggcatgactgagtttgtcatggcactgtctaacccattgcatggtgcacgtaaagaaggtacagttggcaaaccgcttccgtgtgttgaggccaagattattatggaggatggggctgaaactacatctgaagttggcgagctttgtattagaagtccatccctttttaaggaatattggagaaaaccagaggttactgcagaatcatttattgatggtgggttcttcaagactggtgatacagtaactgtagacgataaaggatatttcataattttagggcgcacaaatgctgacatcatgaaagttggtggttataagctgtctgcattagaaattgagtcagtgctgttacagcatgaaattgtcctggaatgtgctgttctcggcttacctgacgaagcttatggagagattatctgtgcaataattgtgcctaaggaggactcaaagaaaagagctgaactggactcgaaaccagcactgaccttggaagcactgacaagttggtcaaaagataagcttgctccatacaagattcctacgaggttgtacttatgggattcgcttcctcggaatgccatgggaaaggtcaacaagaaggagctgaagaaattattaggagcttagctgtggttccaggaaggcagacattgtaatggttagctaataaatatttttcgcattgataattttgctgaataaccaaaaccaaaaggaagtcacttctagcaaaacactagagatatattcatagatttggttttttattttccaaataagagattcatagatatagtgttttctaataaatggccaactgagttgccg

SEQ ID NO: 21686 - DNA, 1533 bp, Oryza sativa
  ref <308>: DATABASE ACCESSION NUMBER: AK071944
  ref <309>: DATABASE ENTRY DATE: 2001-12-06
tgggcgtcggatgccgccgccgcgaccgcgaccgccatggcgtaccgccggaagccgcagcctccgcagacgccgccgtccttggaccaccaccaccaccaccacaccccctccgtgggcccctcgtccccgccgcaggactccctcgccgcgcaggccatgcgcgcctccgccgcgcaccgcgacgcctcctccctctcctcggcctactcctcctcctccgcctccgcggccgccgccgccgccgcggctcgccggggccaccacgagccctccgtctccacgccttcccccggttcttcgggttatgaatacacatccatgaagaacttgaatgaggctaagtacggattttggggggcccttgctcggaaagccaagtcttttctggacgaggatggttcaccagggcagtatgattccccggcgaggcagcagccgtcaagagatgcgccgccggttggtgtccagtatacacgctcacaacaaccaccgtctgaaacatggaaatccgagacacctccatctcataagaggtccgaggccatagcttcctccctcaactatattggtggcacaataaaaagtgcacttgaagaaggccggacgattgtagaaaataaaacagccgacattattcatgaaacacgcaaattgaacataagaagaaaaggagctggctcaactacacaaggagaagctccacaaagatttactcaaaggaatcttccacaaaatccacttgactacgaaactcaattgaaggcatctcgcgacgttgcaaatgccatggcagcaaaagcaaagctgctattacgtgagctgaagactgtgaaggccgatttagcttttgcaaaggaacgttgcgctcagcttgaagatgaaaataagattttgcgggaaagtcacgataagggtgataaccctgaagatgatgatctgatccgcctccaactagagacactattagctgagaaggcacggctcgcacatgagaattcggtgtacgctcgagagaatagattcctacgagaaattgttgagtaccaccaacttactatgcaggatgttatatatgtggatgaaggcattgaagaggtcactgaggtctaccctacacaagtattaccacctgcaccttctcgggctggttcaggccttggtcgctctgtaaccccagctactcccaagactgccagctcatcaccttcatcaacatccattgttgtaccagaaacttgtccggtcgttccagcctccccaaagtcgctttctcggacttcatctaagcaatagatcaagcccggcaccaccaaccatgctgaagattaaaaggtggttagtggtgcgatacaatccggatgccattgcaaatgtaaaaccaaagctgcgccgttgctgtgccctgtatgttagtctctgatgagttgtgtcctggaaatgtgcggacaaatgatgttcatgcctgagatgtttgtatgatccggtgtaacttacacagtatttataattttactgcatcatcgatttggt

SEQ ID NO: 21687 - DNA, 2144 bp, Oryza sativa
  ref <308>: DATABASE ACCESSION NUMBER: AK071945
  ref <309>: DATABASE ENTRY DATE: 2001-12-06
ggaagtccctttggtaaactctgtggaaagagtaatggtttactgtggccttcatgataatccaaaagtatctatgaagaaagatgggacattctgtggcaaaccatggagaaatgtcttggaacatcttaaaatccaggatacagatctgtggagctcaaccaatgaagacaactgcttatggaatgcaaagctttttccagtcatgtctctacctgaaacgctgaaagtaggtatgtggcttatgggatcgacatgtgacctggatggcaaagtcgcttccctgtggaaagaatcacggaggatcagcttagaagagctgcatcgttcgattgactaccatcagctctgtgtgaattcaagcaagcatcaagcagatctagcaaccaacattgctaaagcttgcatgacctatggcttgcttgggcgcaacctgtttcaactatgtgaggaaatgctacaaaaggaaaattcatgcgtagaagtctgtaatgagttactttcgctttgtcccagtcatggggatcagtattctggtgttcttccgcagagcagaagataccaggtcaaaatggatctgcttacagcttctggagatctttccactgcagctattgttgaagataaagtgtgggcttccatagcaagtgaaactgcatcagctataaaatatggatctaaagagccatcaagcgattccaagtgttcaagtaatggtaacctgcatcctaagaaggctattgtggaattaccggtccgtgtcgactttgtcgggggttggagtgatacacctccatggagtttggagcgtccaggttgtgttttgaatatggcaatacggttggaagggaaccttccagttggtgctatgatagagacaacaatggaccaccttggagttctcattgaagatgatgctggcagaaatgtttgtattgatgacctgtcttctattacttcaccattcaaagaaaatgattcattccgtttagtcaagtctgctcttattgtgactggtgtcctaaaccatgaaagattgtcaaaattagggttgaacattaggacatgggcaaatgttcctcgtggaagtggtctgggaacttctagcatattagcagctgcggtagttaaggggctattccaacttatagaaggtgatgaaagtgatgcaactgttgctagagctgtgctggtagtagagcaagtaatgggcacaggcggtggatggcaagatcaaattggtggcctatatcctggaatcaagtgcactcagagttttccaggacagccattgcgtttgcatgttgtttcattgctggcatctccgcagttgattcaagaattacaacaacgtctcctggttgtgttcactggtcaagtaagtatgaattttctgctgtaagcatatataacatagtagataaactgaaattagggctagaagtttcaatttacaaacagtagcctgttcaagttccaccatgattctaagatttgtacgtccagacaagattccttccaagtgtgcacgcccatccattttccacattgattttgcttcaaaagagtataattttctccccaaatgaatgtatactctgcacaggtaaggcttgcccaccgggtcctgcagaaagttgtcactcgatatctccgccgtgatagcctgttgatatctagcatcaagaggcttgctgagttggcgaaaattggaagggaagccctgatgaatggtgaaatagacgagcttggtggcataatgtcggaggcctggaggctgcatcaggagctagatcctttttgcagcaacaagcttgtggacgaattgtttgcatttgctgacccttactgctgcggctacaagcttgttggagctggtgggggcggctttgcgttgatgcttggaaagaatcttaactctgccaaagaactcagacaaacactcgagaattctgccaccttcgatgtaaaggtgtacaactggaacgttgctatgacaccatgaacaagtatagaactcgcggagcatatgttttcttacttttccttctggtaaacagaagttgcatatactgctggagcctggcgtcattgtacatttgtaccgtccggttcatttattcagatatgaagtgcattatttc

SEQ ID NO: 21688 - DNA, 2105 bp, Oryza sativa
  ref <308>: DATABASE ACCESSION NUMBER: AK071946
  ref <309>: DATABASE ENTRY DATE: 2001-12-06
gaggcagcagagtcgccttcccctcctccggtcgatgcgacggagctgaatcggccaggatcccgaggaggaggaggagcggacggcccgcatgagcctcgctggctccgccctggaggcggccctgcaggcggtggggcgcggcctcgacgccgccggtgaccaccggctgctctactgcaagggcactgggaggctcctgatgctggacgagtcccgcgcgcgggacctgaccatcaacggcggcgtcctccgcggggtgccccccgacgtcgtggtggaggagggccacggcatcctcgagcgcatccgccaggtcccgggacccccaaccgatgagcccgtcgtctgcagcttcccgaagatggctgagtgcttcaacaggaaggcgggcttgctggaaacaacagtaccgctgggttccttcaactctctcttcagctttactggttcttggaagaatgatgaagcggcgacgaaatccctcgcgattgatggctactccgtgcctctgtttaaagttaagataacgagtggtgaattgtttctgcatgagagcgttaagcgcgcaattccacatagttgggatccttcagcattggctagctttatcgagaactatggtacccatattattacttctgttacggttggtggtaaggatgaagtatacataaagcagcattcctcatcccaattatcagaattggagttcagaaattacgtcaaagaaattggaagcgagagattctcagatggggatagcaagttaaatgcaactcccataaattacagtgagaaggatatgacagtaatcttcagaaggaggggtggttgtgatcttgttcagaattttaatgattggataaaaactgttcagtcagcaccagatgtcataggcatgacatttctccctatcgtctcacttgtcggtgatatgcctggaaagaagcacctcgctcgtgcaattgaactttatttgaaatacaagccccaaattgaagagttgcagtatttcttggatttccaagttcaactagtttgggctccagtaccaccaggtattgctggtcaacatagaaaggagcctgtatgtccatcacttcagtttagtttgatgggcccaaagctctttgttagcactgaacagatatctgttgggcgtagaccagtcactggtctgaagctatgcctggaaggagccaaacagaatcgtctggctattcatttgcagcaccttggctcattgccaaaaatatttgtacctcattgggattcccatatcacaattggaccgccaaagtggcaaggccctgaagagcaggatagccgctggtttgaaccaatcaagtggaggaattttgctcatgtcagcactgcgcccatagagtacactgaaacaagtattacagacctatctggtgtttatattgtaacaggagcacaactgggcgtgtgggattttggtgcgaagagtgtactccatcttaaactcttattctccagagttcctggatgcacaattaggagatcagtgtgggaccatagtccatcaagttctttggtccataggacagatgaagcttcatcatcctctagtgataatgctaaacttgtgaagattgttgacatgaccgagacattgaagggcccacaagatgcacctggccattggctggtaacaggagcaaagttgggggtcgagaagggcaagattgttgttcgtgcaaaatactcgttattaaactattgaccaaatgttgaaagcattcattcattcactctgctatgaagcatcctgtttaaagatagcatatgttcttttgttcatcatgtatggtttttaatgtaacatcatatggattcgtgcttcttgttgattctgtgagggattagcgcctagatgtttgtgtccgattacaaaatatttgacctggtctcagtgatctgttaaatcatctctgtgtggcagtagaagatgtatattagtataaatttttgaattggtattttgttatgcgaagtttaacccagtggagttgaactgggcaatgctttttttccccttgtgatatcatgatatgcaatcaacattttatggtgct

SEQ ID NO: 21689 - DNA, 2739 bp, Oryza sativa
  ref <308>: DATABASE ACCESSION NUMBER: AK071947
  ref <309>: DATABASE ENTRY DATE: 2001-12-06
gagttgaaaaaggaagaacacatccgaactccaaaccccaggaatcgcctactctttggcgccctcgccgccaaaccaaacgccgggaagcgccccgccatctccgccgcccccgccgccgccgtggtgtgatgcggcggcggccgtttgatgcgccgacctcccacctcgccgcccaagcagcacctcctccgcatccgccgctgcctcccatccgtttggcgaaatgccgcgcccgcgcaggaatcgccgccgccctcgccgccgcacccggcctcctccctctcggccatcctctactcctgcaccgcgcggcgcgcccgtcgccccggcgagctggcccacgcgcgcgccgccacgctcggcctggccgcccacccgtccgtcctccccaggctcgcctccttctacctagccctcgccgacctcccggccgcgcgggccgccgtcgagcaggcggcggggaaggcgcgggcgttcccctggaacctgcttatatggggctacgccggccgtgggctgtgggaggacgtgatcttgtcgtacgagaagatggtggggtggggcgtcgccgccgacaggttcacgtacccgtcggttctgcgtgcctgcggcgagctccgggaggtcaccattggccggaacattgagcagcgcattcggaggtgtagatatggtctggacatgtatgtctggaatgctttggtggggatgtatgccaagtgtggggagctggaggatgcccggagggtgtttgatggaatggctgtgagagatgttgtcagctggaatacgatggtgtccgcgtatgcgtcgacggggaagtcgaataaggcatttgagcttttacagcaggttcctggtgcaaacgttgtcacgtggaatgcggttgcagcagggaatttgaaggcggggaactacgatgaagtgattaggttggtgtctcaggtgagaggatatcatgggacaggggtggattctgtgaccatcgtgattgggctcaaggcgtgtggtaggaccgggtatttgagtgttggtagggagttgcacggggtggctgttcgtctatgctttgatagccttgagtgcgtggtgaattcgttgataactatgtactcaagatgtgggatgatgagctctgcctgccttctgtttagagcatgctcagttcggagcatcacaacctggaactcactgcttgcaggatttgcattcatggaacagatcgaggaagcttctttgattttcagagagatgatcggttttggtgtctgtccaaatggtgttactgtcttaactatgctttcccttggtgcacgggttggacacctctgtcatggaagggagctgcactgctacatccttaagcatgagctggatagctctaaactaatggaaaattcacttgtcgacatgtactccaaatgtagacaaatggtagttgcacagagagtgtttgaactgatgcaatttcgagacaagcatgcctacacatcactggttttgggttatggattgcaaagagagggacatgtatcactgaagctctttgatgagatgattgtgaacagtatagagccggaccatgtaactttcgttgcagttctatcagcatgtagccactctgggctagtaactcaggggcagctactatttgccaagatggtttctatatttggtattgcaccaagagtggagcatttttcttgcatggttgatttgtactgccgtgaaggtttgctcaagatggctgaggtgataattgacaagatgccatttcaaccaactgctgcaatgttagcaactcttattgaggcttgccgaatccatggtaatacggaaatcggggatcgggctgcaaagaagttgctggctatgaggacaaacaaccctggtcattacagattgattgcaaacatgtatatagcagcaaaatgctggccagaactagctaaagtgagatcactaatgagcagccctggagctaaatatgattcctagtcattctttgctggagtcagaatatgacgtgtgtccagtcgagcaagataatttcctgaatcatgtcacatatggtttgtcatctgaccacctgactgatactgattcctctagtagcgaggaagtgaagtgcagtgaagcttttggtggatagtaatagagcaagaatggaataggttatttttggactgctttttatgtgaaggccatggaactttccgaaaagtttcaagaggaggatgtgaaagaattcaaagaacaagataaccgaggacattatgtttagggtctagccaagcagtagaggcatttgaagagaactgaggtgaaggatgttgcgtgcgtcgcccaagcagcatctccatctagctgtgctccaacaactaaggcgtggagtttgtccattctgcgccacctggcatcgttgcttcgctcttcatccacggttggtctgctccttcttcccgctcaatggctggactggactcctttccggttaagaacgccacggcgatgaacatgccatcagagagctcagttacctgatgatgctatgctccggccgcgctggagaagctcctctccgacgaggagttcatggacgcggtgaccacggcgtcagctgcaggctaattacatccactgcgagctccaatcatgtacttgtattattatgtcatcactgacacagtgtcgcttaactaaatgttcaacggatgaatgcgacagaattggggc

SEQ ID NO: 21690 - DNA, 1334 bp, Oryza sativa
  ref <308>: DATABASE ACCESSION NUMBER: AK071948
  ref <309>: DATABASE ENTRY DATE: 2001-12-06
acacacaagaaatctcacccaaaaaaaaaaaaccaaccaatcaaaaaccaaaccatggcgcgccaccgccaccgcctcgccgccgccgcggcgctcctcctcctcctcctctcctccgccgccgcgctgtcgtcatcggcggcggagggggaggaggacccgctcatcgagcaggtggtcggcggcggggaggaggaggacgcgcagctggacgcggaggcgcacttcgcgagcttcgagcggcggttcgggcggacgtaccgggacgccggcgagcgcgcgtaccggatgtccgtgttcgccgccaacctccgccgcgcgcggcggcaccagcggctggaccccaccgcgacgcacggcgtcaccaagttctccgacctcaccccgggcgagttccgcgaccgcttcctcggcctccgccccccatcctccccaccgacggcctccccgacgacttcgactggcgcgagcacggcgccgtcggccccgtcaaggaccagggttcgtgcggatcgtgctggtcgttcagcacgtcgggggcgctggagggggcgcacttcctcgccacggggaagctggaggtgctcagcgagcagcagatggtcgactgcgaccacgagtgtgatgcatcagaatcgcgcgcatgcgactcaggatgcaacggtggcttgatgaccacagccttcagctacctcatgaaatccggtggcctacagagcgagaaagattacccgtacgctggacgagaaaacacctgcaagttcgacaagtccaaaatcgttgcccaagtaaagaacttcagtgtgatctccgtcaacgaagatcaaattgctgccaacctcgtcaaacatggccctcttgcaattgcaatcaatgcggcctacatgcagacatacatcggcggcgtgtcgtgccccttcatctgtgggaggcaccttgaccatggtgtcctccttgttggctacggatcggcaggatacgcaccgatccgcttcaaggagaagccgtactggatcatcaagaactcgcggggcgagaactggggggagaaggggtactacaagatctgcaggggacctcatgacaagaacaagtgcggtgttgattccatggtctcctcagtgactgccatccatacctccaaaaaggaggagtaggataggattagtctcctctttgtctttgcataccacacactttttaatttgctcttttgtggttgaaactgttagtggttaggaccattctgtggtgttgctcgattgctatttatgatcagcaaaaactgtgaaaacttcctttacttgatgtaatagtacatatttgttcggacc

SEQ ID NO: 21691 - DNA, 1743 bp, Oryza sativa
  ref <308>: DATABASE ACCESSION NUMBER: AK071949
  ref <309>: DATABASE ENTRY DATE: 2001-12-06
gactccccccgcatttcgtcgaacacctaccgcgatgccgccgacgccgccgcctctcctcctcccggcgccacgctgcccacgctctaccgccgtgctggcggcgtcccgcttcgccgcgtccgcatcctcctcttccggaggaggaggaggaggtagcagcagcggcgcgcgcacggcgaggccgcccccggccccgcggcggcggcgcggcaagcccgggttctcgcggcagtccgccatcaagaagagcttccaccaggagcaggtggtgttctccacgcctgttccccccgacccatccgtcgccgtcgtaggcggcggcgcatccggcctcgcctgcgccgcctccctcgccgcccgcggcgtccgcgccgtcgtcttcgacacggggatgcacgggctaggagggaggatggcgacgagagctatcgccgccgccggcgaccagcagcagcagcagcagctggtgttcgaccacgcggcgcagttcttcaccgcgagcgacgagaggttcaagagggtggtcgacgagtggatggacaagggcttggtccgcgagtggggaggcttgatcggtgagctcgacgccggcggccatttcaggcctatgccttcctcctcgccgccgcggtacatcggcgtcgacgggatgcggccgcttgcagatgcgattctgcctgagagtgacctaattgaagttgtccggccgtgttggataagcaagcttgagccgttcaatggcctgtggcgcttgtttgagaatgagaagccacatggtcaatatgatgcaattgtgatagcacataatgggaaatgtgccaatcgtctgctctctacatcaggtctaccactgctgacaagacaaatgaagagattacagctaagttctgtctgggcgctcctcgcggcatttcaagatcctctaccaattccacaaactgattcttatggaacatttgaaggagcatttgtgaaagatgttgattctctctcttggatggccaacaatactcagaaacttttccccttgcagactggcagacccgagtgctggacatttttcagcactgctgcttatggaaaaagaaacaaagttccgcaggaaaacattccaaagatcacggcggaaaaggtgaaggaagacatgcttagaggtgtagagcttgctttagggctatcaagaggatctcttcagcaaccattttacacgagagtacaattgtggggtgcagctctaccaatgaacactccaggagtcccatgcatatttgatccccaagggagagcaggcatctgtggtgactggctaacaggttcaagcatagaagcggctgtgttaagcggaatgtctcttgcaaaccatatcgctgactactttgcaagcagtggtgaacaaccagaggagtttgcaattggtttgcatgagaacttgagccaggttgaaggtcatgatattggtcagttcccaggtttagagagtcagaaaccgcatgtagctgaagctcagctaacaccgagcacatgatttttcttttgttagttctgtactggtaatttctgtagcatgtaaatgatgagctgattcttttgttgcacagaacgtgtatgttgtaaaccgcaaaaatgtatatcaaccatgtatatgtagaaatttttgaagctcttcgaatgtttcatctacctggtgtttggaagtacatctggatgtttggaaggctatatatatatataatattcttg

SEQ ID NO: 21692 - DNA, 1619 bp, Oryza sativa
  ref <308>: DATABASE ACCESSION NUMBER: AK071950
  ref <309>: DATABASE ENTRY DATE: 2001-12-06
ggactgcacacgtcgcctcgcctcgtctgcgtctgcgtctgcgtctgcgtctccgtctccaacccaggcggcgtaggggaaggagaaggaaggagagatcgcgcggcgcgctggctgtcgctgtcgccgtcgcgcaggctcgtccacctcgcgaaatcgtgagctcgcgcgccgctccgggcatgcagggcgccacgccgggcgatgccgctggagaggaggtgggaggcggcggggacgtggtgatggtgaggcgggcgagcgtggcggcgtgcctgacctgcccgctctgcggccgcctcctccgcgacgccaccaccatctccgagtgcctccacaccttctgcagaaagtgtatacatgaggagttcgtcgataaggagtcctgctgctgccctacttgcaacattgatctggggtgtgctccgttggagaaactcagagttgatcacagtatgcaattcgtaaggtcaaggatatttcctttcaaacgaaggaaggttgagaacccagaaatcatttgtccagttgcgtcacctgtcaagaggaaagaaagatcactatcttcacttacaatccctgctcctcaggtgtctatacagaaatgtttgacaaagaggagaacgaaagcttcgtgcttacgcaactttcctttgcattctacctcgaggggcagtaaagatacatcaaagaaacttgggggttggagaccattgggttgtcaacttaagcttggcaaagacaaaaaatctctcaaatcaagtgtaaaagatacaaacagaaccaaaagtaagtctggtgatacagatgatggtgctcctgctagtaaagcaaaggctagagaaccctttacaagatatgggcgtgcagctaagaggactggaagaaagaaattgttcatgttgaagaacaaaaagaaaaggttcaaggcaaagcagcccagtaaaaagaggagattccgagcactatggttttatctacttgctgcttttgaccagagaggagtaccaactttaccacaactaccagcaaagtatttgaggatcaaggatgttgatttgcctgcttctattatacagaagtaccttgcacagaaacttaacctctcaagtgaaactgaggtagaagtgttgtgtggtggcaaagtagtgaaccaagggatgacactgcatgatctagtagattgctggcttgagaaaggaccaaagagccgaatgcgctcatcggtaggctccccggccactggattcatggtgacattgttctatagaaggccagatgtggatgtgtcctcatccccagctccaccccaacctgacactgaaagttgccatagctgatgcagagctttgcttcgtttctgaaccatctgtgattggcttcactcattgggctgtcagcccttgattgatctgcgaatcggttccaatttgtgtgaggctcaagccacaccaattcactaatatgtagataaatgctactaattttacaagccatgttgggcttctgatcatctaccttcttcaaccattattttccttttttttctcttcaaccattgtacctaggtatgtgatctgtaatgagatgttaatcgttaagtatcagttgttagagct

SEQ ID NO: 21693 - DNA, 1857 bp, Oryza sativa
  ref <308>: DATABASE ACCESSION NUMBER: AK071951
  ref <309>: DATABASE ENTRY DATE: 2001-12-06
gaacggaaccctcgacggaaccgccgcctccactgtccggggggcggtagagatggcggcgaagaggctcctcctcctctcccgctgccgcctcattgcccaccgcccttcctgccacatccccttcctgccgcccgcgctcgcccgctacctcggctccccatccagccccaaccccaaccccaagaatactagtagcatggggacggcatcgtcgggggaggaggaggaagacgacgagggcaaagctttcccgtggaggagatggaggcctgacgtggcctggctccccaaggccctggagcccgcactgcaactctacaaccaatacaagcctttcctcactagtggcctactgacaatatccccgcaagcacccgcaccttcagcgagatcctaagcgacctccagcggagcaaggtcagcattaaggactggagtctcactgatctcaccatcggcctctacctcatctacctcagccaagcttctgcaaaggatgctcaagccttcaagggtcttcatatctcctgcaacaacaaggttcaacaactaatttatcaccttgagcttgcaagaggttgctataagggcaatgccactggccttgcacgccattctatgcttcgcaagaggaacgttctcaaattcgtcaaggactccagtattctcagacctggctattacattgccattgatccacgcactaaattggtcatccttgggattcgtgggactcacactgtttatgacctagttaccgatttgattgctctaagcgataagaaggtatcacctaaaggtttctcgacacactttggaacatatgaggccgcccgttggtaccttcgccatgagttgggacttatcagaaagtgtttggaaaagcataaggattacaagttgcgcctggtagggcactcccttggaggtgcttcagccgcgttgcttgctataatgctaaggaagaagtcaaaggaagagcttggatttagtcctgacgttatatcagctgttggatatggaaccccgccttgtgtctcaagagaaattgctcaaagttgtgcaagctatgtttcaactgttgtactgcaggatgatatcatccctagattaagtgcagcttcactggcaagattgcgagccgaaatactcaaaacagattgggtaagtgttttggaaaaagaagactggaagcatatagtggacattgtgactaatgctaagcttgtagtttcgtcaattcaagatgtggcgcgcaagcttgctgattatgctaaaattgtcacagtatcaactagttctgatgccatcaaagatcaagatcgccccctgagcaccagtgaagtattgtcaccggatagtaaagaggatgtatttgtgccagaagatctgttccttcctgggactctgtattacctcaagagggacattgaggatataaacggtgtagaagatgagtcgtatacactctggagaggtgatgccggggagaattttcagaggatactgttatctggcaatctgatatccgatcacaaatgtgaaagcatatattacgccctgagggatgtgctcaagactctgccgccccaggaatcaggatgacaagtagaagttccttttcaagctttttgcaggataatctccatctattctgtagtttgtcatctcgatacaatagaggaaagcatatttttgttgctccttagttctcccatgggtaaaggcgaaagtctgccggctttgggggaaatagaagaatagagcttgttgtacagttttgtgtgtgtgtgtgtgtgtgtgtgtgtttgtaagggaaaaaacaagaataatagagaagaaatgcttaacact

SEQ ID NO: 21694 - DNA, 1495 bp, Oryza sativa
  ref <308>: DATABASE ACCESSION NUMBER: AK071952
  ref <309>: DATABASE ENTRY DATE: 2001-12-06
atgtaatgggaaaaatgaactttgctatggacgaggcccaggataccctgatgagtttgaaagtacccgtgttattgggaataggcaatttctaaaggctagagatctctttgattcagcttctgaagaaatacaaggcaaaattgactataggcacacttatttagatttctcaaaacttgaagttaaagtttctacaagtgcaggcggtcagcagaccgtgaaaacatgcccagcagcaatgggctttgcttttgctgctggaaccacagatggccctggagcttttgatttcagacaaggagatgtcaagggaaaccctttctggaagttagtaaggaacttgttaaagacaccagggaaggaccaagttgaatgtcattctccaaaaccaatattgctagacactggtgaaatgaaggaaccatatgattgggcgcctgcgatacttccagttcaaatgattagaattggtcagctggttatcttgtgtgttcctggagaattcacaacaatggctggcaggcgtctacgtgatgctgtgaaaactgttcttacaagtggaaacagtgaatttgataaaaatattcatgttgttcttgcggggctaacaaacagctactctcagtacattacaacttttgaagaataccagatccaaagatatgagggagcatcaacgttgtatggtccccacaccttgagtgcctatatccaagaatttcagaaacttgctatggccatgattgcaaacaaagaggtcccaacaaatttccaacctcctgatatgttggacaagcaaattggactacttcctggtgttgtttttgactcaactcctcttggtgtcaagtttggggatgtcaactcggatgttcctggtaactcaacattcaacaagggtagtactgtgaatgctacattttattcagcatgcccaaggaatgaccttcttacggatggtacctttgcactcgtcgagaagctagatggtaacaataattgggttcctgtctacgatgatgatgattggtcattgcgtttcaagtggtcaaggcccgcaagattgagttcaagaagttttgcaactctagagtggacagttcctgaagacgctgctgctggtgtttacagattgaggcattttggtgcctccaaaccaatgtttggttcggtcaggcattttacaggaacctctcgtgctttcgcggtgcgttagttgatacgccttgagctttttatggcttatgaaggtttacagcaccaacttcatacatggaaaccctgccattatatccatagggcttatctgcttcttatttacttgtatttgagggtaataacactgttcaatcttatggaagtgtgaaactgctgtcccagtgcatgaactaagaatgggaaatatacagaatgtacataggtgctctttttatgtaaacatgcatgcttcttgtgatttcccgtgggattttggccaagagatcttgcatcc

SEQ ID NO: 21695 - DNA, 1785 bp, Oryza sativa
  ref <308>: DATABASE ACCESSION NUMBER: AK071953
  ref <309>: DATABASE ENTRY DATE: 2001-12-06
tggtgcacatgcagcgaagtcccagctacctggcgcgtgcattcattcatgtgtggatagacacctcctgaactccaccgggagagagaccggatcgacctcgcgctttctccgtccaatcgaccatgccgacggcgtcgccagcccacgcggtgttcttcccgtacccggtgcagggccacgtcgcgtcggcgctgcacctggccaagctcctccacgccaggggcggcgtccgcgtcaccttcgtccactccgagcgcaaccgccgccgcgtgatccgctcccacggcgagggcgcgctcgccgccggcgccccggggttctgcttcgccgccgtccccgacggcctgccgtcggatgacgacgacgacggcccgtccgacccccgcgatctgctcttctccatcggggcctgcgtcccgcacttgaagaagatcctcgacgaggccgccgcctcgggggcaccggccacctgcgtcgtctccggcgtcgaccacgtcctgctcgctgccagggagatgggcctcccggccgtcgcgttctggacgacgtccgcttgcgggctcatggcgttcctccaatgcaaggaactcatcgacagaggcatcattccactcaaagacgctgagaagctgagcaatggctacctcgacagcacggtggtcgactgggtgccggggatgccggcggacatgcgcctgcgcgacttcttctccttcgtccgaaccacggacaccgacgaccccgtgctggccttcgtcgtgtccaccatggagtgcctgcgcaccgccacgtccgccgtcatcctcaacacgttcgacgcgctggagggcgaggtcgtcgccgccatgtcgcgcatcctgccgcccatctacacggtcggcccgctccctcagctcaccgccgcatcacacgtcgtcgcttccggcgccgacccgccagacacgccggccctgagcgccgccagcctctgcccggaggacggtgggtgcctcgagtggctcggccgcaagcgcccgtgctccgtcctgtacgtcaacttcggcagcatcgtgtacttgacgagcacacagctcgtggagctagcatgggggctggccgacagcggccacgacttcctgtgggtgatcagagacgaccaagctaaggtcaccggcggcgacggccccaccggcgtgctaccagccgagttcgtggagaagacgaaggggaagggttacttgacgagctggtgcccgcaggaggcggtgctccggcacgacgccatcggcgcgttcctgacgcactgcgggtggaactcggtactcgagggcatctccaatggcgtacccatgctgtgctacccgatggccgccgatcagcagacaaactgccggtacgcttgcacggagtggcgcgtcggtgtggaggtcggcgacgacatcgagagggaagaggtggcgaggatggtgagggaggtgatggaagaggagatcaaaggcaaggaggtgaggcagcgtgccacggaatggaaggaaagggcagccatggctgtggtgcctagtggaacctcatgggtcaacttagataggatggttaatgaggtcttttctcccggtaacaatatgtaaaatgtcgagatttgctgttgtttctaaatgctttccatgtcatataaatttaaataaggacgatatgtgtagggggcacataatatgcgctcagtcgtgcgggggcacgccccacgcggtttcctcctctagtctcttatgtatatatttatatatgtatgtatacgtttttttt

SEQ ID NO: 21696 - DNA, 1623 bp, Oryza sativa
  ref <308>: DATABASE ACCESSION NUMBER: AK071954
  ref <309>: DATABASE ENTRY DATE: 2001-12-06
gtgaagacgaggaggcccttcctgatgttgagtctcagaagctggaaagtaatgctgaattggatggtgaacttgacagtgatagtgagactggcaaggagaaacatgatgatgaatcaagcttggataatatcaatgttaaaaaaattgacaatcccatcccttctaatgcaccttatgttaaggataatgctgattcatctgagcagctttctgaaatccgaactgtggtaaacagcactacttccacttccaagggacaaacaagtgatcgcactgtttcatcacaacttgaggatctgcttgataagaatcttggtcttgggccaactaaggtgttaggcagaagctctttgctcagcagtaattctgcaagcgtggcagatgacattgatgatcttgatacgaagaaaacatcagtaagagataaaccatacatatctaaagcagatagaagaaaactgaagaaaggtcagaatgttggtgattctaccagtgactctccaaatggtgaagctgccaaaaagcctgttaactcacagcaagaaaaaggaaagacaatcgaaaagcctgctaatcctaaagtaagtcgtggacagaagggcaagcttaagaagattaaagagaagtatggagagcaggatgaagaagaaagagaaatccggatggctttacttgcgtcctctggaagggcctcacaaaaggataaaccttcagaagatgtagatggagccactgcagctcaatcaaaaccatcgactggtgaagatgacagatcaaaaatttgttataaatgcaaaaaatctggacatctttctcgtgattgccctgaaagtacatctgaggtggatcctgctgatgtcaatgttggtagagccaaagatggtatggatagaagcagcgcccctgctggtagcagcgttaccatggatgaagatgacatccatgagctcggtgatgaagagaaagagaagttaattgatttggactacctaactggaaatccactgccaagtgatattttgctatatgctgtaccagtttgtgccccttacaacgcattgcaggcatacaaatatcgtgtgaagattaccccgggaactgcaaagaaaggaaaagctgccaaaactgcaatgagtttgttcctgcacactgctgacgccacaaaccgtgagaaggagctaatgaaggcatgcacggaccctgaattggttgctgccattgtagggaatgccaagatcaccgcacctggcctcactcaactgaagcagaagcagaaacagaaggggaaaaaatctgcaaaagaaaactagttcaaagctatcagagaccaccccgttttgtcaagaaaagtatttttctctgcagaaacaatgcaaatgttttggtatgttgtcaggcgcatttggatggaggtgtcacatggattggccctcattcttgtaaagtttaaacatctctttggcattcatagccataggacaggatataatgtaaacagatacggcagaacattggaaccgattgacaagcttcatacgcttacaaagggacgctgagtccccttttggtgtgtcttgtgatgtatgaaagctacaaaaaaaaaatcatagatttcacttt

SEQ ID NO: 21697 - DNA, 1450 bp, Oryza sativa
  ref <308>: DATABASE ACCESSION NUMBER: AK071955
  ref <309>: DATABASE ENTRY DATE: 2001-12-06
gagattaggctctccgcctgccgcgccgcgagctcccagagaatcaccggcgcattccgctgcgattcttgctgcagcagcggccgcggcggcggcggccacctcgtgaaggcttgaagcccaccggggaaggggagggagggagcccaccggggaaggggagggagggagagagagagagagagagagagagagagagggagagagagagagaggctgcgggcttctcgcggcgggatggcgctgcaaagctgctgctcctcctccgcctccgtgcccgcgacctgttcggcgctttgcctcgcggaagcgacgcgcgccgcgagcctcttcgtgcgcccgcgcgccgccgcgaggaggctcgtgctcgcccgatgcgcgcgggggcgggagggcggcgagtccaagcggtgcagctggtgctcggcggccgcgcgcgcgacgacgggtccgagtccgagtccagcgacgacgaggacgacgacgagccgatgcagatgacggacgagcagaggaggacgctgcggaggaagatacgggagatgatggaccgggtgcccgagacggcggagatcacggacccggcggagaggaaggccaagatgctggagctgctgaccaagtaccagctcgtggtggaggaggaggacccgaactggccggaggacgatgaggacggccatgggttcagcctcggccagttcttcgacaagatcaccatcaaggccgagaagaagaatgatgatgatgaggaggacgatgctaaggggaatcagagtgacaaggagatagtttgggaggacgacaactacatcaagccaatcagggatgtcaagaccatggactgggatgacaccgtcttcacggacttcggtcctttgattgtgcttgttcataaccgatacaaaagaccgcaggacaatgaaaatgcaagggatcaactagttaaggcaattgagatgttttgggaatacaatctgccttcaccaaggtgcgtggctgtagatgcctgtgcagaacctgaccttgtgaaggccctgaatgtttctggtttcccagaggtcctcttcactaatgcagggaagatagttcaccgtgacaaagtcgtccgatcggctgaggaatggacaagaatgatggcattcttctactataaagcagcaaggccgccttgcttgagcgaggcagatggtcagggtcaagaaaaggtccccctgatgtcataagaacagtgtgtaggcgtagcttgtagttgtattttacatcagtgtgcattgttagaaacttagagtttaaatcagttcacatttcttagctttttaaatgtcgtaacacaggcatctattagcatctactagtgaattgccatctttatctgttaatggcatagaatagatatatccaaactgcaacaagattatgttcatgtgctgtaggattatggtttatg

SEQ ID NO: 21698 - DNA, 2012 bp, Oryza sativa
  ref <308>: DATABASE ACCESSION NUMBER: AK071956
  ref <309>: DATABASE ENTRY DATE: 2001-12-06
gacggtgtaacacctaacaccgcaggcaccattgcttccttcctttcctagctacttcgatagctagctagctctcttcccctttcttgccatccatcttcatatatctatctctctatactacctagtttcttgtcagttgtcacacaaacacatatatacaccgagaaatttgtgagcaaaatggttggcacaatggatgaagcgaggatcattgaatatttcaagaacaagagcatcctcatcactggatcgacaggctttcttggaaagatactggtggagaagatactgagggttcagcctgatgtcaggaagatctatctccctgtgagagcggtggatgcagctacagctaagcaacggatgcagactgaggtgatagggaaggagctgtttgggcttctgaaggagcagcatggcaaggggtttcagtctttcatcgatgaaaaggtagttccattggctgcagacatgatgcatcagaacctgggcctcgaggaatccaccttgcaagagctcgccaaggaccttaacatcatcgtcaatggagctgccaccaccaacttctacgaaaggtacgacgtggctctggatgtgaacgtgatgggggtgaagtacctgtgccagcttgccaagaagtgtgccaatctcgaggtgttcctccatgtctccacagcgtacgtgtgtggcgagaggtccggggtggtgcaggagagggcgttgagggagggggagacgctgcgggaggggacgtacctggacatcgagacggagctgcggctggtgggcgagcagaggcagcagctggaggacgccggcgacgccaaggcggagaggaaggcgatgaaggatctgggtttagccagggcgcgccacttcgggtggcccaacacctacgtgttcaccaaggccatgggggagatgatgcttcaggagcagctggtcgccggcgccggccgccgccacgggatccccgtggtgatcgcccgccccagcatcatcaccagcgtccacagggaccctctccccggctggatcgagggcacccgcaccatcgacgccatcatcatcggctacgccaagcagagcctctcctgcttcctcgccgacctcgacctcatcatggacgtagtgcctggtgacctggtggtgaacgcgatgatggcggcgatggtggcgcactcgagggggtcatcgtcggagatggcggtgtaccacgtgacgtcgtcgatgcggcacccggcggcgtacgcggtgctgtaccggacggggtggcgctacttcctggagaaccctagggtggggaaggacggggtggcggtgcgcacgcggcccgtctacttcttccgcaccatcgcctccttcagggcgttcatggcggtggcctacgcgctccccctccagctcctccgcctcctctccctcctctgcttcggcctcctcttcgcccgccgctacgccgacctctcccgcaagtactccttcgtcatgcagctcgtcgacctctacggccccttcgccctcttcaaggcctgcttcgacgacctcaacatggagaagcttcggctgtccatggccacgccgccgtcgtccgccgccgccgccctcttcaacctcgaccccaagaacatcgactgggacgactacttctacaggatccacatccccggcgtcatgaagtacgtcctcaacaagtgatccattccatccatccatcatacgtaagattattgttcttcttctacctggctgctgctgcttacaatgaagaagctagctagctagctgattgtatactcgatccatccatccatccaacattattgattgatcaccgtaccgtacgtacgtgttaagttatgcttataattcatcacagaatcgatttataagcttctgctgctagtggtggtgaggtattttatttattgttgaaacaaatcaagtcatcttgttaaacatttctcttattattaattaagattgctcttggtcgataacatcgatcc

SEQ ID NO: 21699 - DNA, 3542 bp, Oryza sativa
  ref <308>: DATABASE ACCESSION NUMBER: AK071957
  ref <309>: DATABASE ENTRY DATE: 2001-12-06
gggaccattctattctaccacatcacacacacacaaacacacacatattctcaatctaacataataacactacactacactatacttggagttggtgatcatatacatatactacatctcaagaacaacaacacaagaagaggcaaaaagaaggagcaaattaagccaccatctgatctgtgcatgctatggtgatcaatctctcttctcctccaatcttcttgttgttcttcttgtggtgtgttgtcgtcttcttcgtggccggcgatggcggcgcggtggtggcggaggcggcattggatgctcaggcggcgtacctgtcccagatgaagcaggagttcgccgggccggccatggcgaggtgggacttctcggcgccggccgtggactactgcaagttccagggtgtcgggtgcgacgcctccggcaacgtgacggccatcgacgtcacgtcgtggaggctgagcggtaggctccccggcggcgtgtgcgaggcgctcccggcgctccgggaggtccggctcgggtacaacgacatccgcggcgggttccccggcgggctggtgaactgcacgtcgctggaggtgctcaacctcagctgctccggcgtgtcgggcgccgtgccggacctgtcgcggatgccggcgctgcgggtgctcgacgtgtccaacaactacttctccggcgcgttcccgacgtcgatcgccaacgtcaccacgctcgaggtggccaacttcaacgagaaccccgggttcgacatctggtggccgccggagtcgctgatggcgctgcggcgcctccgcgtgctcatcctgtcgacgacgtgcatgcacggcggcgtcccggcgtggctcgggaacatgacgtcgctcaccgacctggaactcagcggcaacctcctcaccggccacatcccgctgtcgctggcgcgcctcccaaacctgcagctgctcgagctctactacaacctgcttgagggcgtcgtccccgccgagctcggcaacctcacgcagctcaccgacatcgacctctccgagaacaacctcaccggcggcatcccggagtccatctgcgcgctgcctcgcctccgcgtgctccagatgtacaccaacaagctcaccggcgccatcccggccgtgctcggcaactccacgcagctccgcatcctgtccgtctaccgcaaccagctcaccggcgagctccccgccgacctcggccgctactccggcttcaacgtgctggaggtgtcggagaaccagctcaccggcccgctgccgccgtacgcctgcgccaacggccagctccagtacatcctcgtgctcagcaacctcctcaccggcgccatcccggcgtcgtacgccgcgtgccggccgctgctccgcttccgcgtcagcaacaaccacctcgacggcgacgtccccgcgggcatcttcgcgctcccgcacgcctccatcatcgacctctcctacaaccacctcaccgggccagtgccggccaccatcgccggcgccaccaacctgacgtcgctgttcgcgtcgaacaaccgcatgtcgggggtcctgccgccggagatcgccggcgcggcgacgctggtcaagatcgacctgagcaacaaccagatcggcggggcgatcccggaggcggtggggcggctgagccggctgaaccagctgtcgctgcagggcaaccggctgaacggctccatcccggcgacgctcgccgacctccacagcctgaacgtgctgaacctgtcgtacaatgcgctcgccggcgagatcccggaggcgctgtgcacgctgctgcccaactcgctggacttctccaacaacaacctgtccgggccggtgccgctgcagctgatcagggaggggctcctggagagcgtcgccggcaacccggggctgtgcgtggcgctccggctgaacctcaccgacccggcgctgccgctgtgccccaagccggcgaggctgcggatgcgggggctcgccgggagcgtgtgggtggtggcggtgtgcgcgctggtgtgcgtggtggcgacgctggcgctggcgaggcggtgggtgctgcgggcgcggcaggacggggagcacgacgggctcccgacgtcgccggcgtcgagctcgtcgtacgacgtgacgagcttccacaagctgagcttcgaccagcacgagatcgtggaggcgctgatcgacaagaacatcgtcggccacggcggctccggcacggtgtacaagatcgagctgagcaacggcgagctggtcgccgtgaagaagctgtgggtgtcgcggcggtccaagcaggagcacggccatggcggcggcggggggtgcctcgaccgcgagctgcggacggaggtggagacgctgggcagcatccggcacaagaacatcgtgaagctctactgctgctactccggcgccgacagcaacctgctggtgtacgagtacatgcccaacggcaacctatgggacgcgctccacggcggcggcgggtggggcttcggcttcctggactggccgacgcgccaccgcgtcgcgctcggcgtcgcccagggcctcgcctacctccaccacgacctcctcttccccatcgtccaccgcgacatcaagtcctccaacatcctcctcgacgccgacttcgagcccaaggtcgccgacttcggcatcgccaaggtcctccaggcccgcggcgatcgcgacgcctccaccaccaccatcgccggcacctacggctacctcgctccagagtacgcctactcgtcaaaggcgacgacaaagtgcgacgtgtacagcttcggggtggtgctaatggagctggcgacggggaagaagccgatcgagccggagttcggcgacacgagggacatcgtgcagtgggtctccggcaaggtggccgccggcggcgagggcgaggcgctggacaagcggctcgagtggagccccttcaaggaggagatggtgcaggctctccgcgtcgccgtccgctgcacctgcagcatccccggcctccgccccaccatggccgacgtcgtgcagatgctcgccgaggccggccccgccgccggccggaccgccaaggacgccgccaacaagaaggactcctccggcgagccaaagctgtaataatcatctttaatctagctaatgcgtgcaaacgtactgtgtaattatccggccggattagtagctagtgatcataagcaagaagagagattgttcatgagctagctagctccaactaattaattagggggaaaatattaattactactaattatatttacatgtaataatactaattatgtagatagaatcataagaggcaagttgcaaaggttgttcgctcttgcactaggggatatatatggctagtatttgtagagtcgtagctgcctttttgtttttttgggtttgggtcacgtaccattcacatatactgcttggtgtttaagcagaatctgatgctctcagtggatggaccaatataaaaatatatatatcaaatatatgtatacatggatgcaaatatatatactatatatt

SEQ ID NO: 21700 - DNA, 1850 bp, Oryza sativa
  ref <308>: DATABASE ACCESSION NUMBER: AK099213
  ref <309>: DATABASE ENTRY DATE: 2002-08-28
ggattttaggtcaatgctcgaagcaatttctcctcctcgatccttctagaagcccgaatcgaaaggctaaaaccctagaagcagatacgcttcagcgcgaaaccctaatccccaaatggccccaatggcgggcggcggcggggtaccgtggggggaccgggccagggtggtcggggcgcagatccgcagcaggttccgcgtcggcgtggcgcccgtggaccggcggtggctgtggcggcgcggggacgggcgcgtcgcctccgaggcggtccggcagtggacggaacgcgtgcggagcctgtggcagagggagaagagtacggatcagatctcctcgtctccggggacgtcccaggtggcggccgcggcgaagccatcatcgagtgctttgaggttctacagaaagaaagtgggcaaggaggttgatggaattgaagattctgttatttttcggtcgcttcaagcattggctgttcctcttattggcaatgcttgtcatatttttatgcatggcctcaactctgttcagatttatggtgcagagaaacttcagcaggcattacaggagagacctaaaggcaagcctctcctaacggtcagcaatcatgtggcagctatggatgatccctttgtaattgcgtcaattctcccaccatcagtcatgttggaagctcaaaagctgagatggacattatgtgcgagtgatcgttgctttacaaatccaattttgtctacattcttcaggtctgttaaagtgctacctgtttctcgtggcgatggcatttaccaaaagggaatggacatggcactttcaaagttgaacaatggtggatgggttcatattttcccagaaggaagtcgttcaaaggatggagggaaaaccgtcgctcctgccaagagaggtgttggaaggaatgcaggatataatgcctgtcggaaaacgtattccaagagcaggcaaaagggtgattgtggttgttggtgatccaatcaacttcaacgaccttatcattgacaacagcgatgaaacccaacacatctctagaggcattttgtatgacaaagcaacagaaaggattgggcagagactgcaggaactgaaagccgaagtcgatagattagcagcagagcagaaatctgaactccaacatcatcatgcccgtgatactgtcaactatggtacccgactgtggcagcaggttgattgggaagcatttggcatggagagttcaatgctgtcaccagaaccttcagacgtgcaagagccgttgaagaaagccaagcctgtactacacctggaatctgaacatgccaagcctgaactacacctggaacctgagcaagccaagcatgagctacacacggaacaatgcgttcctgcagctccaagtgccgagatctgctccaatttcggtgttccgctcttcttcagacagcacacggacccttctgagctcatggggtttgccgcccgtggcctgctcaagaatggcaggttcatggaggaggaaggctaccgggaattgcaacggcagggcgcaatgaacatgttttggggatctcaggccaacaatactgtactatagtgagcggccttactcatgaatgtggccgcgccctcctttgtacataagtttactgaagatgacacgccgacacgaattaggacagcttcttgtttctttgctgcatacagttttggaacaaacgaagtggacacaccttctttctcctaggggcaacttgaatggcatatgcatttcgcttctcaagaatcatataatacgcatggtttatattatcatgtaaacatggttacattctaaatcaagagcctcatcttttcgctt

SEQ ID NO: 21701 - DNA, 1846 bp, Oryza sativa
  ref <308>: DATABASE ACCESSION NUMBER: AK099214
  ref <309>: DATABASE ENTRY DATE: 2002-08-28
gatctgcaacaaagtccaaaacccataaaccccctctcccccacttctcccccacaaactagggtttcactcgccgccgccgcccccgccgccgccatggccgccgacacctccaagcccttcttcccggcggcgccgaaccccgccctcctcccctccggccgcaagccctcccgcctctccccggaggcctcctactggcgctccttccgcgcctccgagctcacccccgccaacgagttcaacgtcacccacctcgccttctccccctcgtcggcccccaccctcgccgcctcgttgtccacctccgtgctcctcttctccggcgacccgctctccccgctcccccgcatccccgcctcccaggacgtcgccttctccccgtccttcctccgacggctccctcctcgccgtcggcgacaagaagggcgtcgtccgcgtcttccgcgccgacaagaagcagtcgtcgggcgcgctccgcacgctcacggcccacaccgccgagacccgcgtcgtccgctaccccgtcgccggcggcgacaaggtccacctcttcaccgccggcgacgacgcgctcctcgcctactgggacgtgccatccgagacgcccgtgttcgccgcccccgccgcccaccgcgactacatccgcgccggcgccgcgtcccccgccgaccacaacatcttcgccacgggctcgtacgaccgcatcgtcaaattgtgggacgcccgcatggggaagacgtcgacgctgtccttctcccatggcgaattggtggagagcgtgctgttcctgccgtccggcgggctgctggcgacagccggcgggaacgtcgtcaggatttgggatgtcattggtggcgggcggcttctccactcggtggagagccatgtcaagacggtgatggccctcgcgctcgccaagatgaccaacaccggcgagacgcggctgcttagcgcggggagtgatggttatgtcaagagctttgattatggcgagcttaagctcacgcactcgatgcgatatcctaaggaattgctttccttggcgtgctcgccgtgtgggacagtgctggttgctggatcttcaaagggcacaatttatatgggtaggaggaaaaagaagtcgacaggggaggacgaggaagagggtaagggtgttggtggtgagcttgattgggcaccaaccaagccggagaagcggcggttggcaccgtccaactataggtacttcctccgtggacaaaatgcgaaggctaaggaaggtgaccttgtgattgagaagcctaagaaggtgaaggttgctgaacacgataagttgctgaggaagttcaggcacaaggatgctctagtttcagcgttagctcgaaacaatccaaggagcatagtggcggtgatggaggagctagtttcaaggagaaagctggtcagatgcatcgagaacttggacacggaagaactcgttcttctcctgctgttcctgcaccgaaatgcaaccttgccaaggtatgccaggttcttgatgggggtggcaaacaaggtgctggagatgcgcgcggatgatatccgatcagatgagaacctaaggggttgtgttagaaatcttaagaggatggctgcagaggagattcagatacagcacacattgcaggggatccaagggatgatttcacccatgcttgcacttgccagtagatgaacaggtgcttttcttgtatcggaattcttttttggtctgttagtttacagtgaggcatgccacatacatgatgatgtatgctagtttacaaactattatcgccactgaaattttggctgtcatccaatcgatatactctgttgtgccgcg

SEQ ID NO: 21702 - DNA, 1335 bp, Oryza sativa
  ref <308>: DATABASE ACCESSION NUMBER: AK071958
  ref <309>: DATABASE ENTRY DATE: 2001-12-06
gatttcaaggtcttaataaccaaccaatttatcattgcattgcatttcagactggaaccggccatttctctccaatcggcggctaccatgccggccaagacatggcgcttatcctggatgtcgcccgcttcaaataccctcctcactgggttccactcccactgctttgggaagccatgaatacaactgatgacgcaactggtctactcagggggttcatgcttatctcaaggcacactgcagctccttcattgctctacacagtgagttgcagagatgaaagctggaaaagcatggcgaagtattgcatggaagatgtacccgatcttcttaaggatgagagtgtagacaatgttccagcacttctgtcccgcttagtgaaatcccttcctgccaatgctggaaatttgatcaaatgggttattgaagttaggagacaagaggaaggaggatcaggattaagcaaagaggaggaagaaaggcttattttgaaggaaatgatactacagcaagtccgtgatactgagctttttagattagtccgtgaactgcaattcactaagcagccatgttgtagttgctcatattcaagtgatgatgattcctttacccggattgcagcctctgtgtgctgtcaaggggccgcattgctaacagggaatctttcatcaaaagatgggttctgctgcagagaaacttgcttcaaatgtgtacaagtggatggtgatgggcctaagactgtcgttacaggcacagcggtttcaggagtcaatgaacaaagtgttgatatgcttctaccgatatccacattggaaacaagcgtgtgcaattcaaattcaagcaacgaggttgtcaaatatccatctagaacagatattttaactgttctattgctggctttacatcctagcacatgggtgggcattaaagacgagaggctgaaagctgaattccagagtcttatttcaacagacattcttcatgatgatcttaaacgagagatattgcatctaagacggcaactccattatgtgaggtcctgtaaagaggaggaatatggagatcctgtgccacaatcccattaacaatgatgcaaatcgcgcagttggttaccctggagatgcaaaaaaaaggggttagaggaggaactacatactccgtattacctttgtttcgagtgaggacttctcatttttgagacacctgacctgagacggatccgtgtagacatgttcatgttcatcacctgtggtcgtttctcttgttagtgacaactgacaactagcggggaggcacacgctaattgtgcggctggtgtccttgcaaaagtttctc

SEQ ID NO: 21703 - DNA, 1639 bp, Oryza sativa
  ref <308>: DATABASE ACCESSION NUMBER: AK071959
  ref <309>: DATABASE ENTRY DATE: 2001-12-06
gagctaatccccttcttccttcctccatttgctgctagcagtggctatcttctccctcaaatccccactctagtactgttgctgctgccaccatgttgctctcggcaacctcaatgcccaggctaccaacaagacctgccctcctaatcctcctccttgagctctccaacccacagctcaaagaagtggactcccatggctagaatggagtcacgcatggagctctaagcccagatgccctgaccagtgccccatagagcacgacatcaccgtgcaaccatcccctaggtccagttcttccccaaaccggcagtcctccttgctactctccctgtcctcctcctagccgagctgatggtggtgctctacgtcaccattttcaggttgattggctacaaatcttgggaatggttggcaaatgaggtgaaggtggagaggggttgtgttgctcgatgtgttcactggttgaaggtacattcttcatgcaagggaactgccaatattgagcatgattgagaaaataaagacctaaatcatgactagagtgtacatgaagcaaaaggaggttgaggagaaatggagtggaaatatatgcccaaagataaaacagaaactagagaagactgccgagttagccaatacatgctacacactgcctgctgggaagggtattttccaagtcaccgacagagatcaccagttcatagttgatatcaatgtgaagtgttgtgattgcagacgctggcaactcacaggaataccatgtagtcatgccatatcatgctttaggaatgaaaggatacaacctgaggacatggtatctccatgctactcattagagtcatttcgtgctgcatacaaatataacatagtgccttcaagggatcaatctaaatgggaaaaaatgaatggtgtaaatgtccaacctcctaaatatgaaaagaaagtagggagaccaaagaaaactaggaggaagcaatccattgaattggagggtggtacaaaattgtccaagcatggcgtggttattcattgtagttattgtgatggggctggacacaataggaataattgtgaattacttggtacaactaaaaagatgagaccaagaaggaagaggagtgtacaagtaatgcaagatgacaaagatgtttacatgaatgagaagaattagtacaagagggccaacatagcacttcagtgttgactactttattagaacaggcaacatcaactcaatcctccattaaccagctaggcctttaccggattcagtcttcattgaagctaatagaaatacactaccacagccaagagcgacaacatctacacacgtgggcagagcaaggatgaagagaagcaacacaagatcaacaacggccagatcatctagaccacctagccagaagaaaaaaaaaatagaagttatatgggtgctttctatcttgttttttcaatgttgcaaaatgcaaaataaaaggtgcacaattcaacaattggatttattccccttttgaaatttatggcttttggttagtggaacttagtgttgactgctcatggatgttatcagttaatgtaagatcgttttctatgtgattttgagatgtggaacatcattaagaaatgttgatttatg

SEQ ID NO: 21704 - DNA, 1477 bp, Oryza sativa
  ref <308>: DATABASE ACCESSION NUMBER: AK071960
  ref <309>: DATABASE ENTRY DATE: 2001-12-06
gatcttaaagaaaaggaatttccacattatcactgaagtcgcttagaacagtgtccattcagaactcaaaagtagtcgaaactccaaaccccatccgcccccgtactaatagcccccaaatccccgtacgcgaatcgcatctcctcgtctccggcggccgcggcgatcaactccggcgacatgggcaccgtcaccaccgccgatccgcacgcctccttcctcgccgacaagggcggcaaggtgttcgtcgccggccaccgcagcctcgtcggctccgccatcctccgccacctcgtctccctcggcttcaccaacgtggtcgtccgcacccacgccgagctcgacctcacccgccagtccgacgtcgaggccttcttcgccgccgagctcccccgctacgtcgtcctcgccgccgccaaggtcggcggcatccacgccaactccaccttcccggccgacttcatcgccgccaacctccagatccagaccaacgtcgtcgacgccgcgctcaaatgcggctccgtccgcaagctcctcttcctcggctcctcctgcatctaccccaagttcgcgccgcagccgatcccggagaactccctcctctccggccccctcgagcccaccaacgagtggtacgccgtcgccaagatcgccggaatcaagatgtgccaggcttaccgcatccagcacggcttcgacgccatctcggccatgcccaccaacctctacggcccgcaggacaacttccacccggagaattcacacgtcctgcccgcactgatccgccggttccatgaggcgaaggcgtccaatgccgcggaggttgtcgtctggggcactggctcgccgctgcgtgaattcttgcacgtcgatgaccttgcagatgcggtgatcttcttgatggatcactactcggggctggagcatgtcaatgtaggaagcgggagcgaggtgacgatcaaggagctcgcggagctggtgaaggaggtggttgggttccaggggaagctggtatgggactctagcaaacccgatggcacaccgaggaagctcatggatagttccaagatacaggagatggggtggaagcccaaagtccccctcaaggaggggctcgtcgagacatacaagtggtatgtcgagaatgtcatctctgcgaagaagtagcgccgtgatgatgatggcatgttgttctcaatatcttctggcgccttttaagttggtattacagtcaatagttttcatgttgttgctggctactagatcatacaattatcagttataagctctcccacaaagaagaggtcgttatgttggttgaataatgtggggtcaaactagtatacaattagaatcttaattgatctagaacaatttctgtcgattagagaaagtttcacactttgcaatgtttgatgtcaattggcctgaaaaagttttacacacacggaataagtaagctatgttttgatttatg

SEQ ID NO: 21705 - DNA, 1921 bp, Oryza sativa
  ref <308>: DATABASE ACCESSION NUMBER: AK071961
  ref <309>: DATABASE ENTRY DATE: 2001-12-06
gagcccctgcacagtacacacagcagccatgactaaggtcttcaccaggtctctcctaatgtacttcaacaagatcgtcaggagcctcagacccctcgtccattcgccgccgccgcagccggcggcggcagacaacatcgtccggtggccgtcggacgacgagctgctgccggcgccggacaccaccacgacgagcgtcgtcaccaccgtgtgcaaggtggagggcggcctgctgatgtcgccgtccactttcccgtacttcatgctcgtcgccctggaggcaggaggtggcggcggcggcctcctccgcggcctcctgctcctgctgctctacccggcgctgcgcctgctcggccatgaccgggcgatcagggtcatggccatggtgagcttcgccggcgtgaggaaggacgggttccggctgggcagctcgacgttgcccaggctgctcctggaggacgtgagcgccgaggtgttcgaggctgcggtgcggcggcggcggtgcgtgtgcgtgagcggcatgccgagggagatggtggagccgttcctgagggagtacctcggcgtcgacgccgtcgtcgcgccggaggtgagggcgttcggcgggtactacctcggtctcatggagtccgacggcgaggtgctccggaggctggacatggaggaggtgatcggaggtggggagaaggaggagacgtgcggcgacggcgatggccgcgtcgtcgtcggcattggtggacgtgggagatcgttcagtcggatctttcaaaagtattgcaaggaggtgtacgtggcaaccaagtcggcgcggcggcggtggcgccccctccatccccggcgctacgcgaagcctctcatcttccacgacggccgcactgcattccggccgacggcggccgcgacgctcgccatgttcatgtggctgccgctgggcgcacccctcgccatcctccgcaccgccgtcttcctcctcctccccttctccatctccgtgccactcctcgccgccctaggcatgcacagccgccgcatctcctcctcctcgttgccgccggcggcggcggcggcgcacaaccttttcgtctgcaaccaccgctccctggtcgacccgctctacgtctccgccgccaccggccgcaccgacctctccgccgccacctacagcatcagccgcctctccgagatcctggcgcccatccgcaccttccgcctcacccgcgaccgcgccaccgaccgtgccgccatgcaggcccacctgtccctccccggcggcggcggcggcgggctggtggtgtgccccgagggcaccacctgccgggagccgttcctgctgcggttcagcccgctgttcacggagctcggcgccgacgtgcagcccgtggcgctgcagtcggcggtgtccatgttccacggcacgacggcgggggggtggaagctgctcgacccgctctacctgctcatgaaccccacgccggcctacgtcgtgcagctcctggatcccgtcgccgtcggaggcgagggcggcggcggcggaccggagttggcgaacgaggtgcagcggcggatcgcggaggcgctggggtacacgcgcacggcgctgacgaggagggacaagtacctcgccctcaccggcaacgatggcggcgtcgatcggcgccgcttgcatgcatggtgtctactgtgggtaaagtacgtgttgtgcttgtgcctggcttggcgtaattaggaagcttaattacccagttaaacaaggtgtgtaagacacaccccggttgtgctcagttgtaacttgtaatggagttactcatactgtactccctccctctgtcttaaaattaaattaacattttgggaccgagagagtaacttgtacgagacattgatgtttattatttatataagtggtgttcttttatcctct

SEQ ID NO: 21706 - DNA, 1371 bp, Oryza sativa
  ref <308>: DATABASE ACCESSION NUMBER: AK071962
  ref <309>: DATABASE ENTRY DATE: 2001-12-06
ggccaagaaaccatctgtcgcttttgaccccgggaagcagcagcagcagcagcggcggcggcgtatcggggcgtaacggaatcgaggtgtgttgccgctatataaagaggaagaaaataggccccaaaccaaaccaccataccctactacaaaccataggcatcgccggcaagggaggtcggaggaagaagaaagggtcgtcgtggtgttcttgaattctgaatttctgatcaagtcgatcgttcgccggcgacggcaaaggtggtaactggtagtactatatatgacgacgtcgatggagaagccccggcaggtggtgcggaagttcctggcgcggccgcagcacgagggcgtcggcgccgtcgttcgccggagcatcgggaggtttgagctgaggtacttcgatccgttcctcgtcctggacgagttctcagtgtctgctccggctgggttccctgaccatccacacagaggtttcgagaccgtcacttacatgctcgagggagccgtgacgcacgaggacttcgagggccaccgtggcacgatcaaggccagcgacgtgcagtggatgacggccggacgcggcatcgtgcactcggagatgccggcggggcccggcacctccaggggcctccagctctgggtcaacctctcctcccacaacaagatgatcgagccggggtaccaggcgatacagagcaaggacatcgcgagcacgacgtcggacggcgtgacggtgcgggtgatcgccgggcagtcgatgggcgcccggtcgccggtgcgcacgcggacgccgaccatgtacctggacttcacggtccgcccccacgcggcggcgcggcagccggtgtgcgcgacgtggaacgcgttcgcgtacgtgctggagggggagggcgtgttcggcggcggcggcgacaaggccggggcgcaccacctgctgctgctcggccagggcgacggcgtcgaggtgtggaacaggtcggacaagccgctccggttcctgctcatcgccggcgagcccatcggcgagcccgtggcgcagctggggcccttcgtcatgaacaccgaggaggagatcgacatgaccatcaacgacttcgagttcagcatcaatggcttcgagaaggccaagcactggaagtctcaggcgctggtggcgctgggcttagagtagtagggtgcaaccatgggacgacacgacatgtcgacatatgctctgaacgaagggaaaaaaaatggaatagttctttctctcatgatacgaggttgttttatttatttgttttttttctcttccaaacaaatagcgatcactttgtgtacatatccggcataaggttgctgcttgcttttcaattaggcaggtgcttc

SEQ ID NO: 21707 - DNA, 1768 bp, Oryza sativa
  ref <308>: DATABASE ACCESSION NUMBER: AK071963
  ref <309>: DATABASE ENTRY DATE: 2001-12-06
gagctcgccctcctcccgccccccacctgctcgatctccactccgtctccatctccatccgatccaagatgccgccgaggcagtggaggccgatgctggcgtcggcgaccaagtgctgcgcggcggaggacgcggtggtggcggtggatggcagcggcggcgggggcggcctcgcgcggtgcaggccggcgcggtccgagttctcacggaggctggcgtcgttccggaagctgtcgtcgatgaccaacagcccagcgtcgtccgtcgcgggggcggcggagggggggaaagacgacggcgaggaggggggcggcggcggtggcggcgtgtccggcccgctgcagctctactccttcagcttctccgagctccggtccatcacgcacgacttctccagcagctacctgctcggggagggcggcttcggcgccgtccacaagggcttcgtcgacgccggcatgcgccccggcctcctgccccagcccgtcgccgtcaagcagctcgacatcgccggcctccagggccaccgggagtggctggcggaggtgatcttcttggggcagttccggcacccgcacctggtgaagctgctgggctactgctgcgaggacgaggagcgcctcctcgtctacgagttcatgccgcgcggcagcctcgagaaccacctcttcaagaggatatcggcgacggtgccgtggggcacgcgtctgaagatcgccatcggcgccgccaagggcctcgccttcctccacggcgcctccacccccgtcatctaccgcgacttcaaggcctccaacatcctcctcgactcggagttcacggcgaagctgtcggacttcgggctggcgaagatggggccggagggttcggagactcacgtgacgacgcgggtgatgggcacgcacgggtacgcggcgccggagtacgtgatgacggggcacctcaacatcaagagcgacgtgtacagctacggcgtcgtgctcctggagctcctgacggggcggcgcgccatggagcatgtcagggggaggagcctccacgccgaccaggtggtcaagatcgtcgactggacccgcccctacctcggcagcagccgccgcctccgctgcatcatggacccgcgcctcgccggccactactccgtcaaggccgcccgcgccgtcgcccacctcgccgtccagtgcaccagcccgcagccgcgcgaccgcccgcgcatggccgccgtcgtcgacgccctcgagcgcctgcagggcttcaaggacatggccgtcaccgtcggcctctggcccaccaacgcccccgtcgccggcaggaacgccatctccgccaagatccacgccgaggtcagaggcgccggctccggcggcggcgcggcctcgcggcggcggagcgcctccgccaagctgccctgatcgcccgcgtgcgttcgtgggcgcgccacgtcatcgcgagtacgtatttgtatacgtgtacgtgtgtgtatatactttagctgctgtataagatggcacggccgatgtattgtacgtggtgatcatcgagcttgattgatttttttttagccatatggattatggattattgcggaattaatactgatctgtatcaccatatgtacgtacttagtaggagtatttagttttaggtgccatgatgctggtagatcatgcatgcatgtatgatgaattgtactttcatccaccgattgctgattgcaagttcgtgcatcagtaatcggtcatttcgatattatctttttttttccttg

SEQ ID NO: 21708 - DNA, 1611 bp, Oryza sativa
  ref <308>: DATABASE ACCESSION NUMBER: AK071964
  ref <309>: DATABASE ENTRY DATE: 2001-12-06
gttccacatccttctctccgacgacgctacctagctaagctgctgctctgtagctggcaggctagggtttacgctagctgatcggagctaccaccaacgccggtggttggtagctcggcggcggcgggatcttcttcttgctcgggttaattggcgagctatatatatatctagctcatcggcgggaaggggaaatctcggctgacttgaagggatcggaggaggccatatatatgcatggctgagttcttgtagctagctagctaggtggatcgaggactgacgatgggaggatgagctcgaggaggcgttgataaggatgatactaggaagcaaccaagcggccgccgccgcggctgcggcagctgcggcggaggaggaggcggcggagctagcgaggaagcacacggcggcggtggcgacgtcgcggcaatggtcggcgcagacggagtcgcggatcgtgcgcgtgtcgcgggtgttcggcggcaaggaccggcacagcaaggtgaagacggtgaaggggctgcgcgaccggcgggtgcggctgtcggtgccgacggcgatccagctgtacgacctgcaggaccggctggggctcaaccagcccagcaaggtggtggactggctgctcaacgcggcgcgccacgagatcgacaagctgccgccgctgcagttcccgccgcaggaccacctctgcatgggacaccaccaccacctgccgtcggccatgccgctgatgcaccaccacggccaccaccaccacgccgacgacgataagtaccacgtcgcggcggcggcggccgcgctggccgcggagaaggaggcggcggcggccggcggcggaggaggaggagggggagacgacgtcgacggcgggggcggcggcggagcggcgcacatagtggggaggttccccgccggtggctaccaccggttcatggggctgaacaacccgctggggatggtcaacagcgccgccggcgccgccatgccgttccactacgccggtgagtcatggaataatggcagcgtgcaagacagcggcgccggctcgccgcaggtggccgccgccgcggctcaccacacctcgccgttcccttcactgctttccttggctccagggccgcatcatcagctggtgttctactcctccgaggccaagcagttcacagtagacaaccttggctcgcagggcttgtccctgagctcggcgagagctttccatgatcagacaggaagctaagcaagctcgatctacacagtacacacactggaacaacactcttcgatcgtcgacaaggtaaggatcgatgagctctaccaaaagaacaaatctaagctagctagtgcaagtgtgtgcattgctttgatctatgtattaatttctttcaagggaacaattaagcttgtgggttaagatttaagaaggaagatactgccagctagctggctgctaatttcttttgctctgaaactagggcaagaaatatgcagggctttgctgcatatgcctgtgtgcaatacggatttgttacttctttttatatgcaaagaagtaattgatgtattggcttgtgtaataattaataagttctgaattttgaacctttc

SEQ ID NO: 21709 - DNA, 1122 bp, Oryza sativa
  ref <308>: DATABASE ACCESSION NUMBER: AK099215
  ref <309>: DATABASE ENTRY DATE: 2002-08-28
ggctgctcctcgagagggagttggtggagagagaaagagagagagagagatggcgtcgccgtcgtcgtcgtcgtcgctgtgctcgaccttcgcctcgccgcgcgccgcctccctcggccgccgcctcgccttctcctcgcccaggaaagcattccgagtgagggcatcatccagggttgacaagttctcgaagaatgacatcatcgtgtccccttccattctttctgcaaacttttccaagcttggcgagcaggtaaaagctgtggaggtggcaggatgtgactggattcatgttgatgtcatggatggacgttttgtgccaaatatcacaatcggacctttggttgttgatgctctgcggccagtcactgatcttccgttggatgtgcatctgatgattgtggaacctgagcaacgagttccagattttatcaaggcaggtgctgatattgttagcgttcactgtgagcaatcgtcaaccatccatctacaccgaacagtcaatcagatcaaaagtcttggagcaaaggctggagttgttttgaatcctgcaacccctctcactgcgatagattatgtacttgatgttgttgatctagtattgattatgtcggtgaatcctgggtttggtgggcagagctttattgaaagccaagtgaagaagattgcagagttgagaagattatgtgcagagaagggagtaaacccttggattgaggttgatggtggagttggtcccaaaaacgcctacaaggtcattgaagctggggccaacgccattgttgctggttcagccgttttcggggctccagactatgcagaagctatcaagggaatcaagaccagccaaaaacctgtggctgtaccagcatgaggatcctaaagtagtatgctgtgtacgttgtttttgtttaccagtaccgcggtttgtacagatatgtgccaagctgtacgttatattggagaaattgaaggaagaagaaaacgtggagggcgaccgtttttctcactgtccgcgaagatatactacatattctcagtgtcatgtgatactaccgtgctcacgaaattgttcataataaatatcgttctttagcaaatcctataatgatttacacttct

SEQ ID NO: 21710 - DNA, 1182 bp, Oryza sativa
  ref <308>: DATABASE ACCESSION NUMBER: AK071965
  ref <309>: DATABASE ENTRY DATE: 2001-12-06
gggaaaaaatctcccaattccccaaccctaacgccgctctcgcctccaccccccaaatcccgaatccgccgcctcttcgttcgtcgtcgagctcgctcgctcgcccaaccctagcgcgccagatctacccgcccccgagcagccgccatggcggagaccctcgacatgacgctcgacgacatcatcaagaacaacaagaaggccaacccctcgtccggccgcggccgccgcggatctgccgctggcggcggcggcggcgggggtgggggtgttggtggtggcggcggcggcggcgtggggccgacgaggcggcccttcaagaggtcggggaacagggcggggccctaccagccgcccaaggcccctgaatcggcgtggcagcacgacatgtactcggatgtcgcggcaggcggcggcggcggcagcggcggaggcgggagggtctcggctatcgagactggcaccaagctctacatctccaatttggacttcggcgtctcgaccgaggatatcaaggagcttttctctgaattaggtgatcttaagaaatacgtaattcactatgacagaagtgggaggtctaagggaacagctgaagttgtatttgcaaggcgtggcgatgctgtcgcagcagtgaagaaatataacaatgtgcaacttgatggtaagccaatgaaaatagagatccttgggaccaatactcctacagctgcagctgctcttccagcaaataacggaggctacgttagaaatgttgctaagagtgcaccaaggggtggcccagctggactaccgcagggtagacctcgtccaagggggggtgggaggcgccgtggtggcggaggaggcagtggtggtcctggtggatccggtggtcgccgtggcaaagagcgtagccagccaaagtctgctgaagaacttgatgctgacttggagaaataccatgcagatgcgatgcagaccaactagatcttcacggtgttgatatttcaacatgaaatctgaaggatgtttatctgcttgttcctgctatttgtgctaccatgttcagtggcaacaacaaaacctttgtttgtcgggtcttggtttactgaattgtacggttttatgtgtctacatagaactagagttaagtggatgctggtgaacactgttatgaatattacttggttgccacttatg

SEQ ID NO: 21711 - DNA, 1448 bp, Oryza sativa
  ref <308>: DATABASE ACCESSION NUMBER: AK071966
  ref <309>: DATABASE ENTRY DATE: 2001-12-06
ggctggttgcctcctccgcacgcgcaacggcgcgaccggcgactctcctcgccgccggtcaccggtcgcctggcccgcctctcgcgccccgccagccaccgcatcggcgcagatcgacggacgccgagacgcgcagccgcagtcgcgcagaggcgccgagtgcctgagggctcagccagccgccgaccgccgcggccgcctggcccccctgcccgtctcgtcttctccagtctcctccaatccttcgtggcaggtctccaaactccggctccccgctgcggcgctccacctccgactccgattggcgattggacaacactgaaggcatgtcaactatttccgatcagaagaaacggaccttagaagcccttcaacaacgttatgctgctgcaaaagctaagaaactgcaagacaagcctaggtgtcagacaaggaataaagatagtgcgcccaagcccaatcttgatgcatcaaggaaaggcaaagctccagatttcattccatctcgaacttctgctccgtttccttcaaaaaaaggtctagcaatctccagttcttctgcttcctcaggtggagaaaccaatcctgtatactctgaactttcatttgctccacatgataatttgctccaaagaagcatttcggatttggacagtatggatgttgtgcacaatgttgtttatgacataattcagaaaggtggagatgctggaaaaattaccaagggagccaaaaagttaaagctggaaaaagggattctgctggataactatgttcacaggggtcctagattagttgatgcacaggcaaaatctttgttaattcattcaaagcgatcaaaaaggcacatgtcacttaagcaacataagaaatgtgggtcatttgatttacctgagacactccgcaagtttgacctctacaagccaatgcatgagatgtggaaagagtatatcacagagcttaccaaaagcacaccgaaaaagcagttatctgaaaccctcctctcagcagatcttcatggggctcttgtaatagtggcagaatgcaaatcagcctcttcttatcaaggcgtatgcggcatcatgattcgcgatactgcagagacttttggaatcatatcagatgacaatcgcttccgagttgtgccaaaagctgggtcagttttcatcctccaagcagactgttggaaggtcacgctgatcggtgacaaactgtcacccagggagaagctgaaggagaaccagcgtcagcagcgagtgcaggcacagatcagatagagtttttcatcctttgtctgttgtaattttggttgttttttctcccccagaaacatgtacagggtttagttgtttaggtgttgttactgaagtttaatggtaatctccctcttcacaccttaagcaagtatcacttgaatacaactacggctctaccttatcactgcattc

SEQ ID NO: 21712 - DNA, 1764 bp, Oryza sativa
  ref <308>: DATABASE ACCESSION NUMBER: AK071967
  ref <309>: DATABASE ENTRY DATE: 2001-12-06
gatgtagataaaaggaaggatgatagaaagaaggaagagaaataagaaagatataggattccaatatgtatggtctatgaattacatcataaaaagcaatgtgataaagcatcaatataataaaaataacagagaattcgaaatcgtaatttgattgaaacaagaaatacaaatttcaaggaataacaaagagcgtcccgagttaataaaactgagaaattgactcggaaagaaattttttggaagctccattgcgagattcaaacctaaccattaaaggagaagcagtgggaacgacagaacctatgactggataggattttcttgaaaagaatcccaatacttcattgggtgggatggcggaacaaaccaaaaaaattgtcttatttgataaggttatgaattaacaaataagacaggaaagagtaaatattcgcccgcgaaatttttattgaattagaatactttaccgcgattcaataagagtaaaataaaaaaaggagattaaaaaaaaaaaaaaaaaagaattacattaaatatagaatatagatagataaacatacacatctagatatattctagatcctctttcttgactatatattttagtattttaataaattcaatattaaaaaccctaacctttcctattaatgtgtatctatccgtaatattttagaatattgtggaattagagaaatttgcacactttctcatttgattcgcgaggagctggatgagaagaaactctcatgtccagttttgcagtagagatggaactaagagagaaccatcgactataaccccaaaagaaccagatttcgtaaacaacatagaggaagaatgaagggaaaatcctaccgaggcaattgtatttgttttggtagatatgctcttcaagcacttgaacccacttggattacggcgaggcagatagaagcaggacgaagagcaatgacacgatatgcacgtcgtggtggaaaaatctgggtacgtatatttcccgacaaaccggttacaataagaccgaccgaaacacgtatgggttcgggaaagggatcccccgaatattgggtagccgttgttaaaccaggtcgaatactttatgaaatgggcggagtatccgaaactgtagctagagcagctatttccatagctgccagcaaaatgcccatacgaagtcaatttcttcggttagaaatataaccccccaaaaaaagtagtattgaaaataaaaaaccaggttcttctttctggaaagacaatatttctttcatccttttgcattgaaataacaaattgaaatcaaaataatatgattcaacctcagacccttttaaatgtagcagataacagtggagctcgaaaattgatgtgtattcgagtcataggagctgctagtaatcagcgatatgctcgtattggtgatgttattgttgctgtaatcaaagacgcagtgccccaaatgcctctagaaagatccgaagtaattcgagctgtaattgtacgtacatgtaaagagttcaaatgcgaagacggtataataatacgctatgacgacaatgcagcggttatcattgatcaaaaaggaaatccaaaaggaactcgcgtttttggcgcgatcgccgaggaattgagagaattgaattttactaaaatagtttcattagctcctgaagtattataaatactagtagacaagatatagatcaaataaaaaattagtagattgtgtttcacgtatatgctttagaatccaaaacg

SEQ ID NO: 21713 - DNA, 1684 bp, Oryza sativa
  ref <308>: DATABASE ACCESSION NUMBER: AK099216
  ref <309>: DATABASE ENTRY DATE: 2002-08-28
ggctattccgcattttattcagatccattccccctcgttcgcagctttccgcgtgaaggtacgagcattttagagcaggtcagggatttttttttattttttttacgcttgatttgatgcctaaaatggccaagaatctgggccttgattcggagacgagtttctgattaattcgaattggctgctccggataaggtgaccggttgtttagctccggaagtccggatgaagtattcctcgctgcaaatcggttgaattgaagcggaattagcggttgtccaaccgctaacgcccggacagagaagaaaaggtatccgcttgggaaggctaatccggaagcaatcgcggcgatccgtcgtcgttgaatcgcttcgagagttttggcatttcttcagcgtggcatgggggcgggggcgtcgagcatgatgggaccggaggggtacggccggggatgggggcagacgtcgctgggcgacatgccggagagctgcgtcgcggcggtgctgctctacctcgacccgccggagatctgcaaggtcgcccgcctcaaccgggcgttccggggcgccgcatccgcggactgcgtctgggcggccaagctccccgccaactaccggtacctcgccgccctcgccgccgctgccgacgacgacagcggcggcgacggcgccacggaggggaatggcagtcgctgctcctccgcagccatgatcaagaaggagatatacgcacgcctgtgccggcccaccccattcgatgggggcaccaaggaattttggatggagaagaacaagggtggtctttgcatatccatttcctcaaaggctatggcaatcacaggcatagatgataggagatattggagtcacctctccacagaggagttagattccaccatgtcgcgtatcttcagcaaatatggtggcttgaggtggctggggaaattgatttctgcttccctgctggttcatacagtcttttctttcggctccagttgggccgaccgcacaagtacatgggccgccgagtctatggctatgagtcaatccacggctggaacattaaaccgacaaggtttcagctttcaacttcagatgatcagcaagctacgtcgcaatattatctgaatgagccaggaaactggatcctttaccatgtcggggactttgtcgtatcaagttcagatcagttaaccaaccttaagttctccatgatgcagattgattgtacccatacaaaaggcggtctatgcgttgattctgtttttatatatcccaagggtcatcgacatgaggactgcacaatctgcaagtaaattttggaaagccactggatcccgttctcctttttccaggtcattcctgtccaaaagctcaatgtatatatccaaacttcccacagaaaaaatttttgtatgggcgtgaagtcttgatcgatattctttgtagtgttagctaaatcagcaggaagattatagatgtaggtagtgagttaggcatgagtgcttctgtgcttggagttttatctgtagaaagagcagttccatttgttcatcatttgtgtagtgatgtttaggtgataaagtctttcgccgatgttttttgagatttgtacaatttccccctttcttgtacagattatgtcgtatttttacttgtaaataatatgtcagattaaaatgttt

SEQ ID NO: 21714 - DNA, 1734 bp, Oryza sativa
  ref <308>: DATABASE ACCESSION NUMBER: AK071968
  ref <309>: DATABASE ENTRY DATE: 2001-12-06
agtgagggtgaatcgtagcgatagcggatcagattggaggaaaactcgctagtacgcttgttacttgcaactctttctctaatcttgcttcggaaagatatccaaatcgaagaaaaagaaaaaaaaattagaaagcgtgattagccattcctcttctcatctctagccacttcgcttcagcttttcttctttcttgatcgcgagcaaaaagggagagagaaaaaaaaacggtaaaaggacgtgattagcaaggatggtggcgatcgagaaccagagccagggccagcgggcggcggaggcggcggcgcagccacggatccccagggaggcgcggcggctactgcacgagatggcggcgtcgtgggcggacgttgccgactgccgggcgctgcaggtgattccgctcaagggcgccatgaccaacgaggtgtaccaggtgcgctggctcaacggcgccccggccaccgccgacggcggcgaggtggaggcggaggcggccgcaagggagagggaggtgaggaaggtcctcgtgcggatatacggcgacggcgtggagctcttcttcgaccgcgaggacgaggtgcgcaccttcgagtgcatgtctcgccatggccaaggcccccgcctcctcggccggttcaccaacggccgcgtcgaggagttcatccacgcaaggacactatctgcagcagaccttcgtgatcctgaaatttcagctctggtggcgtcaaaactgagggaattccacaaccttgacatgcctggcccgaaatctgtactcatttgggaccgactgaaaaactggctcaaaactgcaaggaacctgtgctcatctgatgaatccaagaaatttcggctgggtagcctggagaacgagattgctgcattggagaaagaattttcaggggattaccacgggattggtttttgccacaacgatcttcagtatggcaacatcatgattgatgaagacaccaacatgttgactatcatcgattatgaatatgccagcttcaatccagttgcgtatgacatcgctaatcatttctgcgagatggcagcagactatcattcagagaagccacatagactggactacagtaaatatccagacactgatgagcagaagcgttttgtgaagacgtacctaagcaattctgtaagtgaagaacctgatgcggaagaggtggagaaccttctccaaagcattgagaaatacacgctcgccagtcatctagtttggggcctctggggaataatatcggatcatgtcaatgatattgacttcgactacaaggagtatgcaaggcagagattcgagcagtattggcagaagaagcaagcacttttaacttcatgaattgcctgaaggcgtcaggtcgtacctgaaggcctgtgctgcacataacttgtgcgatgttactgacacataactccctgtgaaaagaagaaagatgaagatgataatgaagaagaaaccctttcgggatcaggagttctcatcccgaaatttccgtaaggttcagcttcaggaggaagctgtgggctttggttgctttgtttatagtctgaaaggcagcgaagaaaaagcccctggttgcgtgtttgtttgctcgacaaactagaggccgcttgtggggctagtagtgccgtcgtgtttcatgtgtatgtatacctaaatatatgttacataatggatcttgctttcgtcgactcgagagtcgagacagtgcc

SEQ ID NO: 21715 - DNA, 1427 bp, Oryza sativa
  ref <308>: DATABASE ACCESSION NUMBER: AK071969
  ref <309>: DATABASE ENTRY DATE: 2001-12-06
ggttgctagggttcaaccgtataatcgtacgtatactgtacaggtacagatatacgcgaagaatcattttctttttctgaaaaaaatacagatatactcgagtatactgtgcgtgccaacttgtttcttccttccggtcgtcgtcgccattatattgccgccttccccgatctccaagccctcgcaccaccctccttgttacagctgtgccgcctcttgcttcctcctcctcatcgtccgccatggcttctctcaccgatctcgtcaacctcaacctctccgacaccacggagaagatcatcgccgagtacatatggatcggtggatctggcatggatctcaggagcaaggctaggactctctccggccctgtgactgatcccagcaagctgcccaagtggaactacgatggctccagcaccggccaggcccccggcgaggacagtgaggtcatcctgtacccacaggctatcttcaaggacccattcaggaagggaaacaacatccttgtcatgtgcgattgctacacgccagccggagaaccgatccccaccaacaagaggcacaatgctgccaagatcttcagctcccctgaggttgcttctgaggagccctggtacggtattgagcaagagtacaccctcctccagaaggacatcaactggccccttggctggcctgttggtggcttccctggtcctcagggtccttactactgtggtatcggtgctgacaagtcttttgggcgtgatattgttgactcccactacaaggcttgcctctatgccggcatcaacatcagtggaatcaacggcgaggtcatgccaggacagtgggagttccaagttggcccgtctgtcggcatttctgccggtgatcaggtgtgggttgctcgctacattcttgagaggatcaccgagatcgccggagtcgtcgtctcatttgaccccaagcccatcccgggagactggaacggtgctggtgctcacaccaactacagcaccaagtcgatgaggaacgatggtggctacgagatcatcaagtccgccattgagaagctcaagctcaggcacaaggagcacatctccgcctacggcgagggcaacgagcgccggctcaccggcaggcacgagaccgccgacatcaacaccttcagctggggagttgacaaccgcggcgcctcggtccgcgtcggccgggagacggagcagaacggcaagggctacttcgaggatcgccggccggcgtccaacatggacccttacatcgtcacctccatgatcgccgagaccaccatcatctggaagccctgaagcggcttcttgacgccacgacatcctcgtcatcgtcctccccagctcgccgtgtcgctccggttgctccattgatcggacgatctggtgaattgcatttgtgctgggagaagt

SEQ ID NO: 21716 - DNA, 1373 bp, Oryza sativa
  ref <308>: DATABASE ACCESSION NUMBER: AK071970
  ref <309>: DATABASE ENTRY DATE: 2001-12-06
gaccccttatccgcttcgtcaatgtgccatccatccaatgtatgcgactgtcaagctcgctaggccagcaagctgaggcaccagcccaaccatggacgccgttgccggggcaagcgtgagctcctcttcggcgcggctccgcccgtgcccacgcccccgccgcatcggcaacgtcgcaccggccaccgtgcgccgccgtagccggagacgtgctgtgacctgcgcggccgccgcggacgccgacgtcgtcggcctcttcgacgccgccaagctcacggtggacaggtttgtggagagcggcatggtggtcgggctcggctccggcccggcgtccggcctcgccatccagtacctcggcactcgcctccggcgagggtctctcactggcatccttggaataccctcgtccacgatcagtgcaagtgaggcagtgaaagcagggatacaggtcagcagctacgaggaaggcacccaaattgactttgctttcactgatgctgatataattgaagaggacacaatgaccgctgtcattggccgtcggaaaacggagagcggagagccttctttcatggtggagaagggtattgttaaatcagctgataaacttgccttcatcattggccatgaaaaatatgtgaaaggcatcgaaggttcaattccagtcttggtgaaaagtgcaaattggatcgacactgctgaagagattgatgacttgttcctaggagacgcagaggtatggaggcggccatcgattggaaccgctggtccattaggaggtgacttcccattggttaccaaggagggccatcatgtacttgatgttatcttcacaactcccatcccggatcttggtaaggtagcagaaagcttggagaaaattgccggtgtcgtggaccatgggatagtttccagcattccatcatatgtcgtagttgcattgaacggggaagtgcaggtcttggatgagaagtcatcggtgataccatagcaccgaaaatacaaattcaccaagttttacagaagaatctattgcagataggctgaaaaatgccagtgagttaatcgtgtggcagtattttttttcaccatacgacattgttgtcgttcggtttatgacaaccaccacacgaccggagaattttacaacccgagatctacagttactgtgaagaatcgtgtgaatttttctgtttttttttttgtgaatcacgtctatattaagttttcagagaccatggattaaaagtttgagccgagtcataaaagaaagttggccagcgaccatgtaatatgtatgaccaattggcaaaatattcttctcgaagcatctttccaggcttccgctgaaacgcgtacacgttttctcgatc

SEQ ID NO: 21717 - DNA, 1342 bp, Oryza sativa
  ref <308>: DATABASE ACCESSION NUMBER: AK071971
  ref <309>: DATABASE ENTRY DATE: 2001-12-06
ggtccgccgccccgccccgcccatcttgtcagatccttcttcatagttacgaccaatcctatccaatccaattgttttgagaaccaagggaattaaggagaagaatcgaggaagaagaagaggccatggttgtgtacgagcaggatccggatgttctccgatggagccttcaccttcttcttccacccgccgctgccctacactaccaacaacgcaccagcagcgtcgactgcgatgagatgatcgcccacgccctccaggaggagctttcctacgcccaatcccaatccctatcctcctccatcctccatctccccccctctgctcctccactaaaggaagacgaacaagatgatgcgccaccaccaccacccccctttagttcttgttcaacccctgcagattatactaatactaataatcataatgcccatgactgcttaatcgagtttgtcgatgatttctctgctctagatggccaagttggcaaaagattacacgacatgattcccattcctcatgttccaaaaactaacggggacattccttctgttgatgaagccttttcagatcaccaaagactccttcacaggttggagctgtatgatcttgctgagctcaaggttgaaggggatggcaattgtcagttccgagcattgtccgatcaattttaccgcaccactgaacaccacagatttgttcggcaacaaatagtgaaacagcttgagtcttatccggaaatttatgcaggatatgtccctatggattatagggaatatctaaaaaagatgataaagaacggggagtggggtgaccacgttacattgcaggctgctgcagactcgtatggtgtaaagattttcatcctgacatcattcagagatacttgctacattgaaatccttcctgttgttcagaaatcagaaagagttatatgcttgagtttttgggctgaggtgcactacaactcgatatatccagaaggagagttaccagttatggagaacaaaaggaaaaggtggtggcatttttagatcagcaactggtgtacactccattgggctgggtacactccatttgatttgatttgatgttggttagatcagtggccattttgttggggctatatgtcagtgtaggaatgttgatttgtgagtgtacataacacatttagtcaggaggaagaatagctgtgacaatagatgaatgtatcatgtattggatattattgatgttatatagggtcacttagagttgggtttagaatagagtagctgggtgtggagctatctaaacctcttctctgtctctaatttattttgcaacatgtttggttgaaatc

SEQ ID NO: 21718 - DNA, 1409 bp, Oryza sativa
  ref <308>: DATABASE ACCESSION NUMBER: AK071972
  ref <309>: DATABASE ENTRY DATE: 2001-12-06
gctctgaaacttcggctgctgaccagtttgtagttcaggagaacaaggaggaggaggaatggggtttagctggggatggctgtgtggacggcgcaatgggccatcgggcttcggcggggcatccactgccgacgaggtcaccgccggcgtcgacgccagccgcctgacggtcgtcgtcacaggtgcaacaaatggcataggaaaggagacagctagggtccttgcactaaggggagcagaggtgatcttaccagcaaggacactggagagtggcatgaaggtgaaacagagccttgcagaggaaatccccagctcaaagctccatgtcatggagatggatcttagctccctcgactccgttcgcagcttcgcaaaatcgttcaactcgtcttataggcatctgaacgtcctcataaataatgcaggggtaatgtcctgcccttttggactatccaaagatgggattgagcttcaatttgcaacgaatcatgttgggcatttcttgctgacaaatctccttctcgacaagatgaaagccacggctaaagagactggtttgcagggcaggatcataaacgtgtcttctatttcgcatcgaggaagcgatggttcatgctttgatctagataagctgaacgacaagtcgaagtaccgtccgttcaaggcatatggacattccaaattagcgaatattctccatgcaaatgaactatccaggcgttttcaggaagaaggatgcaatctgactgcaaattccctgcatcctggagtaatcgccaccaacctccctcgccacatcctgacaaacagtctgattatatcaatcttctcagtcatgaaaccttttctgaagagcatacctcagggagctgcgacgaactgttatctagcattgcatcctggattgaaggacgtgtccggcaaatactttgccgactgcaacgaagctacgccgacggctgttgcaagagatgcagagctagcaaagaagctgtgggagttcagtgaagaacttaccagtggggatcagaagctgaaggagaagtgaaggtagcgacctgaacctgaagtcggcggcgacattggaaggagcgcagtgcgcagagtttggtggactggagctggagggatgcgacgcaatggaagtacgaaaccatgaaagcaatggcatcggttttaggctagactgaatatgtcactgaaaattttgcttgtcctaagtatactattagtatatgtcttgttctaaacttgttcggttgttcctttaggcaagactgaatatgtcttgttctaaactattagctatgtgagtgtgactatgtcatccgatgacgattgtacccctacattcaggggcgaatccacagggtataacactgttctaaactttataatcccattggtgt

SEQ ID NO: 21719 - DNA, 1746 bp, Oryza sativa
  ref <308>: DATABASE ACCESSION NUMBER: AK071973
  ref <309>: DATABASE ENTRY DATE: 2001-12-06
gtgtcggattgcgattcggttgacgtactgtacaataaccaacactacaccaagaaccctgaagacgcagctgccatcacaatcaaatcaggtttggacctgaactgcggcaacttcctggcgcagcacaccgtggcggcggtgcaggccgggaagctgtcggagtccgacgtcgaccgggccatcaccaacaacttcatcgtgctcatgcgactcggcttcttcgacggcgacccgaggaagctccccttcggcagcctcggccccaaggacgtgtgcacgtcgtcgaaccaggagctggcccgcgaggccgcgcgccagggcatcgtcctcctcaagaacaccggcgcgctgccgctctccgccaagtccatcaagtccatggccgtcattggccccaacgccaatgccagcttcaccatgatcggcaactacgaaggtacgccgtgcaagtacacgacgccgctccagggcctcggcgccaacgtcgccaccgtgtaccagccgggatgcaccaacgtcgggtgcagcgggaacagcctccagctcagcgccgccacgcaggccgcggcgagcgctgacgtgaccgtgctggtggtcggcgccgaccagtccgtggagcgcgagagcctggacaggacgagcctcctcctgccaggacagcagccgcagctcgtctcggctgtcgccaacgcctccaggggccccgtcatcctcgtcgtcatgtccggcgggccgttcgacatctccttcgccaagtccagcgacaagatctccgccattctttgggtcggctaccccggcgaagccggtggcgccgccctcgccgacatcctcttcggataccacaatcctggtggaaggttgccggtgacgtggtacccggcgtcgttcgccgacaaggtctcgatgaccgacatgcgcatgcggccggactcgtcgaccggctaccccggccggacataccggttctacaccggcgacacggtgtacgccttcggcgacggcctgagctacaccaaattcgcgcacagcctcgtgtcggcgccggagcaggtggccgtgcagctggtcgagggccacgcctgccacaccgagcactgcttctcggtggaggccgccggcgagcactgcgggagcctgtccttcgacgtccacctccgcgtgcggaacgccggcgggatggccggcgggcacaccgtgttcctcttctcgtcgccgccgtcggtgcacagcgcgccggcgaagcacctgctcgggttcgagaaggtgtcgctggagcccggccaggccggcgtggtggcgttcaaggtggacgtgtgcaaggacctgagcgtcgtcgacgagctcggcaaccggaaggtggcgctgggcagccacacgctgcacgtcggcgacctcaagcacacgctcaacctgagggtttaaattgattaggagttggaattaaacgggagatttgctagtgaggaagggcctctgatctgattgatacacggagtttggaattggattcgtcaagggaatttgcattacgagtggccgtcagaaatcagaattggttaatggggggtgtaataaggacggactcccccgttggagagaattggatcctcgggggtgggtcttttgctgtgggtgttaacatttgatttatttggagggtcgatttgcaactgtaatctttggaaaaagaaatttccgcaagtgtaattgattggaagggaaattagctcattttcgtcc

SEQ ID NO: 21720 - DNA, 1802 bp, Oryza sativa
  ref <308>: DATABASE ACCESSION NUMBER: AK071974
  ref <309>: DATABASE ENTRY DATE: 2001-12-06
ttggggcttatattacatagacttgtgtatgaccaatgcaatgctaatgtttatgatcctcctctagcatgttctaactgaatttattggtttgcttcaccagggaattgttgcatcttgcttgaattacgcaatcatgacttggtcaaacaaaatccttggtccttctctggttgccctctacaatccactccaaccagcatgttctaccatcctgtcaactatatttcttggtaccccaatatatcttggaaggtataacggaaaattctggcatgtaataatgcgaaatgtgttctttgaactttgccatttgacggtttctgaaatttgggattcattcaactgtagtcgctctgcattgcgttcattagttgcttctgatactcgttccagacaatagtcgctcttcattgtgtttattaattgtttctgatactctccagacaaataatcttcatattggtgttaataccggtgaaaatatgataaaaactgttttttttacagataacattgccaatatcgctttgttcatttcactcccatactattttagaaaaactcctttttggtcctctaaactatagaatttcaagaaacttcaaagtatacataatgtcataatcacgtgttgtatgtttccattctacttttcagcattattggaggagtctttatcattgctggtctataccttgttacctgggcccgttacaatgaggcgcaaagggtactggcaattggatatttagaccctcttcttgtggaggatgaggatccaccaactcccaagacacaggaaagttctttcactggctccattgatccttaaatgagctgtcctgaacagtagctgcagaattacttcacgtataaatacagttctcgcctatactcctacgtcaagatttccatcacttttagaatttgtagttggtttatgttccatctccatcatcaggaatatcagaatactgagctctatgctgaaaataagtttgaacaatagccattgttttgagctcatatcaaggagccattttttcatcaatggaggtgccattggctaacaatggtcagtgatcctccagcttcaacagttgtttttacagcccactggtggtcaccagtaggaacagcttcagtgattaaaggtagaccttaaatagcttgttacttactgattctacttatcgcataatagatcgtatgtatattgttaccatctgatgttccatttgtaatattgaaaagttatgcacctaaagctacccaaagatttaattcatatttgtaccacacttaattaacaaaagaactggaaacgtgtttttttttgttattttggtgcagagatttttccaaaatgactgatcttaggcttggttttgtgtttctcttcagcaggttgttctctaggcctgggaactcaatctgaaacagagttgagttattgattacttgcggcaagacagctgttcttctctgatgatgggacccaatgtattctttgctttgttcaagtttatgtcttgagagcacaatagtttctgtccaaggaaaagagagaattccaggattgtgctttcgttgtgtctgtctagtaatgattccgttgcttcatttgttttatatatgtgatgtaaattgtcagtacacactgttacttttttgtattacctagtgtaaagtatataaaggaaaacactgtatgcaaaatccttactgtctagtgcatattcttgttctgcaacaacctggtctcacggcgtagtttatataaaacactctgattgcac

SEQ ID NO: 21721 - DNA, 1562 bp, Oryza sativa
  ref <308>: DATABASE ACCESSION NUMBER: AK099217
  ref <309>: DATABASE ENTRY DATE: 2002-08-28
gccagatacggaactactcccctatccaacacctccgagtccgagcaacgcaagatggcgtcgtggtcgtcgcccgtcgccgccgccgccttgcaggtccatttcgggtcctcctgcttcttctccgcccgatcgccacgacagaccctcctcctaccacctctcgcccgcaaccctacactgaccatccagccccggccccatcccttccggaacatcaactcctcctcctcctccagctggatgtgccacgccgtcgccgccgaggtcgagggcctcaacatcgccgacgacgtcacccagctcatcggcaagactccaatggtatatctcaacaacatcgtcaagggatgtgttgccaatgtcgctgctaagctcgagattatggagccctgttgcagtgtcaaggacaggataggatacagtatgatttctgatgcggaagagaaaggcttgataactcctggaaagagtgttttggtggaaccaacaagtggaaatacaggcattggtcttgccttcattgctgcttccagaggatataaattaatattgaccatgcctgcatcaatgagcatggagagaagagttctactcaaagcttttggcgctgaacttgtccttactgatgccgcaaaagggatgaagggggctgtagataaggctacagagattttaaataagacacctgatgcctatatgctgcagcagtttgacaaccctgccaacccaaaggtacattatgagactactgggccagaaatctgggaggattctaaagggaaggtggatgtattcattggtggaattggaacaggtggaacaatatctggtgctggccgtttcctgaaagagaaaaatcctggaattaaggttattggtattgagccttctgagagtaacatactctctggtggaaaacctggcccacataagattcaaggcattggggcaggatttgttccaaggaacttggatagtgaagttctcgatgaagtgattgagatatctagtgatgaggctgttgagacagcaaagcaattggctcttcaggaaggattactggttggaatttcatctggggcagcagcagcagctgccattaaagttgcaaaaagaccagaaaatgctggaaagttggtagtggttgtgtttccaagctttggtgagaggtacctttcatctatcctttttcagtcgataagagaagaatgtgagaagttgcaacctgaaccatgagcctaacttcagtgttcacaacatcataattgtttctgagatttctggccattagtttttttttctgagaagtatcataccactccatagctgtttgttcgataaataaaacagttacctttgcacttataatgaggcttgtgagggtactgtgaaatttctctgaacatcttctactcttctcttttatccttaaatcaatctgggagcagtttgtaatacatacgtaaatttaaagctgggtgtttggtaattgtaaacaaatgtttcgaagagccgtgaaacattatcaattagcatgaagcactttaaaagtgctttcc

SEQ ID NO: 21722 - DNA, 2107 bp, Oryza sativa
  ref <308>: DATABASE ACCESSION NUMBER: AK099218
  ref <309>: DATABASE ENTRY DATE: 2002-08-28
gagtatactctcactctgtctcctcccccgcgtcggtcgcttcgcttctactggaggagagcagaggtggtggttggtgagagaggatgcgcggcggcggcggcggcggcggcggcggcggcgaggaggccggccagaagctgaagagcatggacgtcgacaagctggagaacggcggcgacaagcccgccctcaagtaccacggctggagggccatgcccttcatcatagggaacgagacgttcgagaagctggggacgctggggacgtcggcgaacctgctggtgtacctgacgcaggtgttccacatgcggagcgtggacgcggcgacgctgctcaacggcctcaacggcaccaccagcctcgcccccatcatcggcgccttcctctccgacgcctacctcggccgctacctcgccctcgccatcgcctccgtcgcctccctcatcggcatgttcttgctgacgatgacggccgccgcggacgggctgcacccggcggagtgcggggtgggggagacgtgctcgaaggcgacgtcggggcagttcgcggtgctgttcatgtcgttcgcgttcctggtgctggggtcggcggggatccggccgtgcagcatgccgttcggcgccgaccagttcgacccccacacggagtccggcaagcgcggcatcaacagcttcttcaactggtactacttcaccttcacctccgccatgctcgtctccgccaccgtcatcatctacgtccagagcaacgtcagctggcccatcggcctcggcatccccaccgcgctcatgctcctcgcctgcgtcctcttcttcatgggcaccaggctctacgtccgcgtcacccccgagggctcccccttcaccagcatcgtccaggtgttcgccgccgcggcgaggaagcggtcgctcaagcagcccaaggaccccaagcaggacctgttcgacccgccgcacaccagcgccatcgtcaccaagctggcgcacacggaccagttccggtgcctcgacaaggcggccatcgtgtccggccccgacgacgtgcgcgccgggggcgccgcgccgtcgaacccgtggaggctgtgcagcgtgcagcaggtggaggaggtgaagtgcctcatccgcatcgtgcccgtctggtccacggggatcatctactacgtcgccgtcgtgcagcagtcgacctacgtggtgttgtccgcgctgcagtccgaccgacacctcggccggagcttccagatccccgcggcgtcgttcacggtgttcgccatgctggcgcagacgctgtggatccccatctacgaccgcctcctcgtgccgcgcctccgcagggtcacgggcaaggacgagggcctcaccctcctgcagcggcaggggatcgggatcgcgctgtcgacggtggcgatggtgatgtcggccgtggtggaggaccggaggcggcacatcgcgctgacgcagccgacgctggggacgaccatcaccgggggcgccatctcggccatgtccagcctgtggatggtgccgcagctcatggtgctggggctctcggaggcgttcaacctcatcagccagatcgagttctactacaaggagatcccggagcacatgcggagcgtggccggcgcgctcgccttctgcaacctggcgctggggaactacctcagtgggttcctcgtcaccatcgtgcaccggaccaccggcgccgggagcaactggctggcgcaggacctcaacaaggggaggctcgacctcttctactggatgatcgccggcatcggcatcttcaacatcatctacttcatgatctgcgccaagtggcacaggttcaagggggcagccgccaactgagatgcaagtgaagtgaagtttgttcgtttgggtggttaattaattatgtcaatggcagataattaattggtggagtgcttttagctgggttttttttttctgcctcatcatttctctcttgtatttttgtatctgtggtgtcttgaattataaaatctataggattaagtgggtgaggagagagaaggaaagaaacaaaagggttggtttcttgtaagtggttaaaattcaaagataaatgaatcttcaatcctagt

SEQ ID NO: 21723 - DNA, 1687 bp, Oryza sativa
  ref <308>: DATABASE ACCESSION NUMBER: AK071975
  ref <309>: DATABASE ENTRY DATE: 2001-12-06
gacttgttcatggattccaaccacatgatccatatgacgtcgtcgtcttcctagttcctcctcgtgttaatttttccatgcaattttagctgtctttatcaaagctaatttgagctctctctctctctctctctctctctattctatttgtttccttgctctgctctctgaatttcttctcttcttccttctaccttcttaatttgcctctctgaatcataccatctcgtttctactccatgaacagctttagcatcttgtcactgctcactgggattaaaagtgtctccaattagtagagttcttggtcttttttttcggatgctactctccaaagatttggttcttggtgtttttaatcagcaaggaggcctcctctcaggtttaatttgctagcccatcagatatggggtgcttcgcgttcaagagcaaggccaagaaccagcgggcggcggcgtcgggggccaggtcgccggcgccgacgtcggacgggcagaagagcaaggcatcatcggcgtcgacgccgacgaggagcatccaggagctgtcggacgagaggggcgcgcagcggctgcgggtgttcgacctcgacgagctcagcagcgccaccaacggcttcagccgcgcgctcaagatcggcgagggcggcttcggctccgtctaccgcgccttcttccgctccgccgccggcggcggcggcggccgggtcgtcctcgccgtcaagcgcctcaaccagcgcagcctgcaggggcacaagcaatggctggctgaggtccaattcctaggtgttcttgagcacccgaatctagtgaggcttgttggctattgtgcagtggattcagaaacaagcaagcacaggctgctggtctacgagttcatgcccaacaagagcctagatgatcatctgttcaaccgagctcatcctcccctctcgtggagattgaggctgcagatcatgatcggcgccgcgcggggcctagactacctccatgaaggcctgcaagaagttcaggtgatatacagggatttcaaggcagccaatgttcttcttgatgccgatttcaagccagaactttcagactttgggctagcaagagaggggccaactgaaggaaagacaaacgtctccaccgcggtggtggggacgcacgggtacgcggcgccggactacatcgagacggggcacctgacgaccaagagcgacgtgtggagcttcggcgtggtgctgtacgagatcctgacggggcggcggtcgctggagcggagccggccggcggaggagcagaagctgctggggtgggtgcgccgccacccgccggagagccagagcttccggtcgatcatggacccgcggctgggcggccggtacccggcggcggcggcgcggcaggtggcgcggctggccgaccgctgcctcgtcaagaaccccaaggagcggccggcgatgagggaggtcgtcgaggagctcgagagggtgctccagatggagccaccgacgacgacggcggccgacaaggacggcgaccgccgcctgccgccggcgaagaggtgacgtcagatcagtcaccggaggaggctgcggtcaacgacggtcaaccagtgcgtgaggaacaaattgtggagagatcgatcattgattcatttgtattgtagagagagatgatgatcaatgcgaataatttggagc

SEQ ID NO: 21724 - DNA, 1880 bp, Oryza sativa
  ref <308>: DATABASE ACCESSION NUMBER: AK099219
  ref <309>: DATABASE ENTRY DATE: 2002-08-28
ggttcgccaccattacaccattccattccagtggtagaagatccgagatcgaggaggaggtgaggagaggagcaagaagaagaagaagaagaagaagaagaagatgggcatggagagcggagatgcccaactgccgctgctccaccaccaggcttccgcatccaatcagcactataccaagccccccttcaactggaaggctcctgctcttatcttggcctttgaattcttggagagcattgcctatgctggcatctccctcaacttggtcgtttatcttggaaccgtcctccatggaactaccgcctctaacgcagccaatgttgatacatggaacggaaccacttttcttacaccggtgcttggagccttcttggctgatacatactggggaaagtacaagaccattgccatctctacagttttctatcttattgggttgcttgtaattaccgcctctgctgtcatcccatcactacaacctgctccatgcaatgggagctcatgtcctcctgcaacagggtttcagtattttgtcttcttcaccgcgctctaccttatttcggttggcaccgggggtgtcaaatcagcattactcccctttggagctgaccagtacaacgattcaaacctcgaagagagtaaaaagaagcaatctttctttagcttgttcttcattgctatcaaccttggagtgttcatttcgggcactgtcgtcgtttggatacagcaaaatgttgcttggtctctcggattcggcatctcctcaatatgccttgttgttgccacagttgcctttttggcaggaacaccagtgtacaaggtccagcttcccagtggaagcccactcaagagtgttgtaatggtttttgttgcctcttttaagaagagaaaactggaggttcctgccgataacgcactcctgtatgaaggggatgatgctgatttaagcaatggacaatcagtcaaactagcacatactgatggtttcaggtggttagataaggcggcagtggtttttgaggaggtggaagagataaataaggatgagggtgggggtggagggtggctgcagtgttcggtaacgcaggtggaggaagtgaagattctgctgcggatgctgccgatatgggtgaccagcgtgctgtacgcggcttccttgggtcagacggccaccaccttcgtgcagcaggggaatgccatgaacaccaagatcggatccttctctgtcccggcggcatccctcaactccgccgaggtcatcttcatgatgatctgggtggtgttccaggacacggtggtcgtcccgatcgccaggcgctacaccgggaaccccgcggggctgacgcagctgcagcggatgggcgtggggcggttgctggcggtgccggcgctggcggtggcggccgtgctggagacgtggcggctgcgcagcgtcagggacggcggcaacctgagcatcgcgtggcagctgccgcagttcgtcatcctggcctgctccgacgtcttctgcggcatcgctcagctggaattcttctactcggaggcccccgtgtcgatgcggagcctctgctcggccttctccttcctggcgctctcgctgggctactacgtcaactccctcgtcgtctccatcgtcgccgtcgtcaccaccacctcgaacaagggctggctccccgccgacctcaacgacggccatctggactactatttctggctctggacggggatcagcgccatcaactttgtggtgtacgccgcctttgccaagaattataccgtcaagagactcgccgtcccgcactcgcactgatcgtctccctcatccacccaacactgccttgtattattccaatcaaccattcttgtattattattcc

SEQ ID NO: 21725 - DNA, 1397 bp, Oryza sativa
  ref <308>: DATABASE ACCESSION NUMBER: AK099220
  ref <309>: DATABASE ENTRY DATE: 2002-08-28
ggaaagcgctctcgactctcgccgccgccgccgccgccgcgagccgcgtcgtgcgggaacgcgagggtttttccagggggatggatttggggtcgtgctacctcggcggcaacgccgacgcggtggagttctgcccgcaccgccccttccgccacgtcctcgccgccgccacctacacgctgcaggagcagggcggggagcggcaggaccgcgcgggcagcgtgtcgctcttcgccgtcgacgtcggcgaggaggacgcgccccggaggctccggctgctccacacggtggagaccgccggggtgttcgacatgaagtggagccccgtggcgcctctgctcgcgcaggccgacgcccacggccgcctcgcgctctggcgcctggagcaggaggacggatcggacaaaggtgctgttctcagggatgtctgttctggagacatttcttcttcgatgtgcttgtttgtggactggaaccaaactgccaaggcactttccgttggattatcggatggttccctgtctgtggtttccatgagggaggaccgcttggaggtatcagaacagtggactgctcatcagtatgaagtgtggacttgctattttgatcgtgcaaatccacacttgttatacagcggatcagacgactgctccttcagctgctgggacttgcgacagaacccatcaaatgctgtgtttcagaacaaaaagtcgcataatatgggtgtctgttgcattgctcagaatccactagaggggaacatgctacttactggaagctatgatgaatttctcagagtttgggacataagatcaatggtgaaacccgttaatgtgaagtccctaaatttagggggtggtgtatggaggattaaatatcatcctcttattgcagatgttgtcttggctgcatgcatgcacaatgggtttgccattgttaaagtaggtactggggatgctgcagtagtggaaacatattgcaagcatgagtccttagcatatggtgcggattggcagataaatgaaggtgcagaacagaacaagaatttttcagttgttgctacctgttcattttatgatcgactcctccgtgtgtggcaaccggagaacctaggcaatctttaagagtgaaagtgccattgcactcagttcaagtatcactatgtggacttgtttccaggtagctcctcaaagttgtgctgatttatttaaagacatgagcttttggtagaatcatgtctgttccatagcttgtcattcacatatatttgtgtgatgccagctttcccgtcgcaaaactatatatttgtatggtcctcaaagatgtttcctgttgattatatttgaagtactccattttgtagattatattgacgctttaacaacaatctttacatc

SEQ ID NO: 21726 - DNA, 1867 bp, Oryza sativa
  ref <308>: DATABASE ACCESSION NUMBER: AK071976
  ref <309>: DATABASE ENTRY DATE: 2001-12-06
ttatgatgcccccaaaacgaagaagcctccgtcgaggacctgcaactgctggcctaaatggtgcatttgctgttgctgctttggtgacaggaagagcaagaagaaaactacgaaacctaaaacagagaagaagaaaagatctttcttcaagagagcagaaaatcaatcccctgcatatgcacttggtgaaattgaggagggtgctccaggagctgaaaatgaaaaggctggtattgtaaatcaacagaagctggaaaagaaatttggccaatcttctgtttttgtcgcatccacacttcttgagaatggtggaaccttgaaaagtgcgagtccagcatctcttctaaaggaagcaattcatgtcataagctgtgggtacgaagataagacagactgggggaaagagattggctggatctacggatcagttacagaagatattctaactggttttaggatgcactgccatggttggcggtcaatttactgcatacctaaactacctgcattcaaaggttctgcaccactcaatctttctgatcgtcttcaccaagttcttcggtgggctcttgggtctgttgaaatattcttcagcaaccattgccctctttggtatggatatggtggtggactaaaatgtttggaaagattttcctacattaattccatcgtgtatccttttacatccattccactcttggcttactgtacattgccagccatctgtttgctaactgggaagtttatcactccagagcttacgaatgttgccagtctctggttcatgtcactttttatctgcatttttgctactggcatcctggaaatgagatggagtggtgttggcattgatgattggtggagaaatgaacaattttgggtcattggaggggtctcttcgcacctctttgctttgttccagggacttttgaaggtcatagctggtatagatacgagtttcactgtgacatcaaaaggtggggacgatgaagagttctcagagctatatacattcaaatggactaccttgctgatacctccaaccactctactcttattgaacttcattggggttgttgctggtgtttcgaatgcaatcaataacgggtatgaatcatggggacccctcttcgggaagctcttctttgcattttgggtgatcgtccatctttacccattcctcaaaggtttggttggaaggcaaaacaggacgccaacaattgttattgtctggtccattcttctggcttcaatcttctcactcctctgggtccggattgatcctttcttagcaaagaatgatggtccacttctggaagagtgtggtttggattgcaactagggagttgggaactcccccatcggtgtgtgctgaaggaatacacacttggttctgtgtagatagaaacacgaaaggtgatgttttgcttttgtcccatggtggtagctcagcctcatatctgcaatatttgggcaaaccggaggctgcggcaaccttgtgaacttcggccaccaagtacagccaaactgcgtttgattgtccagcattatttattactgctttggtggtaaatttaattgggtgagctgaacagaaggtgttggcattgctgttcatgtacaaacttgtgtctcaataaggcaggcaggaatggatctgctatggagtagaaaggtgatgcacagtatttatgtagtgaaacgtgtgtgggtgcccattgaagggcttgttcattccttgtttctcttttttacttatctagaaccaaatggatcatttagtgttagtaatgtagtgcatccagtgttgtaaaggcgccctatttttggttggtaattgtaatcaatatatacttctgttgtcttg

SEQ ID NO: 21727 - DNA, 1652 bp, Oryza sativa
  ref <308>: DATABASE ACCESSION NUMBER: AK071977
  ref <309>: DATABASE ENTRY DATE: 2001-12-06
ggccgccgtcgccgttgccgtcgtcttcgtttcgcagctccaccacctccatggcggccgccgcctcctcctctctgctcgccgccgcctcgtcgtcctcccgcgcggcggccgtgtccgcccgccgcgcccccagcgcgagtccggccgcggcggcctccctcccctcgccgtctcgcgcctcctgcgctcctcccctccgcgcttccgcagcgaggaccctccgcagccgtgtcgtcgcgagcgcggcccccgctatgcagccgccgccggcgtcgagggtctccacggttgtcgacgtcgacctcggcgaccggagctacccgatctacatcggcgcaggccttctcgacgagcctgacctgctgcagaggcatgttcatgggaagagggttttggtggtgaccaacaccaccgtcgcgccgctctacctggagaaggtgacctgggcactcacgcacaacaacccgaatgtttctgtggagagcgtgatcctgcccgacggcgagaagtacaaggacatgggcacactgatgaaggttttcgacaaggcagtcgagtcccggctggaccggcggtgcacgtttgttgcgttgggaggtggcgttattggggacatgtgcggttttgcagctgctgcgttcctgcgtggtgtcaatttcatacagattcctactactctgatggcccaggtggattcatctgttggagggaagaccggcattaaccatccattggggaagaacttaattggggcgttctaccagccacagtgtgtactgatagacaccgagacactgaatacattgcctgacagggaactggcttcaggcatagctgaggtggtgaagtatggtctcataagagatgcaccgttctttgaatggcaagagaaaaacatgccagcattattagcaagagaaccaagtgctctggcctatgctattaagagatcgtgtgaaaacaaagctgaagtggttgctcaggacgagaaggaaagtggtctccgagcaacacttaatctcggccatacatttggccatgctatagaaacaggaactggttatggagcatggctccatggggaggctgttgcagctggaacagttatggcagctgacatgtctcaccgcctgggttggatagacgagtcaatcaagaaacgggcaattgacatactagagaaagcgaagcttccaattacacctcaagaggccatgacagtggagaagttcaaaagtattatggccgttgataagaaggttgctgatggattgctgaggctcatcctcctgaaaggacctctgggaagctgtgttttcactggcgattacgacaggaatgccctcgacgaaaccctccgtgcattctgcgactgctgattcttcctacttggatcttcagactgtatactaaataggctacattatcatttcagagaggagactgcattgtatatgtatgagatctttcccccttttttttttgtcggagtaataatggagaatgtggataggggttggtttctggttgtagcgcgtaaagactgatcaatcgtgatacagttgtccccattgacaagaagggtttactgcattttccttgctgttgccaattcttgcaccagatttaataaagctgtttctgttttt

SEQ ID NO: 21728 - DNA, 3251 bp, Oryza sativa
  ref <308>: DATABASE ACCESSION NUMBER: AK071978
  ref <309>: DATABASE ENTRY DATE: 2001-12-06
gggtggttgctgagagcctgatattgtgatgcgggtgtagatggcgaggcggtcctgcttcttcttcctcctcccgctcctggttgcggcgctcgcggggagcccggtggtcacggcccagcggaatgcgctgccggcggcggcggcggcggcggcgagcgtccgggtcggggtgatcctgaacttgacgtcggcggtcggggtgaggcggcgggtcggcatccagatggcggtggaggactactacgccgcgaactccgggtcggcgacgagggtggagctccatttcagggactcggccggggacgtcctccccgccgcttccgccgcggtggacctgatcaagaatgtgcaggtgcaggccatgatcgggccaccgagctcggcagcgaccgagttcgtcgcccacatcggcagccactcccgcgtccccgtgctgtcctactccgccacctcgccgtcgctgtcccccgcgcagacgccgttcttcgtgcgcgccgccgtcaacgactccttccaggccgcgcccgtcgccgccgtcctcgacgccttccgctggcgcgccgcggccgtcgtgtacgaggactcgccgtacgggagcggcatcctcccggcgctcgccgacgcgctgcagggcgccggcgccaagatcatggaccgcacggcggtgcccgtcgacgccaccgacgaccgcctcgacgcgctgctgtaccgcctcagggcgatgccgacgcgcgtgttcgtcgtgcacatgctccacaacgtcgccgggaggctgttccgccgcgcgaagatgctcggcatgatgtccgacggctacatctgggtggccaccgacggcgtcgccacgttcatggacaggttctccccggaggaggtcgacgcgatgcagggcgtggtcagcctccggccgtacgtgcaggagaccgacgccgtcaagaacttctcggcgcggttcaaggcgaggctacgccgggatcaccccaccgtcgacgatgtccgtgagccgaccgtcctgaggttctgggcgtacgacacggcgtgggcgatcgccgcggctggcggagtcggccggtgtcgccggcccggcgttccagacaccgcagacgagcgcgccactgacggacctggaccggctcggcgtgtcggccaccggcacggcgctcctcaacgccgtcctgagcacgacgttcgacgggctcgccggcaagttcaggctcgtcgacgggcagctccagccgccggcgtacgaggtcgtgaacatcatcggcaagggcgccaggacggtcgggttctggacgccggagttcgggatcacgcaagacctgaacgccggcagcgccaagacgctgaggcaaatcctctggcccggcgagccgcgcgacacgccgagaggctggaccgtgtcgccgagcgggctgccgctccgtgtcagcgtgccgacgaagcggggcttcacgcagttcgtcgacgtcggcaacgtcacggcgaccgggcggcgaaacatcaccggctactgcatcgacgtgttcgacgaggtcatgaagattatgccctatccggtgagctacgtgtacgacccttaccccgatagcccggaatcttacgagaagctcgtcgaccaggtgtcgtcacagaaggcagatgcggtggtgggggatgtgacgatcacggcgagcaggatggaggaggtggacttcacgatgccgttcacggagtcggggtggtcgatggtggtggcggtgcagaaggagacgagcacgagcatgtggatcttcctgcagccgctcaccaccagcctctggctcgccagcctcgccttcttctgcttcaccggcttcgtcgtctgggtgatcgaggcaccgcatcaacgaggagttccgcggcacgccatggcagcagttcggcctcatcttctacttctccttctccaccctcgtcttctcccacaaggagaagctggagagcaacctgtcgaggttcgtggtgatcatatgggtgttcgtggtgctgatactgacgtcgagctacacggcgaggcctgacgtcgatgctgaccgtccagaagctgcagccgacggtgaccgacgtgagggagctcctgaggcgaggcgactacatcgggttccaggaggggaccttcatcgtgccggtgctcgagaagatgggcttcgaggggaggatgaggagctacagcacggtggaccagtacgccgacgcgctgtccaaaggctcggcgaacggcggcgtcgccgccatcttcgacgagatcccctacctcaagctcttcctctcgcagtactgcaacggctacaccatggtcggaccaatctacaagaccgacggcttcgggttcgtgttcccgagagggtcgccgatggtggcggacgtgtcgcgggcgatcctgacgctggcggagggggagaagatggcgcagatcgagaagaagtggttcggcgagcccggcgcgtgccagagccagggcagcgccgtcggctcgtcgaacctcagcttccggagcttcggtgggctgttcctcatcaccggcgtggtcaccagcgccatgctcctcatctacctcgccgtcttcttctaccgcgagcgcgacgagctccgtgcggcggaggcggccgccgccgcctccggctccggctccggctccgggagccggtcgctgcggcggctgcgcgcgtgggcgcggcactacgaccagaaggacctcaagtccccgacgttcaagaggaggtggagcgacgagtccgtgaggaatggcagcgagtacgccgcgagccggacgccgaggtggggcgacgagagcccgtgcaacgtcgccggcgccgccgacgccgacgccggacggatcccggaggaagtcgtcggcggcatgagcccgttcaagcatctccacgagctcggaggagaggaacggcgccgtgtctccggcggcggcggagttcgataactcgtccgatcgggcagcggtggtggcgggaacatctcaaccgcggtagatgtacatgtgacatggcaagttctcccagtagacgtgtccggtaggatatgaacattgacaggtcaagtacaagtagtgtgcaaccgtctcctcgcctgtagatagatcctagtactactgtactactaccagtagatgagaaattcagcaacttgaccgatgaagcattggcagtggctttgtaaagtgtaatatggcaacaataatatgtgattaatgtagatgtattttgggaacc

SEQ ID NO: 21729 - DNA, 1604 bp, Oryza sativa
  ref <308>: DATABASE ACCESSION NUMBER: AK099221
  ref <309>: DATABASE ENTRY DATE: 2002-08-28
gcttttccttccgatctctctccctctctctcttcttcttcttcttccttccctctcaacccgacgacccacgcgaagcgaactctcgcgcgagacgagagtagtaaaccctagaaacctagaggagatccccaccaccaccatgacggtggatcagaggacgacggcgaaggcgatcatgccgccggtggagatgccgcccgtccagcccggaagaaaatgtggaggcgaggaaagtactggaaaccttgattccgtccaaccgataggaaaaagcgaccacggagatcacgcgatggacctacttcagttgcagagaccatcaagcggtgggccgagctcaacaatcagcaggagcttgatccacagggtccaaagaaggcaaggaaggcacctgcaaagggttcaaagaagggctgcatgaaggggaaaggaggaccggagaatacacgttgtgacttccgtggtgtgaggcaacgtacctggggcaagtgggttgctgaaattcgggagccgaatcagcaaagtagactctggttggggaccttcccaactgccgaagctgcagcttgtgcttatgacgaggcagccagagcaatgtatggtccaatggctcgcactaattttggccagcatcatgcccctgctgcttccgttcaggttgcactagcagctgtcaaatgtgctttacctggtggtggcttaacagcaagcaagtctagaacatccactcagggtgcatcagcagatgttcaagatgttttaactggtggcttatcagcatgcgagtccactacaacaacaattaataatcaatctgatgtcgtctctaccttacataagccagaagaggtttctgagatctctagtccactgagagctccaccagctgtcctggaagatggttctaatgaagacaaggctgaatcggttacctatgatgagaacattgtcagccagcagcgtgcccctcctgaagccgaggctagtaatggaagaggcgaggaggtctttgagcctctggaacctattgccagcctaccagaggaccaaggagattattgttttgatattgatgagatgctgagaatgatggaagctgaccctacgaacgagggtttgtggaaaggcgacaaggatggatcagacgccatcctggagcttggccaggatgaacctttctactacgaaggggttgatccaggcatgctggacaacttgctcaggtctgatgagccagcatggttattggcagatcctgcgatgttcatctccggtggcttcgaagatgactctcagttctttgagggcttgtgatttccccttggcggcagccggccatactaaaattttctggtgctttggtcggctagctcctgcacatcgccctcaggatcagcaagagaaacactggaccggattgggttcgttggtggaactggatgagcatctagtagctaaggaaaaaagatccttttatttagttctgtaggcaatggaactccttgagaactccgtttcagtgtttgttaatttgataacgcttgcttgtttgtgtgtgtatatcgatctcttttgaagcaatgagaaaaaaaaaaggactg

SEQ ID NO: 21730 - DNA, 1596 bp, Oryza sativa
  ref <308>: DATABASE ACCESSION NUMBER: AK071979
  ref <309>: DATABASE ENTRY DATE: 2001-12-06
gaaataatattcccaaaccctaaagccctcctccccttcccgtggcgattcgccggtccgtcccccaagtctagggtttatgttcgctttctccccacgcattcctcccacccgcggcgctccctgatctggtcaagcccaccagaatccgctctccagagttggtgggggcggagggggaagggaggggcggcggatgcagacggaggcgagagtggggatggccgccgcaacgatggacagcggcgccgccgccgcggccgctcggaggtactcgacgcagcagcagcagcagcagccgccgccgccgcagctgcaccaccaccagccgcagctcgggacggtgccccacctccttgccggcggcgtcgcgggcgccgtcagcaagacttgtaccgcgcctctcgcccgcctcactattctattccaggtgcaaggaatgcattcagatgtggctaccatgcggaagactagcatatggcgtgaggcatcccgcattgtctacgaagaaggcttccgagcattctggaaaggaaatcttgtaactattgcacaccggttaccttactcctcaattagcttttacacatatgagaggtacaagaacctgctacaaatgatacctgttcttgacaggaatggtggatttggtgcagatgttggtgttagattgataggtggtggtttgtctggaataacagcagcttcgatgacatatcccttggacttagtacggactcgtcttgctgctcagacgaacactgcttactacaggggcatatctcatgctctttacgccatctgcagagacgagggtgtcaaggggctctacaagggccttggtgccactttgctgggagtaggtcccagcatagcaataagcttctgtgtctatgagacattgcgatctcattggcaaatagagaggccatatgattcccctgttctgatcagtttggcttgtggaagtctttcaggaattgcatcctcaactattacatttccgttggatctagtaagacgccgcatgcagttggaaggcgcagctggaagggcccgtgtctaccaaactggactttttggaacatttgggcatatcgttcgcacagaaagtttaagaggattgtatagaggaattttgcccgagtactgcaaagtggtcccaagtgttggcattgtttttatgacgtatgagacgctgaagtccatcctcacggaactggcatcagatgattagctgtccaacatttgtcacgcttgacaattttgatgtttgggccagaataacacttgaggctgattagagcgagaaaaatgactttgtagcatatgttaggatctagatggtactaggtttttaagtttataatatcatggaatggaaggatattcatatggttacagattttcttgtagtgcatggtaaaagaagagccgctgccataggtcttcaaatttctgtccaccagttttagtgtatgttaacagtttcagttttgtaatggtacatgaggccattgtcttcagctctacaatactattgaaagatggcctccaagatgatctgtttatccatgttgtcctagtgagcttatt

SEQ ID NO: 21731 - DNA, 1986 bp, Oryza sativa
  ref <308>: DATABASE ACCESSION NUMBER: AK071980
  ref <309>: DATABASE ENTRY DATE: 2001-12-06
ggtttctcccacactccccacctccgtggctccgttcctcggtctcgctaccagccgcggccgccatacgcgcgccccacccaccaaagcgccacggccccggagcaacgagcaggatcagaacgccgagttcaatagctccgctgccgacgagccaccggagacgccctccatgcaccttgccgcctcgacctgctggttgccgcggcgctgcctgcgatctctgcccgaggctgggatggtaaagagatgagggatctagtggggaggaatagagtggaaggggctcatcatgcaccggaagatccttcgcggtgattcattatgagaggaattgacaagcgttagagccgcactcaccttcagtttttttattttgaagacggaaatatagtttcggcatcttcaccaaataaggctagataaacagagaagttctttgcattttatgcaaagatattccagccatcgattttatcagatggaatgagcagaactgtgaggacccaaatcagagcactccaggctcgagctgatgtatcatggcctgtactgggactcatgagtgccattatattccactgcaattccaggtattgctaaatgaggaaatcagtgccaagatgaatctaatccatttattatgatgagcaaattgaatctttgtcccaacctttcctctgagtgctggattgaactccatccacagcctgtcacaggaaaagtcagaatgaattcaatacctgctattagaagacgaggacatgccctccttggcctggatatgagccaattgttggtcttgagttctgcaatccactcttcgtctcacaatgaggaatcttgacttgaggagtacaaaaagttccacctctccaaattgctgtctcaaagcctcaaatttggctcaaagatgctaatgttaatttggatctgtagctgtggatcaactcatgttacacagcattcaaacagtagtaatgctttagtctaaaacttgcatcaactattagtctaaaggtctactagttgagtaaaaggctactcttgacatcctgtctgtaaatcctacagatagcacatgagcttttgaccaatgctaaacatgatatggtggtgttttcttcctaaatgcatcaggtgagtaccaataaacagaagtagaagctgaaatagtggttggtaataactgtagtgtgataatttcttaggattctaggttgcttcgtgctccttggagatagatgttaatgaggtatgaggagcgcctaaggcctaagcttaatacatacttaccaaatgcattttttcaatgtaaaaaatatgcttgcgttattatttgagcttttgaacaccaaattgttgaaaattagtacattactgaatgaaaagatatatagcgttaacgggtggtgatttaaatactttgataacggcgtagatagaaaacttgatccacccggtgaagaaccaagaaacaagtactcctgttctttaactttttcgctacatgtttataactatgctaatatgcataacttgctatggtgttcttagtttagtcagttaaattgttcatatctcaaaccccatgatttcttatgtacttattggtatgacagggtttaattcggctatgacatttgttactggggagcatggatgatatgctgggccgaagatgcaccggttcagcttgtactggagaacctgttgtgccaaggtttgaactgggatgtctggctggctgggttgctacggaaagagagttctgtgtatctatctgactacacgctagttgaggttgcaggaaatccgtctccaacgttgcaactacatgctgctctcaaataaccaagattgaaagagcatcacatggcatgttttttaggctgctttagctagattgtttagtgtactggaaatgcatttggaaatgtctgggaaagattgaaatcatatttatcagagactctacatattccg

SEQ ID NO: 21732 - DNA, 1743 bp, Oryza sativa
  ref <308>: DATABASE ACCESSION NUMBER: AK099222
  ref <309>: DATABASE ENTRY DATE: 2002-08-28
ggagatatattttcccctcggcggcgactcctcctccacctcgtgagctcgccttcggccgccgcctctgcgcctcgcagatccccacccgcgaccgagcgagctggtgccgcatcggtatcgcatcccgttcatcttctggctggacgaattcaattcacggacggtggtggtggtggtgttgactagggatttatttttttaccattggcggctcggctgcatccccaagtgaagaagagaattcgtacatgattccgctaaacaggagggcgagtcagactaggggtgggatggagtacttcgatgctaggcggaagcctcataatgttgggaaagttattgcagctctggtcctcacaacactatgtatatttattttgaagcaatctcctggttttggtggcagtagtgtgttttctcgccatgaacctggtgttactcatgtcttagtaacaggaggagctggctatattgggtcacatgcttcattacgcctgttaaaggacaattatcgagttaccattgtggacaatctttctagaggaaacatgggagcagtaaaggttctccaagagttgttcccccagccaggaagacttcagtttatctatgctgatcttggagatcaaaaaactgtcaacaagatctttgccgaaaatgcgtttgatgctgttatgcactttgctgctgttgcctatgtgggtgagagtacattggaaccccttaggtactatcacaatattacatcgaacaccttattgattttggaggctatggcgtctcatggagtcaagacccttatttactctagtacatgtgccacctatggagaaccagagaagatgcctattgtagaaaccacacgtcagttaccaattaatccctatggaaaagctaagaaaatggcggaggacatcatactagatttcacgaaggggagaaaggacatggctgtgatgattttaagatatttcaatgttattggatcagacccagagggaagactaggtgaagctcctagacctgaactacgagagcatggaaggatatccggggcatgctttgatgctgcgttaggaatcattccagggctgaaggttaaaggaacagattatcctacaactgatggaacctgcataagagactacattgatgtcacagatcttgttgatgctcatgtgaaagcactcaacaaggcagagccaagtaaagttggcatttacaatgttggcactggaagaggtcgttcagtcaaggagtttgtggatgcctgcaaaaaggcaactggagtcaacattaaaattgagtacctcagcaggaggccaggggactatgctgaagtatacggtgacccaacaaagatcaacacggagctcaactggactgctcaatataccgacctcaaggagagcctgtcagtcgcttggagatggcaaaagtcacatccacgcggatatgggtcaaactaaatatagcttgctgatcaataattctgctgaatcgtcgatatattgatttttttagttagtggtataggatcttggtgcgataccgcttccacagtcactcatttgttatttttttctctttttattttcaaaggtttgttgttattttctagcaaaaccataagcagtgatcttgatatgctggaaatcctggaagccttcctgtaagggcaaatttcattgttttttgacacaaattgctgataaaaagaagtgtacattgtctcttacc

SEQ ID NO: 21733 - DNA, 2124 bp, Oryza sativa
  ref <308>: DATABASE ACCESSION NUMBER: AK099223
  ref <309>: DATABASE ENTRY DATE: 2002-08-28
gattattaatcatagctaacaagtatatcctctcttcttcttcttcctcctcacaactcacaatatttcagagtagtatacctttcttgctagctagctagcttgttcatcgatcttgttttgaggtgttgagatagctaggatggtggtgaagaaggcggcgacgatggcggaggcggaagcggaggaggagatgatgatgaggatgatgtgtggttcaggaggcaacgagatgatgaagacgaagatgaagaagaagaatagagaaggggaagaagaagaagaagtaagtggaggaggtaggatgaggaaggggccatggacggagcaggaggacgtccaactggtatggttcgtgcgcttgttcggggaacgtcgttgggatttcttagcaaaggtctcaggtttgcgcggtggcgggtgacctagctacatgcactgcatgcctccctctctctctatatatatctccttcccatcaaacatccatccatccatcgactgcttctttttctttctttttttttctcttcttgattgttcttgttcttgttcttctttctctctctcttatcatgcaacacccacacatgcatatatccatccatccatctatccccttatcacatttaatttcttcttcatatataccaatttggcaacagctaatgattctttttttatttgaaactctgaatgaattgatttagatgcatgcatcaatacaaataattgatttctttttatctggagctctgaaattgatttagatatgcatattgataaaacaaaatttgatattcatctgaaactctgaattggttaagatgcctacacataaatgttccattttcagttgtggggatcgatgtgatggcttttacatatatgcatgcgtaaattaacatgcggtgttgcatgatcgaagttaattaatctagaggcggtcgatgatcgatggatgatacagtacttaactaggagatggaggcatgcatgcatgagcttagaacgcacgggaaactgaggtgttaaccatctgcttcttcttcttcttcttcttcctcctcctctggatggctgtctccctggcacatgttggccttggtggtttcacctttcaggtttgaagcgcacaggcaagagctgccgtctccggtgggtgaactacctccaccccggcctcaagcgcggccgcatcaccgccgacgaggagcgcctcatcctccacctccactcccagtggggcagccgctggtcccgcatcgcccgcagcctccccggccgcaccgacaacgagatcaagaacttctggcgaacccacatgcgcaagatcgcccaccacgccaagaagaagaccaattcaccatcgccggcgccgacgacctcctccggttccttgtcctcctcgctcaccacggcgacgacgacgatggcgacggctgcggcgctgcaagaaagcagcagctgcggcggcgacgacgaggccgtcgaccagctggtggcggcgtccaccacgccggcgagccagctgctgacgatggactacaccatggaccagctctggaacgacatcgcggcggcggaagccgatacgagctgctacgacgcggcggcgatggcctcgccgccgtcgccggtctgggaattctgcaccgactactcgctgtggaggatcgacgacgaggagtactacaagaagatgctcgatgcctcgcaatagtactactcaaattgcaaacaagcaacgccttaattcaattgctgctcttagcttaattagctgacgatcgatcgacgacgactctcatcatctgatgaacgaactgcgaaatctatatttgcactgcatatccttgcatctgtctactgtaattacacctgatgatgcacgtattatgcattgcttgtcagacaactctgctttatatatatctagctatagcttgatcaatcagcatgcctagcttgtgtacatgtaggggagagagtattagtagttaagactgatgggatcaagtgctatatgtatattgctttaatttcatggtatatgtactatgattgtactatgtgtcatatattcagtgtaagcagtggtttgcaattaacctgttctacctc

SEQ ID NO: 21734 - DNA, 3019 bp, Oryza sativa
  ref <308>: DATABASE ACCESSION NUMBER: AK071981
  ref <309>: DATABASE ENTRY DATE: 2001-12-06
gtctctccttctcctgcaagcttcctcctccccacccacccctcgctcctcgccgcgaggggcgagccatggcgccgccgctcgtctacctcagccccaccgaagacggcaccggtgcgagcactctcatgaaggcggccttctgcgggaacctgggaagcctcaaaggtgctatgcctataaagagacttgagattgagaaagtaaaggcccaggatgcagtcttagcttttaaaaatgatggaatcgggttgctgcacgctgcggcttgccagggccaactgaatgtttgcaagttcttggtggaggaattggggggtgacgtgaatattgctggagcacaaggtttaacaccgtttatggcagctgctgagtctgatgatgttcctactgtaaaatattttcttgatcatggtggtgatgtaacaaaagcagatgttagaggatgcacagttctccaccatgctgctggcacaggatgctgtaaggtaacagagttcttgctttcaaaaggaatacctgttgacatagactgtggccttggaacaccactcttgcatgctgctaacgatgacaaggataagacactgaagattttgttggatcacaaggcagatcctaacgtaattgtcaacaatggagcatgtagtctcctgatgagttcccttgtgtgccgttcattgaagtgcatgaagctactcataaaggctggtgctgatgttaatggcaagggagcacttgtgtctcccttgatgtttgctgcatcacaaggatgctatactaacttcattaagtttctcctgaaggctggagcaaaccctaatatacctgatgatttgggttggttgcctgtggagcatgctgcattacgtgattgcagggaagatgttgaaaggctatttccattgacttccccaattccaaatgtcccggagtggagtgtcaatggaataatctctcatgcgaaagtcaaagatataaggccaatgacaatagatcatgggccaaccacagttctgtacacaaacaggagcatttgtagattgctcatgggtgatggtgaagatgctcaatctgatggtaacagatcccgaatgatgcggcctaactgggaaaaagcttgttatcgttggagtgcaggtcacatgctactcaaggagtacaaacaactgtgggatgctctcatggatgcacaaaaattggatcctgggagcgttgaaattgagaaggaacaaagggaatatgatatccaagaaagtaaagatgttgtggagtcgaaggttggcctttatgataaacccactgcatcttatggggtcaaacctccaaatgtttcatctgttatgggaaaaacacaagtttttgtcaaacatccccatggaacgttatccctgcagattgatacatgcaaagatgtggtcttcttaaaagaagaggtagagaaaaggatgaggctggatgtttctggatccttcttcgtgtaccagatgagcacgttagaagcaggaataccattatcatcgtatggtataggaaaggattcaaatatatatatgtgtggtaggcttctcggtggacagaggtttcatggaagcagaagagttcatggtagaagaaagttccacggtcgaagaaaatttaaaacactatcacaatttttctaaaagcatgggcatgagttcctaagggaagttcaacttccggacaactcaagaactaaggaactcactgagttgggctgtttggttctctccagtttgatacacttatttacatcggtgtttgtagctggaaagacatggaatgggaacattgacatggatggtttgattgttgttcatgggagagtcagaatcaagaaaaagccatggaaaggcctcaactcaagcaagatgaacagtgactgcaccaagttgacttcgatgataagagaaatgtttgtcaaaaaaaatgttcatcctccgtacttgaagcaccttcttggaaagttagaagctttagctgtcgatgttttcacagtgcgtcagcagcttgcttttgactatcatatctctttgataccttctctgaaccgagtaaatttggtgtatcaaattaagagatgctatgatggctgggatgacagagagaaaatgtacttcagatttgttgcagacaattgcacagtcccagaagattggtgcaatactttgatgtctaagcatttgtttcgcctagtgattttggaaggacagaagaggaacatcatatacggctccaatggcatgagtgcatttcatttggtgagaaattacaatactcatgcaccagaacattcctggattcatgtgttcgtggattccaaaatagaacattaccaatggtttcaatgtgatagtggtattgagctaatggtcccaaaatatctaggagactttcttgcagaagctgtatttaagtttattgaagatgagtttgatttaactcatgtgttaaggacttgttttgctttggggtcctatgttactgactcattgtcagacagtagctccgatgaatcgtcgtcagagagcagctcgtatagtccctctcccaggaaaagaaagagaaggaattcagttagtcacagaaagagaaaatctcggaggtgttcaagttcttccagcagcagcatgtctgattatccacccaggaaaagaaagaaaagccattctaccaaaaaggaaagctccaaaaaatgtaaaattgagcactaaggtattccaacactgctacgacacaacttccatgaaggatctgaatgtaacagccatgacaagctgtcaagtccatttgatgggatgggtgcattctggaaaggatagttgtagaatcttttaggacttatagaagatatttctctccatgagcccatgtcatttttcagtgcacgcatttcagactttagtttaacaactgtctgtctctgaatttgaagaagacacatttcgacttcttcatgaaccaaagtattaacgtattattcagctttctgtctctg

SEQ ID NO: 21735 - DNA, 1894 bp, Oryza sativa; identical to SEQ ID NO: 17705
  ref <308>: DATABASE ACCESSION NUMBER: AK099224
  ref <309>: DATABASE ENTRY DATE: 2002-08-28

SEQ ID NO: 21736 - DNA, 1433 bp, Oryza sativa
  ref <308>: DATABASE ACCESSION NUMBER: AK099225
  ref <309>: DATABASE ENTRY DATE: 2002-08-28
gaccgccactcggcgccgccaccccgcaccaggtaagggaggaggagtaagaagatgtcgcacaggaagttcgagcacccgaggcacggatccctcggcttcctccagaggaagcgctcctcccgccaccgcggcaaggtgaagtcattccccaaggatgacgtcaacaaaccatgccacctcacctcctttgtcggttacaaggctggaatgacccacattgtgcgtgaggtcgagaagcctggttccaaactccacaagaaggagacctgtgaggctgttaccattattgagacacctcctattgtcgttgttggacttgtggcctatgtgaagactccacgtggcttacgcagtctcaactctgtctgggctcagcatcttagtgaagaagtaaggagaaggttctacaagaactggtgcaagagcaagaagaaggctttcaccaagtatgctctcaagtatgatagcgatgccggcaagaaggaaatccaaatgcagcttgagaagatgaagaagtatgcttctgttgtccgtgtgatcgtgcacactcagattaggaaaatgaagggcttgaagcagaagaaggctcacctcatggagatccagatcaatggtggtaccattgccgataaggtggactatggatacaagttctttgagaaggagatcccagttgatgctgtgttccagaaggacgagatgattgacatcattggtgtcaccaagggtaagggttatgaaggtgttgtcacgcgttggggtgtcactcgccttccccgcaagacccacaggggtctccgcaaggtcgcctgtatcggtgcctggcatcctgctagggtttcctatactgttgctcgcgctggtcagaatgggtaccaccaccgcactgagatgaataagaaggtttacaagatcggcaagtctggccaggaaagccatgctgcctgcactgaatttgacaggactgagaaggacatcactcccatgggtggcttccctcactacggtgttgtgaagggcgactacctcatgatcaagggttgctgtgttggccccaagaagagggtcgtcaccctccgccagtccctgctcaagcagacctctcgtttggcgctcgaggagatcaagctcaagttcatcgacacctcgtccaagttcgggcacggtcgcttccagaccaccgacgagaaacagaggttcttcggcaagctcaaggcttagtttgtgcggttcctcagcaaagtcagaatttgtcaaaacgatcatcactactctatacttggttctcttctcttgatattttctggggtattaagttttgtagcagatgtttcaggacctgttgatctatgaatttgtgctcccttctgctgtccctaccttaactctgttgaaccctatggattaaatctcgtaatgcggttttgctg

SEQ ID NO: 21737 - DNA, 1597 bp, Oryza sativa
  ref <308>: DATABASE ACCESSION NUMBER: AK071982
  ref <309>: DATABASE ENTRY DATE: 2001-12-06
gaaaggaaagacgaagaagaagaactgttggcacgtgtgcgctaccgaactcccgaagccgataagccgcccgcctcctctccttctcgtcgccgtcgccggcgccggctcagcgcctccgccctctccccccacgccgccgcctcccccttcaccctctacccccaccgcgggcgcctcccctcccactgccgccgcctcctcctgctcctcctcctccacgtcaccgacgccggagcttcttcgatccatggcaacggccatttccgtcggcgtcgcagtgccagccgccagcaggaggcgcgaggatggggcagggccgccgctgcttctgcggcggcggtgcctcgtggaaggacaagtgagatgtaggttaccatggttgagaccaatacggcacaatgttagagtgcagacatccaatgtaaatgttggagctggaagctatgaaggtggcgaagcaggtagccatggggaacatttggatagttctgctaccagagattcaaacaaaccaacaaaaccaccttcaggatctcgttaccctcaatccattgctgcagtgctacttctatgtgctctggcatccgcttttattgttttctttaaaggacaaccatctgcagttgtagcgatgcttgcaaagtcaggtttcacggcagcatttacactgatttttgtatctgagattggggataagacatttttcattgctgcacttcttgcgatgcaatatcagagagcattggttttacttgggtcaatggctgctctttccctaatgactattgtgagtgttataattggaaggatttttcagtctgtaccagcacaatttcaaacaacactacctataggagagtatgctgcgattgctctcctggcattttttggtttcaagtcaataaaagatgcatggcaacttccagataatgcaaatggaaaccttcagggaaactctgaatctggggagctggctgaggctgaggagcttgtcaaggagaaggtggctaaaaagttgactagtcctcttgaggtcctttggaagtctttcagccttgttttctttgcagaatggggagatcgctctatgctggctacaattgcgttaggtgctgctcagtctccttttggtgtcgcaagcggagccatagctggacacttggttgcaactttccttgcaattgttgggggagcattccttgccaactacctatctgagaagctggttggcctgataggaggagtactttttttgctgtttgctgttgccacattttttggtgtattctaatatctgaagaatttgtagcttgtaaaggattctgtaggtcaatttaatcctattttaaggttttaagggcaaaactgggccttgtccttgttgtttgtaactagtaggcattatcctccttttcaggagcgattcctttactattggaaaacaaattgacgtgaacacaatcaacacacacgcaagctgagctgcagcacgcaaactatcagctatatgccctagagagacgaattgtatcatatactatagagtatatactatgtttataatgaaatgaataaagtattattctgttttgtg

SEQ ID NO: 21738 - DNA, 1535 bp, Oryza sativa
  ref <308>: DATABASE ACCESSION NUMBER: AK071983
  ref <309>: DATABASE ENTRY DATE: 2001-12-06
gctccccgcgtctcaacccaccggaaatccattcaaaagcacccgcgctcccgcaccaatccaccgcacgccatggcgtcgcgagcggcggccgcgatggtgctcgccggtgcccttcctgtgtttcccggccgtcccctggtcgcagccggcgccaggtgctgcgacggcggcattcgcgggagggtctcctgctcctcccaccgtcgctcggaccatccctcctgcgcggctgaggagggaggagtggtggagctgctcaagggcgcggtcgcggcgctcgccgtcatcgcccagatttccgtgtcgctcccggcgtacgcgatcctctactcgccggacacgaacgtgccgaggacgggggagctggcgctgaggagggccatccccgcgaacccaaacatgaagaccatacaggaatcgctggaggacatttcgtatttgctgaggataccgcagaggaagccgtatggctccatggaaggagacgtaaaaaaggccatgaagatagcaatggacaacaaggatgcgatcttggcaagtatacctgtagaactcaaggaaaagggctcgaagttatatacctccttgcttgaagagaagggtggtttgcaaactctcttgaaatatataaaggaaaatgatcctgacagactttcggttgcacttgcttcttctcttgatactgttgctgaattggagctgttacaggctccaggtttatccttcctcttacaacaacaatatttggaatatccaaggctagcaggaagaggagttgttgaattctcagtggagaaaggtgatggttcaacattctttccaactgctggtggtgaaccaaaaagtgttgctacaattcaggtagtgattgatggatattctgccccactgactgctggaaactttgcgaaattggtgttggatggggcatatgatgggataaaactgaaatgtgcaagtcaggcaattattgcagacaacgagaatggaaagaaaggttacactgttccattagaggtcatgcctgctgggcagtttgaaccgttatacagaactccgctaagtattcaggatggagaattgccagtccttccgatgtctgtatatggtgccgttgctatggcccatagtgtggattctgatgaatactcgtcaccaagccaattcttcttctatctgtatgacaagagaaattctggtttaggaggaatatcttttgatgaagggcaattctcagtattcgggtataccacagatggaagagaagttctgtcgcagattaaaactggagataattcgttctgccaagcttgtacaaggtagagagcgccttgtactgcctccagaagcgccggcagagagctgatacaacggcaagcttcgcaaactggaaacattctttcattggtcaggagacttagcatattttataccataaatcatgtaaacctgactgagcagttcatcaaatttatatatagaatcactgcaaatgttcatcaaatttatatatagaatcactgcaaatttgc

SEQ ID NO: 21739 - DNA, 2064 bp, Oryza sativa
  ref <308>: DATABASE ACCESSION NUMBER: AK071984
  ref <309>: DATABASE ENTRY DATE: 2001-12-06
gattaccacataccatacctatggattcatccattcttcctgctctgctgattgccctgttcatacccatcctcctccaccttgtcacccgattcaagtactcatcctacaatctccctccaggctcacttggcttcccattcgttggccagagcatctccttcctccgggcccttcgcagtaacactgatcaccaatggtaccaaggcaggatcggcaagtatggtcctgtgtccaagatgtggctgtttggctcacctgcagtcctgatggccggacctgcagccaaccgcttcatattcagcaacaaggacctgctcttcacggggacaaggtcgatgaacctccttagcggccggaatatactgatgctctcaggcgaggagctgaagcaagtccgtggcgcactgcagaatttcttaagcccagaaatggtaatcaggtatgtctctaagatggatgaggaagtcaggaggcatgttaaggtgaattgggttggacacaagactgtcaaggttcttcctttggcaaagaggctcacattggacatcatctgctcggtcatcttcggacaagaggcaggttctgtcagagaagcccttgccaccgacttcccggcgatggtgagggctgcgctgtcgattccagtgaagatacctttcaccaggttcagcaggggcctgagtgcgagccaaaggatcaggaagttgctcagggggatcgctcgtgagagagagacgctcttgcagcagcagcaggctcatggcgcttcagcagctgacgatttcttcacatacatgctcgccttgcgtgctgaaggtgcgcactcgctcacggtcgaggacatcgtggacaacgcgatcttccttctgatcgcaggctatgagacgacatctgttctaatcacattcatgctctggcacctggacaaggagccagaagtcctttccaagataactgaggagcaagatgagattgccaggaacaagggacctgaggatgctctaacctgggatgatgtttcaaggatgaagtacacatggaaggtggcaatggagacagtgcgaacaatccctccaatttttgggagcttcagaacagctaccagagacatcgaataccagggctatcacattccaaaaggttggatggtaagtaatttttgggagaataagtcatgtattctctccgttttttcatgtttgacgtaattaacatgtttacataaatttgactatccattttgttaaaaaaaagtataattatcattctgattgattttatcaatataagtacttttaagcatgacttatattttttatatttacataatttttaaataagatgaataataaatatacgtttaaaagttaacgatgtcaaacacaaaaattcgaagggagaatatggctagacattttgctcttccctgtatattcctttgggtgtctcagtgacatgccaatctgaaccagtgtactcgttgcctcctttgtcttctaatactgatcttctgtgactcaccaggtattcacagcccaatctgttacacatttggatgcaaatattttccctgagccaagcaatttcgaccctgctcgattcgagaacaactcttcgattcctccttattgctttgtgccatttgggggaggtccaagaatgtgtcctggaaacgagtttgcaaggactgagacattggtgaccatgcactccttggtgacacagttcaggtggaagctgtgctgcaaggaagaaagctacaagaaagatccgtctccgacgcctcttcttggactcccagttgaactggagccgagatgcctccctgaaaatgctcatgcttaaaaattgcttcatgtccgtgcattttgagtttatgctatttgcagttagccagagagaatcatggagtaatgcagtacaaatccaagaactgacaagaattcaagtccaaattcaatccttagattgagaaaaacaaaagcaaatctatatgaacaatatagacactatctatattcggattctccaacttttgttatacatatgtagattaaattt

SEQ ID NO: 21740 - DNA, 2037 bp, Oryza sativa
  ref <308>: DATABASE ACCESSION NUMBER: AK099226
  ref <309>: DATABASE ENTRY DATE: 2002-08-28
gcagcggaggaacccggagctcagggggcagccgaccgccgtggtgcagtacaacgactggaaaggcggcgggctgattgccgtcagctacgaggcccggaagttcggcgtgaagaggtccatgcgtggtgatgaggccaagatggtctgtccaagtatcaatttggttcaggttccggtggcccgtgacaaggccgatcttaatgtttaccgtagtgctggctctgaggttgtcacaatcctctcgaccaaggggaagtgtgagcgagcatccatcgacgaagtttatcttgaccttactgatgcagccaaggaaatgcttttagaatctccaccggagttattggagttgatttttgaggaggccacaaagtcaaatatcctgggccttccttctgatgtcagcaacagagaagatagcgtgagggcatggctttgtcgagccgatgctgattaccaggataagttactatcttgtggggctataattgttgcgcaattacgggtcaaggttttggaggaaacccaattcacatgttctgctggtattgctcacaataagatgttagcaaaacttgtcagtgggatgcacaaacctgctcagcagacagttgttccatcatcagcagttcaagattttctagtatcactgcccataaagaagatgaagcaacttggtggtaagcttgggagttccttgcaggatgaccttggggtcaatactgttggtgatcttctaagttttacagaggacaaattacaagagtactatggagtaaatacagggacgtggttatggaagattgcaagaggtattagtggagaagaagttgaggatcgtcttctaccaaagagccatgggtgtggaaagacatttcctggcccaaaagcattaaagaataatgcttctgttaagacatggctggatcgactttgtgaagaactgagcgaacggattcagtctgatttgaaccagaataagagaattgctcaaacactaactctctatgccagggcatgtaagaaaaacaagtctgattcaatcaagaaatttccttccaaatcttgtccgttgcgttatgggactgtcaaaattcaagaagatgcaatgaagctatttgaatctgggcttcatgatttcttgggttctcagaacacaaaatggagcataacatctctttctgtttcagcaagcaaaatattcgacataccaattggaacaagctctatcttgagatacattaaaggaccaaattccactgtttcaccagctaacctcgattgttcttctttacctgaggatccatctcttggtaacaagttatatatagcacctaatcatgaagaacactgtgaaccatcattatctgagaaagaagactatggaaacaatagtaatttagccaaacagtgtcaaataaaggaagaaaaaaaggtgtcaaagaagttaactgaagttaagggaacttgctctattctgaaatttctttcacaaagtcctgtactcagtgagaaaagaaaaattgacagcttaatttgcagtcatccaggtcctgaaagttcttcagaaccgaataaagctgaagaacacaaggctgcgcagtatgttgataggaacaagtttaacactgctgggagtaactctgccagcagtagcacatggatgttcaacgttgaagatatcgatccagccgtagtggaagaactgccgccggaaatacaaagagaaatacatggatggattcgcccgccaaagcaatcaagctcaaagacacggggttctaccatttcgtcttacttccaacctgcaaagaggtcaggataggtagaccatgagatgcatatttctaacatgttgattcgtctcctggcatgacctctcccctgtagattgtaggagcatcagcttgatgcgccaacaaatgggcgtcaactgaaagaccagcaaaatgccaaagtgttcgcccttgtgaatagtatttgcattgtaaatttaattgacagtggaactaacaaatactattagtactaaaattt

SEQ ID NO: 21741 - DNA, 1936 bp, Oryza sativa
  ref <308>: DATABASE ACCESSION NUMBER: AK071985
  ref <309>: DATABASE ENTRY DATE: 2001-12-06
gagtagcacctccttccccaagaatcgcgcgcgcgcgcctgcctcgtcgccggcggccatggcgctcctcctccgccactctcccaagttgcgaagagcgcatgctatcctcggatgcgagcgtgggactgttgttcgtcacttctcatccagcacttgctcctctcttgtaaaggaagatactgtatcaagttccaaccttcatccagagtatgcaaaaaaaattggaggatcagatttttcccatgacaggcagtctggaaaagagcttcagaatttcaaggtctcaccgcaagaagcaagtagagcctccaatttcatgagagcatccaaatatggaatgccaattactgctaatggggtacatagtttgttctcatgtgggcaggtagtaccgtctaggtgtttttcaagtggagcagatttgcctccacatcaggaaatcggaatgccttcactctcccctaccatgactgagggaaacattgcaaggtgggtgaagaaagaaggagataaagtctcacctggtgaagatctttgtgaagtagagactgataaagcgacagtggagatggaatgcatggaggaaggctaccttgctaaaattatccatggagatggtgccaaagaaattaaagttggtgagattattgccgtaaccgtggaagaagaggaagacatcggcaaatttaaggattataaggctccatcatctgctgaatctgcagctccagccgaatcgaagccccaatctgagcccacagaaccaaaaaaggagaaagagcagcccaaggctcctgagccaaaggctacaaagacagaagaatcttttctttcagaggatcgcacattctccagtccaattgcaaggaaattggcagaagacaacaatgtaccactgtcaagcataaaaggtactggccccgatgggcgaattttgaaggcagatattgaggattacttggcttctgtggccaagggtgccaagaaggaaacagcagcagctcctggactaggctatgtggatcttcctaatacgcaaataaggaaggttactgcaaaccgcctgctgcactccaagcaaaccattcctcactactatctgacagttgatactcgtgttgacaaacttattaagttgcgaagtgagttgaatcctctgcaggatacctctggtggcaagaagatatccataaatgatcttgttatcaaggccgcagcattggctcttcgtaatgttcctgagtgtaatagctcttggatgaatgattttattcgccaataccacaatgtgaacatcaatgttgctgtacaaactgaggatggcttgtttgttcccgtaataagggatgctgacaagaagggcctagccactatcgctgatgaggtgaagcaactggctcagagagcaagggacaacagccttaagccagaggattatgagggtggcactttcactgtgtcaaacttgggaggcccttttggaattaagcaattctgtgccatcgtaaatcctccacaatcagcaattttggctattggctcagctgagaagagggtgatccctggagctgagggtcagtttgaagttggttcgtttatgtcagcaacattgagctgcgaccaccgggtcattgacggtgccattggtgcagaatggatgaaggcgttcaagggctacatcgagaatccaacgaccatgttgctgtaaatgaggatgacggggagagttattttttgtaggttttcacaaataaggctcacaataacggtgtcttcgttcttttcattgttttacactgtataacctcggcacggccccatgaggtcttgaaaccaaagagcaaacatacataggagtcagcacagcatcccttgtcatctctgtaaatgcatttttatcctgagctaaatcacaatttacagcgcgtagtgg

SEQ ID NO: 21742 - DNA, 2007 bp, Oryza sativa
  ref <308>: DATABASE ACCESSION NUMBER: AK071986
  ref <309>: DATABASE ENTRY DATE: 2001-12-06
tccaaggccattggatggtgacgaggaaccaactaaggttttggaggcatatccattgaactgccacccgaggtacttccggctgacaacccatgcaattccagcatcccagtcgttggtctcaaggtggcatctgcctcttggggctgtggtacatcctctcgcagaatcacctgatggggaggttccggttatcaactttgggtcagctggtgtcatccgttgccgaagatgtagaacatatataaacccttacgcaacattcgcggatgctggaaggaaatggcgctgcaatctttgcacgctgctcaatgatgttcctggagagtatttttgtggcattgatggtagcggcagaagatatgatgcagatcaaagacctgagctttctaagggaacagtagagtttgttgctcccactgaatatatggtgcggccaccaatgccaccctcctatttctttcttattgatgtgtccgtatctgcagttcgaagcgggctgcttgaggttgttgcaaagaccatcaaatcatgccttgatgacctcccagggtttccacgaacacagattggattcttaacttttgatagcacattgcactttcataatttcaagtcgtctttgtcacaacctcaaatgatggtggtcgctgatttggatgatgttttcctgccgttgcctgatgacctcttggttaatttggttgactctagacatgttgtcgattcatttctcgatagcttgccaaatatgttccaggacaatgtaaatgtagaatctgctcttggtccagcacttaaagcagcattcatggttatgagtcaaattggagggaagttacttgtattccagagcacattaccatctcttggtgttggtcgcttgagacttcgaggagatgatgtccgtgcatatggaacagataaggagcattctctcagagtcccagaagatcctttttataaacagatggctgctgagttcacgaaaaatcaaattgcagtggacatattttctttcagtgataaatactgtgatatagcttctttaggttctctggcgaaatacactggtggtcaggtgtaccattatccatccttccaggcagttactcatggggataaactcaaacatgagcttagcagagaccttacacgggaaactgcatgggaatctgttatgcgtatcagatgtggaaaaggggtgcgcttcacaacttatcatggccatttcatgctaaggtccaccgacttattagcacttccagctgttgactctgataaagcatttgcaatgcaactttctttagaggagaccctaatgaccacacagactgtatatttccaagtggcattgctatatacatcctcttctggtgaaaggcgtatcagggtgcatacagcagctgcacctgtggtcacagatcttggtgaaatgtatcgtcaagcagatactggtgccattgtgtcattgttgagtagaatcgctgttgaaaattcactgtctgataagctggacagtgttcggcaacaattacaattaaagcttgtgagaagtttgaaggaataccggaacctatatgttgtacagcaccggataggagggagacttatatatccagaatctttaagattcttgccgttgtacattctgtccatatgcaagtctcttgctcttcgtggtggttacgcagatgtttctcttgatgaacgttgtgctgctggtttcagcatgatgatactgcctgcaaaaaagctgctcaattttatttatccttcattgtacagggttgatgaagtattgtcaatggaaccagataggatcggtggatccttgaagcggttgccactaaccatgcagtgcttagacactggtggtctttaccttcttgatgatgggtttaccttcctagtatggttaggtaggatgctcccacctgaacttgtgaacaacattcttggagtcagcttggcaaacttccccgatctatcaaaggttcaattgag

SEQ ID NO: 21743 - DNA, 1857 bp, Oryza sativa
  ref <308>: DATABASE ACCESSION NUMBER: AK071987
  ref <309>: DATABASE ENTRY DATE: 2001-12-06
ggctaatctcttcactcccaccactactactccagcacaaaaaacctcgtctcctcctcctcctctctctcgagctcatctccattttcaaatctctctttgcttgctcgaggtgagccatggcggagctgccgctggcggcggggctgctcgacctgcgcccctgcaagctcgcccctccccctcccccgcccctccccgtctccccctcccctcgccaccaccgccgcccccactccaccgccaccgcgtgccgcgccgcccccgacctccactcctccaccgagctcgccgacgggagcatcgtcttccgcttcgcgcgcccccgggacgacgacgacgaggagcagcagcagcggcgggcggacgccgtggctcccggggccgcggccgtcttcaaatcatggctcgacggtgacgccgccgcagctgctgaacctgaggcccgggatggcggtggagaaggggaggtgacggcgacggcgacgggtttgggcgcggaggaggtggtggcgagtggaggagcggaggcgacggcgacctccggtttggaggatgcgggggaggaggcctcggatggctccaccgcgcgggattccgacaccgacgtctacaccgagtccagcgcctccaccgtcgccgacgacgaccagcccgccgagtttgccgtcccgccgccacggcggaaagaagtttgtaacaaggtagattgggaaaaggacacttcagaggtgaagaatactgataggatggttccagtagcctcatcaacgcttgtgttggcatcaggtgctgcgatcttgcctcatccttctaaggcagcaacaggtggagaagatgcatattttattgcgtgtgatggctggtttggtgtggctgatggagttggccagtggtcatttgaaggtatcaatgcagggctttatgcaagggagctaatggatggttgtaaaaagttcattatggagaatcaaggcgctgcagatattaaacccgaacaagttctttccaaggctgcagatgaagcgcactctcctggttcttccactgttttggttgctcactttgatggccagttcctcaatgcatcgaatattggagactctggatttctggtgataagaaatggagaggtgtaccaaaaatcaaaaccaatggtttatggtttcaactttccactgcaaattgagaagggcgataatcccctgaaacttgtacagaattatacaattgagctggaggatggtgatgtcattgtaacagcaagtgatggtctttttgacaatgtgtatgagcaagaagtagccaccatggtctcgaaatctttacaagccgatctcaaaccaacggagattgctgaacacctggctgccaaggcgcaggaagttggtagatctgcagccggaagtaccccattctcagatgccgctcttgcagtggggtacctgggtttcagcgggggcaaactcgatgacatagccgtcgtcgtgtccattgtcaggaaatctgaaatctaaattgtaaaagacatccatgatccatgatgtccccctctcaagtttggttgaagctgcactcctagcctcctagcaaggtgcaccacactcatcaatatattgtacaaccagaagtgcagctgctgaaaaagactatctgtgagcgaggagcaagaggccattaacctgtgtaagtatctttgagccgaattgctcgcggtttttgggctaatttagcgttggaaagtaatattgtgatccttggttcgagttgtaaaccggtggaagaaatctgccgtgtgtgtgagagacaaccgtgcataggaaaggaacatacattgattatgtgacatgaactggt

SEQ ID NO: 21744 - DNA, 1542 bp, Oryza sativa
  ref <308>: DATABASE ACCESSION NUMBER: AK071988
  ref <309>: DATABASE ENTRY DATE: 2001-12-06
gtggaaaagcgtatttcccttttttctttttcctatcccaattgggcatttggtaaacggagttcgcttccctccaaaatgtcatccacttccatgtcagtccgttctccggcgtccttccccttccccacggcagccggagcccgcggccgcgtcggctcggcgcagccggtgggccccaagctcctctcctcgccacttccgccggcggccacgcccgcggtgcctcgccggctcctcttcccggtggctgccggcatttgggacttcctttccggtggcggagcaggcggcgcggctgccgcgtcgctcgccgtccggggaggcatgcagctcttcaggcagggagatgtagctggctcagtagcagagttcgatcgggcaattgagctcgatcagcggcagaagaaatgtatgtatttgtaacacttcaaagttcagatttcagagtgtgagtcagcaatgtacaactggctgcaattgtgctttgtttcagatctctggcaaagggggctttcactctactacctggacaggtgcattatcatgatagtaactaggttcatagattctggaaactgaaccaaataatttcaagccatggactgaaattaaaccatgtgtaaccatctcttttatccttggtttaattgatcgaaattctgggataggttcgaagaaggtgcagaacagttcaggctggatgttgctgccaacccgaatgacactgaggagtcgatatggtgctttctctgtgaagctcagctgtatggggtagacgaagcaaggaagcgcttcctggaggttggtttagactcaaggtctgtaatgcgagaagcttatgcactgttcaaagatggtggggaccctgaaaaggttgtttgatttgatgataaatgaacatatctcacctgttcttacaaatttctgataaacatttacgctagttttctttttcatcttcagttggcttcaaatttctctagtggttctgaaggtgaaattttctattcatcattatacactggactttactatgaatctcagaaggatgcagagttggcaaagtcccacattgttgctgcatgcaggtcaccatatggatcaaggtccggtgattacatggcttcacttgcactagttcattgtcaatgccgcaactggactctggagtgacagaagtattatacaaacaagtggacctaaacattcttgttgaagccaacagataggaagcatcttgggtatgttcttcccatggctcactgtatttaactggacttcttggtctcaaatttttgtagatttggtaaatagcacattgccactcacagtcaatgacgtaacggctcttatgtgtctatgacatgtagatccagtaacaaatcctaaattgtcatttgtaagagtggcaattagttaaatatctcgcgtgatctggactcttcctcttctttttttcccttttaacgagactgaaatggctgatcaaacacggtggaagcattttaaagattcaacctctgagaaagatgagaaacg

SEQ ID NO: 21745 - DNA, 1272 bp, Oryza sativa
  ref <308>: DATABASE ACCESSION NUMBER: AK071989
  ref <309>: DATABASE ENTRY DATE: 2001-12-06
gtcccgccacacctcgcagttcgtagcagcgaataagcgagctccatttgattctttgattacaatggagtccaccaaggtctcggcgatgctcctgctcgccatgctcgcgctctcctcctccccgctcgccctcgcgtgcggctcgtgcggctccggcggtagcggcagtgcaccgtcgggcggcggcggcagcgcgccctcgggtggtggtggtggtatcggaggagtcgtcggaggaatcgtcgggggtgtcgctcccgtcgtcggaggaatcgtcggcaaagttcctcctgtcgtaggaggagttgtcgggggagtagctccggtcgtcggtggaatcgtcgggaaagttcctccggttgtaggaggagttgtcgggggagtagctccggtcgtcggtggaatcgtcgggaaagtccctcccgtcgtcggcggtgtcgtcggaggtgtcgccccggtcgtcggtggagtcgtcggtggcgtcgccccggtcgtcggaggtgtcgcccccgttgtcggtggcgtcgtcggaggcatcgccccggttgtcggaggaatcatcggcggcggcagcggcggcggcggctacagcccgagcccgagcccgccgaagcgacacggcgggaggaaggcgtgcccgccatcgccgacgccgacgccgtccaccccgacgccgtcgtcctcggacacgtgccccatcgacgcgctcaagctcggcgtgtgcgtggacctcctcggcaacgaggtgcacatcggcgacgcccacgtgacgtgctgcccgctggtgaaggacatcgccggcctgtccgccgccgcctgcctctgcaccgccatcaaggccaaggtgctcgacatcagcatctacatccccatcgcgctcaagctcctcgtcaactgcggctgcgacgtcccgcctggctacacctgcgcctaagccatcctcatgcacgtcacgtcccaaaccatgcacgtcacgtcccaagccatgcacgcattcattattctctctcgagtacacagtttagcttcaatcaaattaaggtcggtcgttaatttggtcaaatcggtcgggtgatgaagccactcgcttctgggatgttcaattattcagtgaacttcttttttattggatttgcttttcttgttttgcaatgttaatttgtacatgtagtggctccggaaattgtcatcaattgtactgtatgcatgtattgtaaaactatttaatttagttcccagatgtaactcttgtttgcaatgttttgtgcc

SEQ ID NO: 21746 - DNA, 2076 bp, Oryza sativa
  ref <308>: DATABASE ACCESSION NUMBER: AK099227
  ref <309>: DATABASE ENTRY DATE: 2002-08-28
ggagggagagagagtagaggaaggaaacctccctccggatccaggaaatcctcatccatcctcatgacttccgacgagctcgccggtgagggtgaggtcgacggcgcggagctgatcctgtcgctgccggaggacgtgctcgggctcatctccgcccacctccgcccgcgcgacctcctcgccctctccgccgcctcccgcagcctccgcaacgccgtctccaccgccgacaaggcgtggctcgcccagtgccgccgcctcctccccaccgcctcccacctcctcgcctggcgcaccgccctcgcccactcctccctcgccgtctgccgcttcctccactccgccgccccgctcctcggcctctgggcccaccagaaccccgagctcggcaacctcgtcctcgccctccctggcttcctctccctcgtcgccgtccgctccatcccccaggagctctccccgcgcctcctctgggcccccgtcttcgagctcctcgccgaccaccgcggccaccccgccttcctcttcctccacggcgccgcccacgactccctcttccccggcctcctctcctcctccctccaccccctcgccaacaccctcttcctcgaggcccacacctccacctccacctcccacttctcccgcctcgccttcgccgaccgccgccgcctcctcaacgccctcgtcgccgcctcccgcctcaccctcccccccgatgtcgccactgccccgctcttcgcgcgctccgacgccgacctcccgctgctcgccgcgcgccgggaggccatgctgcgcctgcacagccagtctggcgggggcatggtgcgcagggccgagatcgaggcgctgctgatcggggccaggaagacggcggcgctgccggccgacaccgccggcgacaagatgcggctgcggaggaccttctcggtggtcgccggttttgtcaggaacagcctgcggcagatggtgacacggtcggcgtccgccaattccagggctgagtacgcccaccccaagcatctgccattggacgagttcctgcgagccggagagagcgtcggcctgagcctccgtggcgcgcggatgaggctgtctatctaccggaattggccaagcatgcatgacaaccggtttgtgctctacaagctgacgacgcaggcgcccatgcctggccgggagtatgccggtttgtggggaggctcattcgggtggccgccagggcggccggaggatgagcgcaaacctggcaaggctctcttcttcctactcctctcctatgaggaggacagcgaagggaagcttcagctgattgcaaccaaggtgttggagggtacacactatgtcgtgcatccgaatgggtcatctatgtttatcgtgcgggtcggtgagccatccactgagacttttccgtggcaaaccgatgaggagccgcgtgctgtggagatcaatagaagctttgctggtgagggcattgccaccgggtatgggttcaggtatcctggctcaaagcccggatcgctctttgtcctcctggatggccggcttgcatttgtttggagagagaacaaagctgttctcaccttgcaaaggctggacctggaggatatgataaggagaggggagcgtgtgccttcattgccgccgatacccaacttcgcctacctcacaaagtcttactccaatgtctttgctgtggcacctggcagcacgagcttcccagcttctccaaggtaaaagatggcttgggaaccgttatgatggtatcacctgatacagaggcaacagcgacagatctttgcgggatcatgttctactgtgcttccttgccatacgtcttgtactgaagatctgaatcccacatttttcaccctgaacctgaaggttggccatcaccgtacgttgatctgagttgatgtaccgctgctgctgctgttaatggaagcagcatggcagcagtgttaatatggtatatattggtaccctgaaggaaatgcagccaactccatctgtatttcccttgttactgaactggcatcttcatgcctgcagtaaactaaaatgtcaaaatttagc

SEQ ID NO: 21747 - DNA, 1613 bp, Oryza sativa
  ref <308>: DATABASE ACCESSION NUMBER: AK071990
  ref <309>: DATABASE ENTRY DATE: 2001-12-06
gaggagattaatcacctcccgagtcccgatccgcgaattcttctccccaattccaacccaaaatccccaaaatccagcggtgcaggaggagaattccacgaggcgagtcggcttctagggtttggtgcgctcccgattgttgcggccatgaggatacgggagctgcgggatggcgccgggggatcggaggaggcggaggaggacgagcgggaggaggcgaggggcgggggcgggggcggaggcgggggcgaggtggtcgccgtcgtgcggctgagggcgaagcgcgcgctcgtcggcgccggcgcgagggtgctgttctacccgacgctgctctacaacgtcctccgcaaccggttcgagtctgagttccggtggtgggatcgcatcgaccagtatgttttgctaggtgctgtccctttctctagtgatgtaccgcatctcaagcaacttggagtaaggggcgttgtcacactgaatgaatcgtatgaaactctggttccaacatccttataccaggctcacgggatcaatcatctcgagattcccacgagggactatctatttgccccttctctagaggatatctgtcaagctgtcgattttattcactgaaatgcatcacaaggtggtagcacttatgtacattgtaaggctggaaggggacgaagcaccactatagttttatgctatttgattaagtacaggaacatgactcctgaagctgctttagatcatgcacggtctgtaaggcccagagtacttttagcaccatctcaatggcaggctgttaaattatttagcaatctcaacaccagatgcctttcaatcgagaactcaaaccaaactcactcggcaaaatcttgtgaagaatcgagtgaaccatttagtcgcctcgcttccagctgccatcaaattcagagttcaaaccgcacccacccagtaagattcagggaacaatcaagtgaagctattgtggaggctgaagttgatgggttcaccaccgaatttgacaacgagcattttgttttgccgttatgggaaggtatgctagccaagccttcaagccccagcaggtccatcgatgcagtcgtagtaacagaggaagatctcgagggatacgaaacttatgccgatgctagcagtgacactgtatcagtggaagtggtaatccgtcagaagcccatgattaggaggctatcctgcttccttgggtcgttgaagcttaccagcaattgcgaaccatctcctccaagacgtcttgcggaggttcgtgcctgctaggtaaatgtccaaattttactgctttttccacgttgttagtcagcagagtgtaagtatcggcatgcatgatgctccacagcttgagggaatgccctccggagaaatttatactccttcatatgttgttgtactagtgtctgcgatgtacccgagagagagagagagagagagagagagaggagaggcgagttttgagagcttgtgatttcatttttccagtaataaaaaggggtgatgattttcttgggtgaattcgtgttgtttgtcggctgctcgttgtcggcgcttgagttctttttcctacccagctttatcatatgtatgttttggct

SEQ ID NO: 21748 - DNA, 3732 bp, Oryza sativa
  ref <308>: DATABASE ACCESSION NUMBER: AK099228
  ref <309>: DATABASE ENTRY DATE: 2002-08-28
gagtggagcgcgagctgaagaggaggaggggagtggaggaggcggcgctgcagatctggaggcggagcggcgaatggtggtgtcgccggcggccgccgcgatctaggcttgccgcgcgcgcgcggatctgcgagctgcgtagccgtttctcgctgtgagtggaggaggaggaggaaggggaggaggatggcggcgaacgcggggatggtggcgggatcccgcaaccggaacgagttcgtcatgatccgccccgacggcgacgcgccaccgccggctaagccagggaagagtgtgaatggtcaggtctgccagatttgtggcgacactgttggcgtctcggccaccggcgacgtctttgttgcctgcaatgagtgcgccttcccggtctgccgcccttgctacgagtacgagcgcaaggaagggaaccagtgctgcccccagtgcaagactagatacaagaggcacaaaggtagccctagagttcagggcgatgaggaggaggaagatgttgatgacctggacaatgaattcaattataagcatggcaatggcaaaggtccagagtggcagatacagagacagggggaagatgttgacctgtcttcatcttctcgccacgaacaacatcggattccccgtctgacaagtgggcaacagatctcaggagagatccctgatgcttcccccgatcgccattctatccgcagcggaacatcaagctatgttgatccaagtgttccagttcctgtgaggattgtggacccctccaaggacttgaattcctatgggattaacagtgttgactggcaagaaagagttgccagctggaggaacaagcaggacaaaaatatgatgcaggtagctaataaatatccagaggcaagagggggagacatggaagggactggttcaaatggtgaagatatgcaaatggttgatgatgcacgtctacctctgagccgcatagtgcctatcccttcaaaccagctcaacctttaccggattgttatcattctccgtcttatcatcctgatgttcttcttccaatatcgtgtcactcatccagtgcgggatgcttatggattgtggctagtatctgttatctgtgaaatttggtttgccttatcctggctcctagatcaattcccaaagtggtacccgataaaccgtgaaacataccttgacaggcttgcattgagatatgatagggagggagagccatcacagcttgctcccattgatgtctttgtcagtacggtggatccactaaaggaacctcctctgatcacagcaaacactgttttgtccattctggctgtggattaccctgttgacaaagtgtcatgctatgtttctgacgatggttcagctatgttaacttttgaggctctgtcagaaactgcagaatttgctaggaagtgggttccgttttgcaagaagcacaatattgaaccacgagctccagagttttactttgctcaaaaaatagattacctgaaggacaaaatccaaccttcctttgttaaagaaaggcgggcaatgaagagagagtatgaagaattcaaggtacggatcaatgctcttgttgcgaaggcacaaaaagtacctgaagaggggtggaccatggctgatggcactgcttggcctgggaataacccaagggatcaccctggcatgattcaggtgttcttggggcacagtggtgggcttgacactgatggtaacgagttgccacggcttgtctacgtctctcgtgaaaagaggccaggattccagcatcacaagaaggctggtgcaatgaatgcattgattcgtgtatctgctgtgctgacaaatggtgcctatcttctcaatgtggattgtgatcactacttcaacagtagcaaagctcttagagaagcaatgtgcttcatgatggatcccgcactaggaaggaaaacttgttatgttcagttcccacaaagatttgatggcattgacttgcacgatcgatacgctaatcgcaacatagtcttctttgatattaacatgaaaggtttagatggcattcagggtccagtttatgtgggaacaggttgctgcttcaataggcaggccttgtatggctatgatcctgtactaactgaggctgatttggaacctaacattgttgttaagagctgctgtggtggcagaaagaaaaagagcaagagctacatggatagcaaaaaccgtatgatgaagagaacagagtcttcagctcctatctttaacatggaagatatagaagagggcattgaaggttatgaagatgaaaggtcagtgctgatgtcccagaagagattagagaaacgttttggtcaatcgccaatttttattgcgtccaccttcatgactcaaggaggcataccaccctcaacgaacccagcatctctactgaaggaagccatccatgttatcagttgtggatatgaggacaaaactgaatggggaaaagagattggctggatctatggttcagttactgaggatattctgactggatttaaaatgcacgcaagaggttggatatcaatctattgcatgccaccacggccatgcttcaagggttctgcgccaatcaatctgtctgatcgtcttaaccaagtgctacgttgggctcttgggtctgttgagattctgcttagcagacattgtcctatctggtatggttacaatgggcgtttgaaacttctggagaggctggcttacattaacaccattgtttatccaattacatccattccacttatcgcctattgtgtgcttcctgctatctgtctcctcaccaacaaatttatcattcctgagattagcaattatgctgggatgttctttattctgcttttcgcctccattttcgcaactggtattctggagctccgatggagtggtgttggtatcgaggactggtggagaaatgaacagttctgggtcattggtggcacatctgcccatctcttcgctgtgttccagggtcttctgaaagtgttagcaggaattgataccaacttcactgttacctcaaaggcgtccgatgaggatggtgactttgctgagctatacgtgttcaagtggaccagtctcctcattcccccgaccaccgtgcttgtcatcaacctggtgggcatggtggcgggtatatcatatgccattaacagcggttaccaatcatggggtcctctctttggaaagctcttcttctccatctgggtgatcctccatctctaccccttcctcaagggtctcatgggcaggcagaaccgcactccgaccatcgtcatcgtctggtcgatcctcctcgcgtcgatcttctcccttctgtgggtcaagatcgatcctttcatttcgcctactcagaaagccgtcgccttggggcaatgcggtgtgaactgctgatcggcaccgttacgaagatgaacttcaatcaatcaaggtctacccccccttgtgtaaatacctgaggggggctagaatgggatcttctttttgtgtagatgaagaccttttttatctaagttatgccactgtttattagctacttcagtgctggcgctagctgctgatacgatggaactgtgaagccttattttgcctgcgaagaagccagcccagcagcgtaaattgtgaatttttttcttcttttgtgacacccgttattttagtcatttgtttgaggggtcgttgttacacatactatgggatgttatttat

SEQ ID NO: 21749 - DNA, 2162 bp, Oryza sativa
  ref <308>: DATABASE ACCESSION NUMBER: AK071991
  ref <309>: DATABASE ENTRY DATE: 2001-12-06
gattctctctcccgttctatctctcactctctcttaatctctcgctactcaccaaggcggccggcagtggtgctcgcctggatcctgcggttctgccgtcgacggcgacgggccggccagatccaccactggcccaagtcgtggttgctgcttcctcgcgtcgatccagccgccaccatgttcatctccatcgttggctggcggcggtgaggctggtgagcggcggatccaacggtggggaggctcgagggcggcgacgaggctggtgggcggtggatccggcgttgggaggcgaggcagtgggctcccgtagccggcggctgcccagcggaggaggtggcggcggccgcgccctcccctccgctagatgtggcaggaggggaggcaacgggctctcgccgctggcgcctgcccggcggaggcggtagcggcggcggcggcggcggccgcgccctcgatgggcggcgggttcccgtaggcggcagtgtcactttctccatgtttctcctcgtcgtgctcagatgctctcgatggatccatcgccttcctccttctgctacttccttcctttcgttctttcctctcggttttctctcctctcctccgccactcagcgacgccctccttctccgccgatccccctcctcgaccacccaccgacggcgcctctccctctcctcagctccccttcctcgtccccccaccgagtccgccggcacggatccaattcccccgagctcactggcgatggatcggccttcgccgttgggtggcagtcgtcatcgtaggatcgagctgccacgatggtccagttcggtgccgagcggattggggcggtctcgttctttaggcggagggagcggtcggagacgaggaggccgattgagtagtggatgccggatccggatatggtgcagtggacgaatctggaggtcgagttgtacaagcagagctgttcggtcgtccggataggagtgttcaagttgtcggacgaaggtggacctctatggattttccaacgaggatgctgctgtggccgccggatccagtgacaattgacccccccgcagtagaggtgcttgaactggtcacaaatctaggttcactaaacccaaaggcttttgtagcaatgggatgcctggtgctagtggttacttgggcagcaatgggggtgatggtgggtatggcagtacaccaggagcccaggaagaaaatatatggtcaataggtaagatatatggtaagttcaattcccacaccacctctaatcgctgcgcaatattgctggttatagattgattggtttatgactggtactatatcaaatatattactgtctttgatatgttatctctgtaggaatcagattactgtcatggttcttatattgtgcacttccacttactgcaagcttaagcttgtatcctgtatattttagttagtcaagtaatagtagtatgaaaacaccaaaacattatatgtctaatctgaacaatcattttgagtagcctaattgattgcaagctcttgtgatgattttgttgtgtgcatgatttatgttctgcattcatgtgaatgtctgaattgaaggacccgtctggaacttccgtgttgctatgtgccgctggacaactgaaaaaattggctgttgctaacttgaaaaaattgactgttgctaacttgctaactgttctgcatcgacgggaaaaaaaaccatacatagcattggttgtgcatatgaaaggctcagctaaacattctcttctgaaaacaaggctcatgtatgtctggttgacctctttaatttctgtataaaaacttcatgtatgtctggttgacctcttttattttatgatggtactgttagttcgaattcataagctgacttatcttatgaaattaaaattgcattcaggattgagttggttgataacctggaatcgacattgattggagattgcttgacgtcctagaggaagagccttgcgattaatattttcttgtgtgcttctattatttctattgcctgattgaaagctggcttgatgttttagaggaagagccttgtgatatatgttttcttgtctgcttctattatttatacttatatattgcctgtaatgtaatgtaatattaaattggagtaggaatcggtgtggggg

SEQ ID NO: 21750 - DNA, 2008 bp, Oryza sativa
  ref <308>: DATABASE ACCESSION NUMBER: AK071992
  ref <309>: DATABASE ENTRY DATE: 2001-12-06
gccgtgcttttgcttcgccaaacgaaaagaaaattctgtccacccaggacactgtcttctctctctctctctctctctctctctgcttcgagttcgtcgattcggttcaaatcactcgtctcgtagtcatagatagatggctcgtctcctcaatccaatcttgccgctctccgggctcacagtttcttgatttccccattcttttttcgtttccaaagtttttttcttcttttttgttgttctttgtgttgatttcttcctctgcgagtccactcccagtccagggtcagaagcttgctgttgaattccacactgttgaagcacaactcgagtttttctcatcaaatttcatcttttcttctgttcttttccctctctctctttttgttttggcttaaatcttactagagttcatcacagcttcccacactcgttttcccgtctcgatttcatcagctgaggtcggcacttgctcatctttgccgatttgtttcttctcgagagcctacaaaaattctccctctcttgatttccacaagcttgtttgatatttgctcgtcccaaaatggggaacgcgttccggtgcatgtcgcgcaaggagcaccgcggcggcggcggcgcggcggtgtcgcggagcaagcggatggggagcgcgcggtcggggcgcggcggtggcggcgggaagctgacgcccgcggaggaggagctcctgcaccggcaggcgctggccatggccatccaccagcacctcgacgccggcggctccatgtcgcgccgcatcgacgccggcggctccatgtcccgccgcatcggccctggctccaccagctcacgccgccgcggcgacctcccggactccgtcaccggtgccaagcccgtccaaatcgttttagagaacttagaaaccaagaaaattgttcttgttcatggagaagggtttggtgcttggtgttggtacaagaccatttctctcttggaggaagctggtcttgatcctattgccttagatctcacaggttctggtatagacaatgctgacacaaacagcatagctacattagcagattactccaagcccttaatcgactacctcaataaacttcctgagaatgagaaggttattttggtcggccataggtgtggaggtgcaagtgtgtcatatgcgttagaacaatgccccaaaaagatatcaaaggctatatttcttaccgctacaatggtaaaagatggccagaggccctttgacgtgttctctgaggaactcgcatctgcagatgttttcttgcaagaatcacagcttttaatttacggaaatggtaaggacaagcctcctactgggctcatgtttgacaaacagcagatcaaggggctatatttcaacaccagtccttccaaggataccgtgctggctgcagtgtccatgaggcccatccctctagccccaatcatggagaagctctccctcaccccagaaaactatggcaccgtcccacgctacttcatccagacgctcgatgatcgaatgctctcgcctgatgtccaggagaagctggtcagggagaacccgcccgacgggatcttcaagataaagggtggcgaccattgccccttcttctcgaagccgcaatccctcaacaagatcttgcttgagatcgctcagattcaagctccgacggcgctgctcccaggcaaggcgaagacggaggcgatagaggcaacagaggctaagacagaagaagagaaaactgagaaattatcatgactttgtattgtgtatgtacatgtaagggtagtagcacataggttgcaaacaggaggaaataccaggatcaattgaaaccagtcggctgccagaataataatgtaccagtaggaagacgaaaaaatgttgttcttttttcttcttttgtgatcaagtatagagaatgagcctatgagagatcttcagtcagatatatgtttaaccttgtgaattacaggttcttcagtctgaacattttcatcttgc

SEQ ID NO: 21751 - DNA, 1628 bp, Oryza sativa
  ref <308>: DATABASE ACCESSION NUMBER: AK099229
  ref <309>: DATABASE ENTRY DATE: 2002-08-28
ggcctgcacagctgtttcaacgacggctgctcggaattcggagggagggaggaaggaatcggagtgttcggtaagcttcgcgaagcgggatggaggcgccgcgcctccgcctcccgttcctcctactggtggccctcgtcgtctcgccgccggcggtcgccgcggcggcgagccgaatgcggatcgagcccctccccaccgccgcgctgcgccgcctctacgacacctccaactacggcaagctgcagctcaacaacggcctcgccctcaccccgcagatgggatggaacagctggaatttcttcgcctgcaacatcaacgagacggtcatccgcgacacagctgacgcactagtctcgacggggctggctgatttgggctacaactatgtaaatatcgatgattgttggtccaatgtaaaaagaggaaaaaaggatcaattgctacctgacccaaaaactttcccttctggcatcaaagatcttgcggactatgtgcatgggaaaggtctaaagcttggtatctactctgatgctgggatttttacatgtcaagttcgacctggatcgctccatcatgaaaaggacgatgctgcaatatttgcttcatggggtgttgattacctgaagtatgacaactgctacaatttgggaataaagcccaaggacaggtatcctccaatgcgtgatgctttaaattcaactggacgccaaatattctactctctatgtgaatggggccaggatgatccagccttatgggctggcaaagttggtaacagttggcgcacaacagatgacatacaggatacatggaaaagcatgactgatattgctgataagaataacaagtgggcatcatatgctggacccggtggatggaatgacccggatatgctggaagtcgggaatggtggcatgacctttgcagagtatcgtgcacattttagcatctgggcacttatgaaggcccctctcttaattggttgcgatgtcagaaacatgactaaagaaacaatggaaatattgagcaacaaagaagtaattcaagtaaatcaagatcctcttggagttcaaggaagaagaattttaggtcaagggaaaaatggatgccaagaggtgtgggctggccccctctctggtaaccgtctggctgttgttttatggaaccgctgtgaggagtctgccaatattatagtaaaattgccatctgtaggccttgatggttcatctccctattctgttagagatctgtggaagcatgaaactctatcagagaacgttgttggaacttttggggcgcaagttgacgtgcatgactgcaaaatgtatattttcactcccgccgtcaccgttgcatcaagttgatcatgaagagcatcatgcctgatgctttcctggaagcacccagtatctactcaaattagacctgatgaatcgtccaccattttggtcgaggcaacaggtctactgaaatttgctttgtggagaatgcagttttcccgtttctatggggaagttcgtgcaagcaaaccacgtaaggtttttcttgcaagcttgtggtgtaaatttattggtggcttgacgccgtttgctgtacaggatgcaaataaataatttattctgtcc

SEQ ID NO: 21752 - DNA, 3919 bp, Oryza sativa
  ref <308>: DATABASE ACCESSION NUMBER: AK071993
  ref <309>: DATABASE ENTRY DATE: 2001-12-06
ggcaatcccactctcatctccctcagttactgccttgctccccaaccccaggagcaagcacaagtccactgcgtgcgtgcgagcgatgactccgataaccgcaggggcggtgaggtgaggtgaggcgaggaaaaaatcggacgcacccgcagtacaccctggacgcgcgcctccacgccgtgttcgagcagtcgggcgcgtcgggccgcagcttcgactacacgcagtcgctgcgtgcgtcgcccaccccgtcctccgagcagcagatcgccgcctacctctcccgcatccagcgcggcgggcacatacagcccttcggctgcacgctcgccgtcgccgacgactcctccttccgcctcctcgcctactccgagaagcaccgccgacctgctcgacctgtcgccccaccactccgtcccctcgctcgactcctccgcggtgcctccccccgtctcgctcggcgcagacgcgcgcctccttttcgccccctcgtccgccgtcctcctcgagcgcgccttcgccgcgcgcgagatctcgctgctcaacccgctctggatccactccagggtctcctctaaacccttctacgccatcctccaccgcatcgatgtcggcgtcgtcatcgacctcgagcccgcccgcaccgaggatcctgcactctccatcgctggcgcagtccagtctcagaagctcgcggtccgtgccatctcccgcctccaggcgcttcccggcggtgacgtcaagctcctttgcgacaccgttgttgagtatgttagagagctcacaggttatgaccgcgttatggtgtacaggttccatgaggatgagcatggagaagtcgttgccgagagccggcgcaataaccttgagccctacatcgggttgcattatcctgctacagatatcccacaggcatcacgcttcctgttccggcagaaccgtgtgcggatgattgctgattgccatgctgcgccggtgagggtcatccaggatcctgcactaacacagccgctgtgcttggttgggtccacgctgcgttcgccgcatggttgccatgcgcagtatatggcgaacatgggttccattgcatctcttgttatggcagtgatcattagtagtggtggggatgatgatcataacatttcacggggcagcatcccgtcggcgatgaagttgtgggggttggtagtatgccaccacacatctccacggtgcatccctttcccactacggtatgcatgcgagttcctcatgcaagcctttgggttgcagctcaacatggagttgcagcttgcacaccaactgtcagagaaacacattctgcggacgcagacactgctgtgtgatatgctactccgggattcaccaactggcattgtcacacaaagccccagcatcatggaccttgtgaagtgtgatggtgctgctctgtattaccatgggaagtactaccctcttggtgtcactcccacagaagttcagattaaggacatcatcgagtggttgactatgtgccatggagactccacagggctcagcacagatagccttgctgatgcaggctaccctggtgctgctgcactaggagatgcagtgagtggaatggcggtagcatatatcacgccaagtgattatttgttttggttccggtcacacacagctaaggagataaagtggggtggtgcaaagcatcatccagaggataaggatgatggacaacgaatgcatccacgatcatcgttcaaggcatttcttgaagttgtgaagagtaggagcttaccatgggagaatgcggagatggatgcaatacattccttgcagctcatattgcgggactctttcagagattctgcagagggcacaagtaactcaaaagccatagtgaatggccaggttcagcttggggagctagaattacggggaatagatgagcttagctcggtagcaagggagatggttcggttgatcgagacagcaacagtacccatctttgcagtagatactgatggatgtataaatggttggaatgcaaaggttgctgagctgacaggcctctctgttgaggaagcaatgggcaaatcattggtaaatgatctcatcttcaaggaatctgaggaaacagtaaacaagctactctcacgagctttaagaggtgatgaagacaaaaatgtagagataaagttgaagacattcgggccagaacaatctaaaggaccaatattcgttattgtgaatgcttgttctagcagggattacactaaaaatattgttggtgtttgttttgttggccaagatgtcacaggacaaaaggtggtcatggataaatttatcaacatacaaggggattacaaggctatcgtacacaaccctaatcctctcatacccccaatatttgcttcagatgagaatacttgttgttcggagtggaacacagcaatggaaaaactcacaggatggtcaagaggggaagttgttggtaagcttctggtcggtgaggtctttggtaattgttgtcgactcaagggcccagatgcattaacgaaattcatgattgtcctacacaacgctataggaggacaggattgtgaaaagttccccttttcattttttgacaagaatgggaaatacgtgcaggccttattgactgcaaacacgaggagcagaatggatggtgaggccataggagccttctgtttcttgcagattgcaagtcctgaattacagcaagcctttgagattcagagacaccatgaaaagaagtgttatgcaaggatgaaggaattggcttacatttaccaggaaataaagaatcctctcaacggtatccgatttacaaactcgttattggagatgactgatctaaaggatgaccagaggcagtttcttgaaaccagcactgcttgtgagaaacagatgtccaaaattgttaaggatgctagcctccaaagtattgaggatggctctttggtgcttgagaaaggtgaattttcactaggtagtgttatgaatgctgttgtcagccaagtgatgatacagttgagagaaagagatttacaacttattcgagatatccctgatgaaattaaagaagcctcagcatatggtgaccaatatagaattcaacaagttttatgtgactttttgctaagcatggtgaggtttgctccagctgaaaatggctgggtggagatacaggtcagaccaaatataaaacaaaattctgatggaacagacacaatgcttttcctcttcaggtttgcctgtcctggcgaaggccttcccccagagattgttcaagacatgtttagtaactcccgctggacaacccaagagggtattggcctaagcatatgcaggaagatcctaaaattgatgggtggcgaggtccaatatataagggagtcggagcggagtttcttccatatcgtacttgagctgccccagcctcagcaatcagcaagtagggggacaagctgatatggtgtatgctcgtcgctaacctcgcataactattcggtcaaccaggtgacctgggatcttctgatggagaacccagtttatgagagttccagaaaccaacatttcgtccactctgatgaagcacatctgaactttggaacggcatcggtgattctcggtgtcgaggtggtccctccagtctcctgattcctggcatgcccgactgtaagttcagctttggacgatgttgttctattagagttctatggcggcaagcaatgcacactgacggtcatgtaactcgtagcataggcccactaccacttggttgaagtacatatatgttctaaaagctgccatgtatataacatcggttatatatgtactacgtgcataaggagagctgtgcagctcccagggtggtattttgtagggcttcccaagcctatgacatcttatt

SEQ ID NO: 21753 - DNA, 1642 bp, Oryza sativa
  ref <308>: DATABASE ACCESSION NUMBER: AK071994
  ref <309>: DATABASE ENTRY DATE: 2001-12-06
gggaacaaggaagaggcaaggacgtggtgaagcttgaggagattgggacagccatgataagcctggaggaatgctgctgggagatgcaactgcagcagcagcagaaaaggggggcaactcagcagcagctggtggttgtccccatcagggtgaggaaagatggatgggcaagtgatgccatgctttatgtgaatgtggagcttgtggacgcgaacacgccttctgagaacatcggaaggactgtttcattcagggagagcagggcgaggacgacgactccggcaccgacaatgcgggacaataggaagagcttggaggcagggacgtaccatgaggtccttgacctgaagcagctgcttgatctggctgacagggagcacaaggtggctgtgtacagcaggagcaagaggaattcggacagcagcagcgtcagcagcatgagcagtgtcagcagcagcagcaccatcagcatcagcagcgccagctcgagcggcggcgccagcccggagcccggcctgtcgtcgaaacgccggcttctaccgtggaggaggaagagccgggacttcgacaagaggagcagcgagtcgctctcccaagaattgcccatgaaatacatggatgatgatctggcgggaagctgggagactcgggagttcacgagcagggactcggagacgaagctgaggacgccggtgttcttcgcgtccatcgaccagcgcgacgacagcgccggcggggagagcgcgtgcacggcgctggtggccgtgctggcggcggcgctgcacgccaaccacccgacgatgccgacgcggccggagctggacgcgctcatcagggacggctcgtcggagtggaggcggctctgcgacgacgaggcgcacatggcggcgttcccgaacaggcacttcgacctggagacggtgctcgcggcgagggcgaggcccatcgccgtgcagcacgacagggccttcgtcggcttcttccagcccgagagcttcgcctccctctccggcgccatgtcgttcgacgacatctggcgagagatcgccgccgccgccggcggcgagccggggcgcgccgacgtgtacatcgtgagctggaacgaccacttcttcgtgctcaaggtggaaggcgactgctaccacgtcgtggacacgctcggcgagaggctcttcgagggctgcgacaaggcgtacatgctccggttcgacgccacgtcggagatgcgctcggtgtcgccgccgccgtcgtcgccgtcgccggaggaggaggtgatcgtcaccgggaaggagtgctgcagggagttcatcaagaggttcttggcggccatcccgctgagggaggagctggagatggagaggaagggctgcgccgacgcgccgcaccgccggctgcagatcgagttccacttcaccgtcctgaaagaagaagaacaagaccaagcaagaagatgatgatgatcagtggttgtagctctgcaagctgactcaaagctgtagtctgtactaacaaacattcatgtacatttctatacatatacagtacaagaggaacaggaaatcacagcattgatacatacggatactacagggatttttggatagtaaatattattgtaggcagacacaggaaatttttacgg

SEQ ID NO: 21754 - DNA, 2222 bp, Oryza sativa
  ref <308>: DATABASE ACCESSION NUMBER: AK071995
  ref <309>: DATABASE ENTRY DATE: 2001-12-06
ggccccctcgacgaccgcccgctcgaaacaatctcccgctgcgctgcggcggcgcttcgagggcagggcggcatggcggcggcggagcgcccgagcaggtccgacgtcgacttcgccgacgtcttcggcggcccgccccgccgctcgtccgggcacgacagcctgaggcgctcgtcgatggactcgtcgttcggctcagcgacgaaggggaggagcggggcagaggagaggcccgtgttcggggaccgcacgagctccgaccggaggaggcagctcgggcaggaattctacaaggacatattcgccgggagcgagtcgatgtcacctaggcggggaggcgcggcgggggatctggatgtgtttggtgcgcaggcctcacccggttccaccagccgcctgcattcgagcttctccatgaagttcaacggaggcctggacagttctgtccctacttctccatctcggcatacatccaacaaaaacgatgatggaatatcatatgcttacagtgttccaacttcacctaattcatccatgaacagctttctagcccaaggggcaccccaacaagattccacaaagaatcctttttcatggcatcgctatcccttcttatcccggtttcgctctaacagtggagataagaaggacacctcccattatgtcagctctatggacagtgaatacgaagggactcctgttagcttggaaagtagcattgccaataacaagttccatttttcattctataaatggggagggaaaggtgccgttttggtattgccaactactgcacaggaaaatgctggtgatattgttggagtaaggagtttccctcaagtgattgtgcaaggtatggacctaattgatgaagaagatagcacgtcaactgccactggagcatcaaagagtcagactgattacgaagactacaaatctgggaaagatgtctcgttaggggcactcttaaaaaccaaggatggagcccttcctttagcttttgatgactacgtgctaggcgataaatctgaagaatcaggaacaaaacataacaccaataatgcaaagaacaatgtattaggagctagccccagctctaaaagttctcggtcaccttcaggagagaaaagtcgtggcagcagagtgaaaggaaaagtaaaggacttcatgaaaatatttagtcctgagagttcaccgaagagcaaacgagatcggacatccagtgggaaaaacggaagcaaaagtggtcctgaagataaatttagcatatccaattcggaggtcgatgacaatgtcagaacagccaatatgaacaagcagaatgtgttccctcctgtaccctctccaatcagcgaagcacaagacaggacggagataccggtttttacagtggataatgaaatggattcaaaggcagattttggaagaaaagaagttacacctccctcttttgatgagtcaagcgatgcccaaacaaaatataaggtagatgagataacagatcttgcggaaggtccagtggaagatcttgaagaatgtgtggttgaggatgtctctgaagattttattcttcgtaataatgaggaaaaagagcaaataaagatttctgaatccaaaatctgggaatggtcaaagggaaaagaaggaaatattaggtcattgctttctacactacaatatgttctatggcctgagagtggatggaaaccagtcccccttgttgatataattgaaggagcagctgttaagaaggcctatcagaaggcattgttatgccttcatccagataagttgcaacaacgaggagctgctatgcatcagaagtatatagcagaaaaggtttttgacattctacaggaggcatggaaagaattcaatacagttacttttggatagtattccttagatcctatcgttgttttggctctatcattcagatatggtgcttgttgttgtccactttaatgtacggatggtaatgcccaggatcacattggatatggacatggccatgggaggccatgatatgcatttttttttgaggtattgcagtcctcttgcagtctggtgaattgcactgtatgaatttgcttgcctaaatgtaagtacttagaaaaatagcagttcttgtacaaattttccggttgtggcaaataaacgggtgtatccagagtattgaaattctataaatagtgtgtgaggcctttgtgtgtgtgtgttgc

SEQ ID NO: 21755 - DNA, 1834 bp, Oryza sativa
  ref <308>: DATABASE ACCESSION NUMBER: AK071996
  ref <309>: DATABASE ENTRY DATE: 2001-12-06
ggtcgtcgcctcacctcgcgcctccgctactactgcttgtctgctgctgcagctgctgttattaccataccgcgggagaaggggggccgaacccgaaggcgtgcgagagggaggtgaggtgaggtggagccgtggaggcgcttgtttcgcgtgcgagacggtgcttcgtttcgcctcacgttttccgagggctacggcgacttggtgggagcgcggagaaaatctagcgagccgtcggagttgggtggcgcgcggccggctgtgcttctgaaggaggagtaattggagtagttgcttgccatggccgagatctgctgcgaggaggccatgtcgccgccggccactgccacggctgctgtcgcggcagcggtctccgcctcggccgccgcagccgtctcctcggcgatagacaggcggcgccgcaggatggagatgaggcgcatccgcatcgcaagtgatctcgagctgcaggccggagaggatgggcgccctggaaagcggcagaggctggcgcgcacggcgtctggcgccccgcgtcctgacgaggattcggcgtctgagcggccgagttgtggccgtacggaggagttcccgaggtatggggtcaccgctgtgtgcggccgccgtcgcgagatggaagacgccgtgtccatcagaccggacttcttgccggcatccggcaagttccatttttacggcgtcttcgacggccatggctgctcccatgttgcgacgacgtgccaggacaggatgcacgagattgtcgccgaggagcacaacaagtgggcctccggcgaagtggcgccttggagggatgtgatggagaagagcttcgcgcggatggatggggaggtcggtaaccgggcgtccacccgcagcgacgacgagcccgcctgcccgtgcgagcagcagacgccttcgcgtcgcgaccacgcgggttccaccgccgtcgtcgccgtcgttagcccaacacaggtcgtcgtcgccaacgccggcgactcccgcgccgtcatctcccgtgccggcgtccccgtcgcactatccgttgaccacaaagtacgtatatgctcgcatcacagggccggctgagcctttcccgtccatctgcaaaaaatcgttagtttcttgtccatgagcgtgtgcctgacatggttgctacttgctacctcggaacggttcagcccgatcggcccgacgagctggaacgaatcgaggcggcgggcggccgcgtcatttactgggacggcgcccgggtgctcggcgtcctcgccatgtctcgagccatcggggatgggtaccttaagccgtacgtgacgtcggagccggaggtgaccgtgacggagcgcaccgacgacgatgagtgcctgatcctggccagcgacgggctatgggacgtcgtgaccaacgagatggcgtgtgaggtcgtgagggcgtgcttccacaacaacggtccgccggcaccggccgcgcggccgagcggcgtgccctcctcggccgaggcggcggaaaccgagaacggaggagccgcatcggtgaaggggataagcaaggcggagtcctccgacaaggcgtgctccgacgcggccatgctgctgacgaagttggcgctggcgcggcggagcgcggacaatgtcagcgtcgtcgtcgtagatctccgccggggattgtgattcttggcgcaatattctatgctccatgattgctttctttcttcttcttttttttattctaagttaatttttcccttcaaatttcttccttatttctctgtttagttttagttttactactagctcctaccaagataaatgaatataatagccttttttttcgc

SEQ ID NO: 21756 - DNA, 3981 bp, Oryza sativa
  ref <308>: DATABASE ACCESSION NUMBER: AK071997
  ref <309>: DATABASE ENTRY DATE: 2001-12-06
gggaattggactcggctcgtccgcacccctattaaaaccacgcgaggaagttttcttccccgtcgtcacctcccgcttcgcgaaccacccacccgtccgtttctcgcctcgcctcgcctcgccctccctctcttccttcttaacaatggcggtacaggcccagtacccttccagtctcctcttccacgataggtgcggcttgtctcctcttcttcgttagggcggctacgtgttttaaaggtttggcctcctttgggctgatggattattcgtcgtctggtttacagaggtgagccggagaggacgaaggagatggacctgcccaggccgcagatgttcgccggagtctcgccggaggtgtactttcccagcggaggaggtgggtggtggtgactgactgattgattgatagatagatagcctgatgttgaaggagttcaaggtcgcgccatggcgccgccgcactacggttcttggattgtgacatgggcgtatgtggttttggtttctttgcagcgagtgggattaatcggaggaataagcgctcgagggaggccattgccatggcgccgccgccggccaaggaggagttggtcaatctgttcacgctccagccgcagcagtctacgtcgtttgtcaacatggcgcagctccacaacagggtatcggcgtcgccgtcccgcgcgccggcggcactcgtgtccactggccttcgcctggcattggatgagcagcagcagcagcagcagcaacaacaagagagcaaacgcctgaaagccttgtgctactcgtcgtcgcccatgccgttcgtctcgttctccgacgagcttgccggacagatgaagcggcaagatgaggagctcgaccgattcatcaaagagcaggtaatcgacgattttgccccccacacgatccgtttgtttcggtggttcgttttttccgtggcgtgatgtgccggcacgttcttggacagggcgagcagctcaggcgggcgatggccgatcgggtgcggcgccataacagggcgctgcttgtcgcggcagagcgatccgcggcgcgccggctcagggagaaggcgttggaggcggagcgcgaggcgcggcgcggcgcggaactcgaggagcggctggcgcgcctccgcagcgaggcggcggcgtggcaggcgaaggccctctcggagcaggccgccgccgtgtccctccacgcgcagctccagcaggccgcggccgcggcgcgggcgtccggcgatgagctccgtggcggcgaggcgggcccggcggagtcgtcctcgtcggcgtacgtggacccgcgccgcagcgggtctgaccgcgcctgcctcacctgccgcctgaggccggccaccgtggtgctcctcccctgcaggcacctcagcctctgcggcgattgcttcgccgccggcgacgtggacgtggccatggcgtgccccgtctgccattgcgtccggacagggggcgtggaggccatcctctgttgagctgtcgtcgtctcatctcggcacacatggcggcttctcggtgctgcgacgccacgcggacgaatgcctcccaccactggatatgagccgtcagcctccaacacaagagctggtggccaaggatctgcacggtgtggaatggcgctttcgtcacatattcagaggtcaaccacgaagacaccttttgcagagtggctggagtgtgtttgttagtgccaaacggcttgttgctggggatgcctttatctttctcagaggtgagaacggggaactgcgtgttggagtcaggcgtgcaatgaggcagcaaactaatgttccatcttcagtgatatcaagccacagcatgcatcttggggttcttgccacagcatggcatgctgttaacacagggaccatgttcactgtctactacaagcctaggacaagtccagccgagtttgtggtcccttacgatcgctatatggaatcactgaaacaaaattactccattgggatgagatttaagatgaggtttgaaggtgaagaggctccagagcaaagattcactgggactattgtcggaatgggggattctgatccagctggctggcctgaatcaaaatggcgctcccttaaggtgagatgggatgaagcttcttccatacctcgccctgaaagagtttctccctggcaaatagaacctgctgtaagccctcctcctgtcaacccactaccagttccaagaaccaagaggcttcgtccgaatgctaccgctttgccggctgactcttctgctatagcaaaagaagctgctacgaaagttgtggtcgagtctgaaccaaatggtacgcaaaggaccttccagacacaagagaatgcaaccccaaaaagtggtttcggcaatagcagcgagttagaaagtgctcagaaatcaatcatgcgtccatctggatttgatcgtgagaaaaataacactcccatacagtggaagctaggttcagatggtcggatgcagatgagcaagcctgagagttacagtgagatgctatctggatttcagccacctaaagatgtacaaatcccacagggtttctgttctttacctgagcagattactgcaggccattctaacttctggcacacagtaaatgctcagtatcaagatcaacagagcaatcacaatatgttccccagctcatggtccttcatgcctccaaatactcgccttggattaaacaaacagaactattcaatgattcaggaagctggtgtgttgtctcaaaggcctggaaatacaaagtttgggaatggagtttatgctgcactgccaggccgaggtactgagcaatactcagggggttggtttggccatatgatgccaaattcccacatggatgatacacagccacgcctgatcaagcctaaacctctggttgttgcccatggtgatgttcagaaagctaaaggtgcttcatgcaaactatttggaattcaccttgacagcccagcgaaatctgaacctttgaaatctccatcaagtgttgtatatgatgggacgccacaaacaccaggtgctactgaatggcgccgaccagatgtaactgaagtagagaaatgttctgatccttctaaggccatgaagccacttgatactccgcaaccagactctgttcctgagaagccttcttctcagcaagcttcacgaaacatgtcgtgcaaatcacaaggtgtatcaactagaagctgcaagaaggtccacaagcaaggcattgcacttggcaggtctgtggaccttacaaagtttaatggctatgaagagttgattgctgagctggatgacatgtttgatttcaatggtgaactgaagggtcctaagaaggagtggatggttgtctacactgacaacgaaggtgacatgatgctagttggggatgatccctggattgaattctgcgacatggttcacaagatcttcatctacacaagagaagaggttcagcggatgaatccgggaaccctgaactcaagatcagaagatagtcatgctaattcaatggaaaggggctcagtcggcagagaaatgcgaggctgcttgtcaacctcgtctcttaattctgagaactgctaatgctttcccatctggtaacgtcttttgaagtaacatgggagacaagaacgcgatgcatcgttataagaaaatgcatttcgtagtggagttaatgctttttttccccctttgatgtattggataagctcaaagtaccctatttgtagatggtgcttgtccttggtggtcaagttgcactcttatttgctgcagttttggttttctattttggtgaggtaagttgtcagccgccagtcctaccatataaatgttggtatgcgtagaaaagtaagctcagccctcccaccctgcacttcctctctctcagcactaagctgccacctccttgtaaatagcccctgtttaattgagtctaatatattatctaccttaactgacg

SEQ ID NO: 21757 - DNA, 3592 bp, Oryza sativa
  ref <308>: DATABASE ACCESSION NUMBER: AK071998
  ref <309>: DATABASE ENTRY DATE: 2001-12-06
gcttgccatcaccatctccatctctctctcctctcctattctctctcgttctcctctctgtgccgccgatggagctctgccgaagttcgccgccgcctcccccggccgccggctgcggagccgcgcctcgccgccgcggcaccttgccgccctgagccgagcaggcgagaggaaggaggaagaagacctctagccgttgacagccgggccccacacctccctctctccctcaagcagctgacagccaggccccacgcccttttctctctttcagtcgctgacagttttattttcgcgttgagagcccgagtacgaggaagctctggacgccactttcgagggagaagacccgcaccctgtgcaaggcaagcctctttgatcacattgcccctaaatttgcaaagatatgttatttgaaaagtgcattgcttagtatacacgattaacatgtttaggcctcagattatttatatatacaaccgacggaccaacctagtagtcacactcacattgcgtaggttgttgtttccatacctttgatagctccaaaaatgtttgtgccgatatcgttacacgattaccgaggtagtttcgcttagccatgcttacgttgttcgccgtgtgggaaacttgggttattccaaattacatgtttaaaaatcccgcacgttgtaccgaggagttgtgaaataaaatgtgttgttaaagtagtgatgatgcggagtcatgcctttgtggtttggctacgtattgtcgttaaggaccgattcctttgggaaatccatccaaacacgttacagtgcgaccacacgggtatttatgggatgcctctagctaagtaaatttttatcacatgggagttggtgtgccaatggttgtggaatgccgaggatgaggagacgaagtgttacacatttattgcccatcatgggtgtctttttgctctattgtggcgtgataccagtaagagtaggagacatcctcggtatttgctgagtggatgacggttgtcattgcctgatactcggctatggatcttagcccaactaggtggcatgcgattttcatgggttagctttggaaaggccttatcatgaacttccgttaccgatgggtagacggtgtaagtttcgtgtcgtgtgggtaaagcgtgtaacctctgcagagattaatgaactgttcaaacagccgtgcccgcggtcaagggcgagtgtaaggtgtttctcatagcgtagatttgtttgacaaatatttgtgaagaagtggttattgggaagggtaacgtttctagagtccacctgtgtggcagacggctaacctttgtggttaggaatgggtctgtgtgacctggggtgtcgtccaacaccgaggtgttgttagggtcatgatggcgttgatgtgctgagataattgtgtgaattgtgttattgtgaaagtgaaaagaaactaatagaggaaacaaattaattgttgtttgttaatgtgacaagttgttgcaaagcaacttgtggaatgggttgaggcttgaggctcctcccgataaccaaaacttgactcactcactaggagttttgtgaaataaatcactttgccaaaaaggcagctttcgcaaataaaaccttagcctccttgtttaagccaaacatgtcattctttcccctagcttgctgagtacgttaagtactcacccttgccccttataataatctatagagtatgaagatgaagacgccgacccgaccgccgaggagtatctccaggagcaagccgagtatgaagacttctagatgtttcgtgcctagccccaaacgtcgcctgtggaataagttagttacctaggttttttgcctagtgcatagttgcttagtcgtttagttctccgcgctgttcgcttctgcgccgtcacttttatggttttatgcaatgttgcattgttcatctatgggcctatccatgatggcaacttatgtaaggactattacccagtgatgtaataaagcactttaatttgattccacatttattttgtgtgtaccagctagtgtatcttgggactggtactatatcacaggtaatgcataacaccccggtgtgagttagctatgtttattgctaacgaatgtcagggcggtacagccgcgcccccgaatttcgatcacggagccatcgccgaactttacagtacccatgacactagtgtcgagatcagcaaacgccgaacgtacgcctgtcatgtggtttgtagcccctgtgtccaaaaaccaatctcctgctccctcaccatcaccatcgtgatccatgaccacctttttctcagtgagatgcacctgttgtgttgttcgatcagaagtcgcttccccggcaagcaacatgcccatcacttgggccatgagcagagtcggctcctcctcggcttgtgtcaggttcatctccacctgacgttggtgttggtatttcttaacgacattacaagaaatataatttccagcaatgacgcagaaatactcctggtatattatggttacagagttcatccgcaagcgcacggatataccattgtagcatttcacccgagagtattccaagggtatcgtatttattttatcccgtaggaagatcatgtagagagaacattgactaataatttatatattactttggataatcatattctaagtaggggttaagataatccaagggtagagtgacacacaagcattactacttattctcataatatatcatgtaagctaagtggaaagaaaagacaaagagaatctattcctatacttctaatatacatagtatacatacattctagttaaccgatatactagctaataccctctatccgatgccctcctagtacttcaagaagcctgttgacggtcgttatcgatcaatttcgaccgtcaatattactaaaataggagagaactagtgatgcttgcagcataagtatgttagaataataatattccattagtattaggtttactaaccttttgcagagaatgatcataaagtggaggagaatcaacatcaacacaaacgataaatcaataggacgatgtcgaggaccagacttatgtatgaatgtgccaagaactcagaattgacacgacaaactgggtcaaaattcacaagtctgcggagaaaaacaacataggaggccgcgagccaaaccatgggctggttgggtcggccccaggttcggcccaaccagggggttcggccgaacctccctcatcgccgctggatccagagtttcttctggacggtgtggattagctcccaatgacggttggagggtatttccaaccattccaactgtcacaaccgtccttgggaggctatgtaaacccctcaccttctcacttcactcacacacctcaagcaatagctctctcatttttctcatgtttagtttagtagtatctagctggtggaatagaattagaataggaatcaggaatccggaagtgacatattatttctttttaatatatgtcatctaccaaatataatctaatgtattaccagaggttgttttaatcttttatctcaattataaatcatttgtaaatggttt

SEQ ID NO: 21758 - DNA, 1466 bp, Oryza sativa
  ref <308>: DATABASE ACCESSION NUMBER: AK071999
  ref <309>: DATABASE ENTRY DATE: 2001-12-06
gggtccgcgccgcaaacacgtcgatggttcgaccgcaaccgggtgacccctgctccgaccaggccacccccgttctcctccccgccgccgccaccggcgcctcccgctcgtccccggccggcgagtcgcgtaggagggaagcgccaccggcggcggccgcggcgagatgagcggcggcagcggcggcggcgccgcgagcgcggtgttctacgcggagaagtaccacccgatccaggcgggcagcatcgacggcaccgacgtcgccccccacgacaacgccgtcctccgcgccctcctctgctccaccgccggcctctatgatccgttcggggaccccaaggccaccggcgacccctactgcacggtgttcgtcgggagactctcccgctacaccgacgacgagacactccggaaggagatgagcagatatgggagggtgaagagcatgcggctggtgcgggatattgttactggtgcttctcgtggctacgcatttgttgagtatgaaactgacagggagatgcgccgtgcctatgaggatgcacaccattccattattgatggcagtgaagtgcttgtagattactacaggcaacaacttatgcctggatggataccgaggagatcaggaggagggcttggagggaagaaagaatctggccagcttcgatttggaggtcgagagaggccatttcgtgctcccttgaggccaattccgtatgatgaactgaaaaggcttgggatcccaccaccacctgaagggcgatacatgacacgttatcaggttcccccaccaccaagacgaaaaagcagtgatatctacagggaagagtcacctcccaagagaagatccaaagacagggttgatagcagtcactacagaagatattgtagcccaacccaagacgacgacagcacggtcaacacccataggcggaaaggtagccatgaccggcgagaagaaaccgagaggaggacaagagcatatatcagcagagaggccggcagctacagtaagcggagcccaaccgaagacgatggtgatcgtcgtaagaggagaagaagccgagagcctggagaattatctccatacaaggaggatgatgataacagcaaaagaggaagaagttcagtggagccaggcttcagcccttatcagtctcatcaccacaggcatcacagggagcgtcatgacagcagcagccattctcgccacggtgaacgtcggcatcaagacgaccgtggaaaccactccaggaacaggagatcagagagccgggactacagccactagaggtgtcgagtccatggtgggttcctagtgttttaacctgaatccctggctgcctgttcgctgcttcaactcatgtatatgatctagttttctcaggcgtccttgccttgggttgcctgtgtagtgagggctactaaacctgaagtttcgactttggaatacatgaattaat

SEQ ID NO: 21759 - DNA, 2015 bp, Oryza sativa
  ref <308>: DATABASE ACCESSION NUMBER: AK072000
  ref <309>: DATABASE ENTRY DATE: 2001-12-06
catcaccaaacattcaaggccactgacacacaacaagcaagctaggcggcgccggcgccgtcgacacaagcaagcaagcaagccggcgagctttatatcttggcgtcgccggagccggcgaggctgctgccggcaacgtcgatgacgaagcggtagcggacgtcgttcttctccagccgctccatcgccgtgttgacgtagtccatcttgatgacctccacctcggcagtgatgccgtgctcgccggcgaagtcgagcatggcctggcagtccctgatgccgccgacgcagttgccggtgatgcccttccctccgggcacgatggcgtacgccggcagctccagcggcctggtcggcccgccgacgaacaccatctgcgccatcggcttcatcagcgagaacagcggcgcgatcgggtgccaggccgacaccgtgttgaggatcccgtccatggtggccgccgccgccgccatctggcccgcgtcgcggctgacgaggaactcgtcggcgccgaggtgctccagtgcctcctgccgcttccccggcgacgtgctgatgacggtgacgcgcatcccgaacgccttggcgaacttgacggcgacgtggccgagcccgccgaggccgacgacgccgacgtgcttccccggcgcgttcaggccgtggatcaccatcgggctgtacaccgtcacgccggcgcacagcagcggcgccgcgctgtccagcggcagccccgccggcacgcggagcacgtagtgctcgttgacgacgatggcgtcggagaagccgccctgggtggccgcgccgccgccgtggtcgtggtcgacgccgttgcaggtggttaccatcttggcgcagtagttctcgtacccattcccgcagcactcgcagccgcggcacgacgcgacgaagtagcccacgcccaccgtgtcgccggccttgaacttggtcacgccggcgccgacgccggtgacgacgccgacgatctcgtggccggggacgacggggtacatggcgttgccccaatcattcttgacgatgtgcaggtcagtgtggcagatgccgcagtagagcaccttgatggtgacgtcatcgtccttctgagccctgaaattttttttagtcagcagaagcagataagattatccactagacagattagccgcaaaagtgacagttcatagcctcatacagtagcaaattgaacactactccagattatagaatataatttactgccaaattaatcaaaaagtgcatagatcaagtgaaagactattaaaactttcagataatgtaaaataaagaatcggctctggttcttgacttgtttgactgctgatttttaactgactgacacttgtattgatctgacagctaaactatctcgatctatccattctcctagctataggatctgaatcttgaaacaactcatccacacagaaacagagagacaaggcatcttctccaactccaaaaatcatggcgaaaattctcacacgagaacaaacaaaacggtgagagttctcagtgacagagctcagaagctcactgacctcctggagaagttgtacggggagaggacgccggagtcgtccctggccgcccagccgacagccgccttgccatgctcctccatcccctgctccgccgcactcgccctcgccctctgcaggtttctcgccggcgacgaggtggtgatggtcacggcggtcgcagcagcagcaggtgaagtgctgctgagttgctgaagaagaagcttgctgctggtgctggagaatggcaagcgagtgattgcgagtccaccggaggaagaggggaaggtgagacgcgaggtggtgtgcgtgcgaaaatgacgtgacataacagctgcttggaaaaaatcctagcaacatgtaatcgtggtgcactgtatgtagtccagtatgggaggaggtgatgggaacaggggatcgaattcgtgacctcaactactgtctatttccgccgtcaaataaaaaactaacatattactc

SEQ ID NO: 21760 - DNA, 2211 bp, Oryza sativa
  ref <308>: DATABASE ACCESSION NUMBER: AK099230
  ref <309>: DATABASE ENTRY DATE: 2002-08-28
gagggagggagtttggcagttgctcgctcgccaaactgccagatccggatcccgcaccagatgcgcccgacggcgatgctccgatggcccgccgccgcggcggcgctcgcgctcgtcttcctcctcctcatcgccgccgcgccccccgccgcggccttctacctccccggcgtcgcgcccaacgacttccagaagaaagatccacttcaagtgaaggtgaacaagctgtcatccacaaagacacaactcccctattcatattactcccttcctttctgcaagccagatacgatagttgacagtgcagaaaatcttggagaagttctacgtggtgatcgcattgagaattctccttatgtgtttgagatgagagagcccaagatgtgtcagatcgtctgcaaagcaaccattagcgataaacaagcaaaggagctaaaggaaaagatagaggatgagtaccgggtgaacatgattcttgacaacctcccgctagttgtgcctattacaaggccagatagggatgatgttgtttttcagggtggatatcatgttggtgttaagggccaatatgctggtagcaaggatgagaagtactttatccataaccacctgatatttttagtgaagtatcacaaggatgaaaattcagatctctctagaattgttgggttcgaggtcaaaccatttagtgtaaaacaccaattcgaagagaaatggaatgatgcaaatactcgtttgagcacatgtcatccccatgccaacaaaataataataaactcagatactcctcaagaggttgaagctggaaaggatatcatattcacatatgatgttggctttgaggaaagtgatatcaagtgggcttctcgctgggacacctatctgcttatgacagatgatcaaattcactggttctctattgtgaactctctcatgatcgtgcttttcttatctggaatggtggccatgatcatgctccgcactctatatagagatatctccaggtacaatcaacttgagactgaagaagaagcccaggaggaaactggttggaagcttgttcatggagatgtgttccgcccaccaactaactctgacttactctgtgtctatgttggcactggtgtccagttctttggtatgctgctggttaccatgatgtttgctgtcttgggtttcctttctccatcaaaccgtggaggattgatgactgcgatgctgctcatttgggtcttgatggggctgtttgctggatatgcttcttcccgactctataagatgtttaaaggatcagaatggaagagcatcaccttgaagactgctttcctgtttccgggaattgcttttggtattttcttcgtcttgaatgctcttatatggggggagaaatcatcaggtgctgtccctttctccacaatgtttgccttggtgcttctttggttcggtatctcggttccacttgtctttgttgggagctatcttggtttcaagaaacctgccattgaggctccagtgaagaccaacaaaatcccgagacaggtcccagagcaggcttggtacatgaaccctgccttcaccattcttattggcgggattcttccattcggagcagttttcattgagctatttttcatcctcacttcaatctggcttcaccagttctactacatcttcggcttccttttcctcgtgttcattatcctcatcatcacttgtgcggagattgcaatcgtgctgtgctacttccagctctgcagtgaggattacatgtggtggtggaggtcctatcttacttcaggatcatctgccatctatctcttcctgtatgctgggttctacttcttcaccaagctgcagattactaaactggtgtcaggcattctgttcttcggctacatgcttctggcctcattctctttcttcgtgctcactggcacaattggtttctgtgcctgcttgtggttcacgagattgatttactcatctgtgaagattgactaggcgcagagttgctatacatccggcttccaatagttctgtatgattattgtggagaattgtgagacgaggatcagaatccactttgtattttgccgattttcaagaaaatttatatcgtagttcttagtttataaaccacttatgttcattcactataaatgagatgatacatctttgatatgaggttatataaggctaattacgattgtt

SEQ ID NO: 21761 - DNA, 1873 bp, Oryza sativa
  misc_feature (933)..(933): "n"=any one base of a, t, c, or g
  ref <308>: DATABASE ACCESSION NUMBER: AK099231
  ref <309>: DATABASE ENTRY DATE: 2002-08-28
gcagctggagagctagcataaacaaacccctctcactcccagatacctgctgctgccactagcccactaccatggatccttgcaagttccggccgtcaagctcgttcgacacgaagacgacgacgacgaacgcgggagctccggtgtggaacgacaacgaggcgctgacagtggggcccagggggccgatcctcctcgaggactaccacctgatcgagaaggtggcgcacttcgcccgggagcgcatcccggagcgcgtggtccacgcccgcggcgcctccgccaagggcttcttcgagtgcacccacgacgtcaccgacatcacctgcgccgacttcctccggtccccgggcgcccagacccccgtcatcgtccgcttctccaccgtcatccacgagcgcggcagcccggagacgatccgcgacccgcgcgggttcgccgtcaagttctacacccgcgagggcaactgggacctcctcggcaacaacttccccgtcttcttcatccgcgacggcatcaagttccccgacgtcatccacgccttcaagcccaacccgcgctcccatgtccaggagtactggagggtcttcgacttcttgtcccaccaccccgagagcctccacaccttcttcttcctcttcgacgacgtcggcatccccaccgattaccgccacatggacggcttcggcgtcaacacctacaccttcgtcacccgcgacgccaaggccaggtacgtcaagttccactggaagcccacctgcggcgtcagctgcttgatggacgacgaggccacgctcgtcggcggcaagaaccacagccacgccacccaggacctctacgactccatcgccgccggcaacttccccgagtggaagctgttcgtccaggtgatcgacccggaggaggaggagaggttcgacttcgacccgctgnatgacaccaagacatggccggaggacgaggtgccgctccggcccgtggggcgcctcgttctcaaccgcaacgtcgacaacttcttcaacgagaacgagcagctggcgttcgggccggggctggtggtgccggggatctactactccgacgacaagatgctgcagtacagggtgttcgcgtacgccgacacgtagcgctacaggctggggccaaactacctgatgctgccggtgaacgcgcccaagtgcgcccaccacaacaaccactacgacggcgccatgaacttcatgcaccgggacgaggaggtggactactacccatcgcgccacgcgccgctccgccacgcgccgccgacgcccatcacgccgcgccccgtggtggggaggaggcagaaggcgacgatacacaagcagaacgacttcaagcagcccggggagaggtacaggtcgtgggcgccggatagacaggagaggttcatccgccgcttcgccggcgagctcgcgcaccccaaggtctcccctgagctccgcgccatctgggtcaactacctctcccagtgtgatgagtcgttgggggtgaagattgcgaataggctcaacgtgaagccaagcatgtgaagaaactaaggcacaagaatgcatcatctcttgttaattaattggagtactaccaaccaaataaggccagacaatgtcagatgcacgcatcttctgttgtcgttgggccatcttttgtatgcatcctattgttaattactagtacataatatccaagtgatcatcagcaaggttacataaattctgtaatacgataaattaaaagaaaccaaaatggagcctgcatatgtgtcacttaattaatgtactggcgtattaatgccactgctgcatgttgtaatactccatcaaagagtctattactattaagtatttaaattatc

SEQ ID NO: 21762 - DNA, 1291 bp, Oryza sativa
  ref <308>: DATABASE ACCESSION NUMBER: AK072001
  ref <309>: DATABASE ENTRY DATE: 2001-12-06
gcctgtccactctactctagcctctcccaccaccaccaccaccaccaccactacacactttgctcatctcatctccctccttccctcctataggaatccaaacccgccgcatcccggttcatgtcctgccgctccccatgtcgccgcccctcgagctcgactacataggcctctcgcctccgccgccgccgccctcctcctcctccgccgccgccgcccgcgcggacgacgtcgacctgaagggcaccgagctccgcctcggcctccctggctccgagtcgccggaccgccgccctgcggctattgccgctgccgctgccactgccaccacccttgagctgctgcccgccaagggtgccaagcgcgtgttccccgacgaggccgcgctgacgccgcccactgccgccgccgggaagggcaaggcggcgagggagggggaggaggtgggggctgaggaggaggacaagaaggtcgccgcgccgccgcagccggctgcgaaggctcaggtggtgggatggccaccaatccgcagctaccgcaagaacacgatggcaaccaaccagataaagagcaacaaggaggatgttgatgctaagcagggtcagggtttcctgtacgtcaaggttagcatggatggtgcaccatctgaggaaggtggacctcaaaacttacaagaactacaaggacatgtctttgggtctcgagaaaatgttcattggcttcagcaccggtaaggaaggtgctgagaaccagaaagatggtgaatatgtgttaacctacgaagacaaggatggtgactggatgctggttggtgatgttccatgggagatgttcaccgactcttgccggaggctcagaatcatgaaaggctcagatgcaattggacttgccccaagagcaggggaaaagtccaagaacaggaactagaatggttattgcccacagttgaaagcaaaacggagatattaattaactgcagggcagttcctcaaaaccataatttaatagttttacaggatcaccatatgatctgtattacatggtttgctattctgcaagtaaaaaaaaaaactcttttaagactctgttatgttaggtttgcaacatctcctagagatgtacgctctattcggttgcacgtgtctttgtatgtgtagtatttccatccatgtaaatggttggtatgcagtgcgctaccgctattattgagcactcctacctatcctgcaagtgttgtcctgaaacgtatgttcccgtcacgtaagtgtttaaatgtttttaagaggttcct

SEQ ID NO: 21763 - DNA, 1903 bp, Oryza sativa
  ref <308>: DATABASE ACCESSION NUMBER: AK099232
  ref <309>: DATABASE ENTRY DATE: 2002-08-28
gcttctcatttactgcagaaggtgaaggtgaaggaggaggcggccatggcgagggagcaggcgctgctgttgacggagatcgtgaaccgcggcgtggagccgtcggggccggacgccgggtcgccgacgttctcggtgcgggtgcggcggcggctgccggacttcctccagtcggtgaacctcaagtacgtgcggctcgggtaccactacctcatcagccacggcgtgtacctggccaccatcccggtcatcgtgctcgtctgcggcgccgaggtcggcagcctcagccgagacgagctgtggcgcaaggtctggggcgaggccacctacgacctcgccaccgtcctcgccttcctcgccgtcctcgccttcaccatctccgtctacatcatgtccaggcctaggcccgtctacctcatcgacttcgcctgctacaaaccagccgacgaactcaaggtgtcgaaggcggagttcatcgatctggcgaggaagtcgggcaagttcgacgaggatagcctggcgttccagtcgcggctgctggccaagtctggcatcggcgacgagtcctacatgccgcgctgcgtgttcgagccgggcaccaactgcgccaccatgaaggaaggccgcgccgaggcgtccgccgccatgttcgccgcgctggacgagctgttcgacaagtgccgcgtccgccccaaggacgtcggcgtgctcgtcgtcaactgcagcctcttcaacccgacgccgtcgctgtccgccatgatcgtcaaccactacaagatgcgcgggaacatcctcagctacaacctcggcggcatggggtgcagcgccggcgtcatcgcggtggacctcgcccgcgacatgctccaggccagcggcgcggggctcgccgtcgtcgtcagcacggaggccgtctccttcacctggtacgccgggaagcgccgctccatgctcatccccaacgccttcttccgcgccggctgcgccgccgtgctgctctccaaccgccgcagggacttccaccgcgccaagtaccagctcgagcacatcgtgcgcacccacaagggcgccgacgaccgcagcttccggtcggtgtaccaggaggaggacgagcagcggatcaagggcctgtccatcagccgcgacctcgtggaggtcggcggccacgcgctcaagaccaacatcaccaccctgggcccgctcgtgcttccgttctcggagcagatcctcttcttcgccggcgtgctcttccgccacctgttcccgtccaagacctccgccccgccgccgccgtccgccgacggcgacgcctccgccgccgctccctacatcccggacttcaagcgcgcgttcgagcacttctgcatgcacgcggcgagccgcgacgtgctggagcacctgcagggcaacctgggcctccgcgacggcgacctggaggcgtcgcgcgccgcgctccaccgcttcggcaacacgtcgagcagcagcatctggtacgagctggcgtacctggaggccaagggccgcgtccgccgcggcgaccgcgtgtggcagctcgccttcggctccgggttcaagtgcaacagcgccgtgtggcgcgccgtccgccgcgtgcgccgcccggcgcgcagcccgtggctggactgcgtcgagcagtacccggctcgcatgaacgcttaagctgcagtggtaagtatgcagaggctaatgaacggaaaattactgcaacgtcaaaagacgggatcggcatgcgatgccggttaaggttcaagcttgattaatttgtgttggtgtattagcaagtcggtttatgagccatagactaccataaaagttgtgcgagacatgtgtactgaaccagtgtacgcgagttcggtgatatgtgaacttatctacgtttgattctatt

SEQ ID NO: 21764 - DNA, 3501 bp, Oryza sativa
  misc_feature (2695)..(2695): "n"=any one base of a, t, c, or g
  misc_feature (2705)..(2705): "n"=any one base of a, t, c, or g
  misc_feature (2708)..(2708): "n"=any one base of a, t, c, or g
  misc_feature (2716)..(2716): "n"=any one base of a, t, c, or g
  misc_feature (2728)..(2728): "n"=any one base of a, t, c, or g
  misc_feature (2732)..(2732): "n"=any one base of a, t, c, or g
  misc_feature (2756)..(2756): "n"=any one base of a, t, c, or g
  misc_feature (2772)..(2772): "n"=any one base of a, t, c, or g
  ref <308>: DATABASE ACCESSION NUMBER: AK072002
  ref <309>: DATABASE ENTRY DATE: 2001-12-06
ctttttttgggacggagggagtatgtgcagatggtctagcaactaatctgtccccagtagttcacatatttcatctccattctgggtaatagttgcttgcaatctgctttattcctcctgtgaagtatttactgtcagcagcacaccatattttttgttgtcaactaataataatcttgtgtcacaagcaacataacctgctatagattttctggttataaatatcctatgaccagtataaaccaaacactataaagatttttctccatgaatattctggtctctcacatgcacattgtagcacttaattgttcatgactatttaacaactttgcaaatgaaatactcctggctggttcattaagttagaaatagacttttcgaatactcatcaaagaaatcaaatgcagttcatgtttagttagctaacatatcgatcactgatttaagtttagctctctgtatttagatgcgtgacactttcatgattgctattccctttattaaagttcttcatcctgtgaactactggtagctttgacttgggggctaggtccctgtttcaccctttgtgccacggtgacatttctgatacttaattgcattttcgactgattgccagaatggcatattaaaatttaagtgcaagtttcatcttgctaaagatttcctatagactgtcactattttttttgtcattagcaatttagcattgcaagatttcctataaattgtctttgttatttttgcttaaaaatactaacgagctatagatagattttcttgttggcttaaaagaactaatgagctaatgatattatgctatagggtcctactaatgatgtgaaaatgttattatcctgtatatgctgcatattattggtgtcaactatttactaataagtgattctggctgacaacaatgttcttttggacatttctgtgaatctttaagcatatgcatgcattctgaaatatgaacatccccttctgtttactttgggaaaaaaatccgtgcgcatctcttttttccctaaactgttccttcctattgcagaggctgcaggatttgtacctgttgagcccatttaaatactctagaggaaatactggagaagaaggtggaggaggccaccgaaaggaagtttgatagttgtgcaagagctcttttttggcttagtaggtaaactcacacatagcatataatgggctttagttcttctcttatggagttttgctacctacaaatttcaaccttgcatacctcttcatattaatagttatcttctctaacatcactagatgcatggattcactattgcaccgcaaagctttgcacaccttgtagaaactgcatgcatgatcattctgaagtcattgcagcattggatctctttagcaacctatgattggtcagggtccattgaatctaagtgtaccattttttttttgtcgaaaatgactgtttttccatcgcacttgtcctgcacaactatgattgtattgatactgaattcaccttacaaagatcaaaatatttgcttttagtgaagttgcatattatctgctcatttttcaggccaagtttagattagacaggctgaaatcaacttgatggcaagtctaaaatggttgttccaatgtgttattatgtgatactgccttggtgagctggtttgtctatgcataaagattttcctttttgtgtcacagtagtattaccacgtgtctatggatcactctgtaaatgtcagaataaaaccccacgtatactagcttggatataggcgtggtttcaatgcagttccaagaatccacataagttttatcatccatttccaaattattcatccacatttgcatttcaaattaatttacagtaacacaaatcaagatctgtgcttaaaaagttataattgtctttagtacctcatagctgttatattactctcatttctcctccattgcattacggagaaatatcttcattgtcatgattttggacatgtctttatgtttaaaatagcatctgttgtatgtgcttgtttaatttatactagcagtgctgttgtacatgaatgaccatatgtacattagaaaatatgaagttctttgtacttagtccttaccattgggttcgacaatatgttgtctgtacagtacctggcttgtattaacggcaaggctatgatatcctttatgtattgaaattaccatcctacatgttcatggctcctttttatttgcttattcctgtttataaaaaaagatgcaattctctctttacatttgttgacttttgatcaatcaaattatataggacgagttgtatacaggaggcgcaaaagggtgcgacccagagcaacaacattgtttatggaacagtttctatttgcattgtaataaacaatcttacatcttcacgacttgaaattctttagttgatggcctccaatctaaatagttcttaacatgttaccagttactgctttctacaaagttatatttctgaatggtgtttttcccagaattcagaatcttaaaatctgtgctactggaagagttattatttcagtttgtttaattaaaatcaacttcactgcaccacataggcacatgctatgaatctactagagtatgaccatgtagcatttgtccatggccctgaatttgttgatgatttttttttgtaagnattgaagttnttntgatggtntgatttgactantggnttaatttggtgagaggaaaaattntgaacggagattcaanaattcaatcagaggaaaaaaaatatcagcagacagttcttgaaatttcatcatctgcaccagttgtgagagaactctttagtcctattcttttgtgccttgaaagttcgcgtttctaaaatacaagtacttccttttgtgctattgatttgtaatatttggtgtcagtcgtacaatatctgactaggtcattatcatttacacaataatttttatggtcattaactgcagaatcgaaagaaagcagaaaccaacaattttgttctccaaggtttgatctatgatcacaaggggacaagttattattctcaagaggattgggtaagtgtctcgaaagtgattctcttgtagccaagcttgttaaacaaaaatcaaggcccaccttggcactaatggatcttacaagcttgataaacaaaaatcaaggcccaccttggcactaatggatctccatccccatcaaggcccacctcggcactaatggatctccatcccctgttatgtgtagtactgtatttctgatttcctaaagtggtcttggtgaaggttgatgattgctttcactagtctcgttgtttctctgtttactgaatcatactaagatatgactgacatttaatagttgaaataagcttaggcttttagacctttcttccattatgtgtattgtatgcattattaatgtattaatattaaattctttttatgataacatccatgtttagtgacg

SEQ ID NO: 21765 - DNA, 1445 bp, Oryza sativa
  ref <308>: DATABASE ACCESSION NUMBER: AK072003
  ref <309>: DATABASE ENTRY DATE: 2001-12-06
ggttggtagctagcgagctcactcctcactcactctctgcccttcctttcctaccatacctctcaattattcctttcctaccatacccctcaattattagtaagatcgattattagtcccagttagttgctagctacaaggaattgaagcaacaagttgtagcagattgagagagagttgggaagaattacacaagaaatttagagaaatagtactagctagctagcaagaatatagatatataatgtcgatcaagcactgcgagcaacacaaggattgcgagcggcagcgcctgtaccggcgttgctgcgcggccatcttcggcatccttctcctcctcctcctcatcgtcctcatcgtctggctcatcctccgccccaccaagcctcgcttctacctcaacgacctcaccgtcgtctgcctcaacgtcaccaccggtggttcctacgccggcgccaccgcctcctccggctacttctccttcctcaccgtcaccatgcagaccaccctcgccgcccgcaacggcaacgagcgcgtgggcatctactacgaccgcgccgacgtgtacgccgagtacaagggcctccgcatcaccgtgccgacgtcgctgccgccggtgtaccagggccacccggacctcaccgtctggtcccctttcctctccggcaacaacgtccagctcccgccctacctcgccgtctccatcacccaggacgagaccgccggctacctgctcgtcaccatccgcgtcgacggctggatccgctacaaggccggcgccttcatcaccggacactaccacctccgcgtcaggtgccccgccctgctcatcgtcaacgacggccggggaagctacggctccaactccggcggcggcaacggctacttcaggttccagcgagccgccgcctgcgtcgtcgacgtctgatccatccatccatctcctcatcctcctctcatgcatccaacaaatcatatcatccttaattaattctcctccttccatatataattgcttgcttaattgatcgatctacattctacaagcacagccctgatgaagaagctatataattaaaagctcagctcaactgatcgagtgaggatcggagtaatcttgcatatatgcctgccaccagtggttttatgtatttacagtacgaattaatttgacctttttcttacttaattttcatgcctgtgttttttttggtactacgtacagtgccatgcttgtggctagctgcatggttcaggtgtacagctacttgtagtaataattcgcatatagagaggggataattaagcaattgctacaatcttgtaattactactagaatatataataattgtacttatcttcacatgcatactacatagttgcaacattgtaatcaattaatgttctgttcatttttcaacaaagagtgttcgtcttcaccttc

SEQ ID NO: 21766 - DNA, 1298 bp, Oryza sativa
  ref <308>: DATABASE ACCESSION NUMBER: AK099233
  ref <309>: DATABASE ENTRY DATE: 2002-08-28
ggttgctgtggtggttgccttggctgctttggagagttgggaggagcagcgagagagtgggggttgatggcggcgatggcggcggccgtggcctcgtccccctccccctcccccgcctccacccgcctcctccgcggccaccacccgcccccgtcgtgctcggcgccgtcgctgctccgcctgaccaggtcgtcgcggaggctacggctgcgcgccgcggcggcggcggaggaggccgacgtgctccccgggcctggggccgagggggagatggcgacgggcgggaggctggaggagcaacccgaggggccgatcgggggcagccaggtcgacatcggcgggctcgccttccagggcgacatgggcggaggagggttcgccggcgggagcgggggcgccggggccggcggcggggacggcaacaagatgctcgaccgcggcatcaacacggccatcgtgctcggcgccagcacctacgccctcaccaagctcctcaccgtcgaccacgactactggcatggatggacgatctttgagatcttgcggtacatgcccgagcacaactggtcggcttacgaggaggccctcaagaccaacccggtgcttgccaagatgatgattagtggcgtcgtctactccctcggcgactggattgcgcagtgctacgaaggcaagccgatcttcgagttcgaccgtgctcggatgttccggtctggcctcgtcgggttcacgcttcacgggtccctttcacattactactaccatttctgcgaggcactgtttccattcaaggattggtgggttgttcccgcaaaggttgtgttcgatcagacggcctggtctgcgatatggaacagtatctacttcgtggtcttggggttccttcgtttggaatcaccggccactatttccagtgagctcaaatccacgttttggcccatgcttactgccggctggaagttgtggccttttgcacacttggttacatatggcctagttcctgttgaacaaagacttctgtgggttgactgcgtggagttaatctgggttacaatactgtcaacttactccaacgagaaatctgaagcaaggaactccgaggacgcatccacatcaaatgcttccaatgacaattcaatatagcgaacggtatagccagccaagctgccctttaccttcatcattttgggcttgtatatattgtacaatttgtagctgcagctctgcaggtgtaacctttttgcaaagataaattaaacatataagatgtgtagcaactgccaaaggcaatcagaacg

SEQ ID NO: 21767 - DNA, 1489 bp, Oryza sativa
  ref <308>: DATABASE ACCESSION NUMBER: AK072004
  ref <309>: DATABASE ENTRY DATE: 2001-12-06
gttcatttttaaaaataaaattgtaaagagtttatttttaaaatattaaaataaaatggtttaaataataaaaaaagttcgtagtatgctacacacttgcttcttctgaggaccatagttccctcctggactgcccaaaggatcttatcgtgggatgtactatgaatagctagagaacataagatgtttgagtccaatgctatatggacacatgaagtaaactaccaactcaacatcatgttaacatctattttgccatattggttttgtgtttctttcttcgtttggtagggcaatgggctcaaatattccaggaaataacatcgtggggaaacagatggtttttgtctcagagattgaagagaaaaatggcaagagtaaagtttagaagaacttgtcatgtagatccgcattaatcaaatttgggagatcccacataacgtcaactgctccaaaatatagaaagactactaaactaaaacaagtttctagatacaacacagtttaatgttaaccttccagagttgctaggtctttcttcattacgaaaaagtaactttttttgcatttgcatttaaaagtactgtgtacttcagtaacaaggtagcttatcattcatcattcaacaagctatgcttatcgctttagattagaagcactaagataggtaatcactcaggaatcaacaaggtatgccaattacattggacgcactgcaaatgcttccacggtagctgaattgttttattacttggtcttatccatgcaggtatagtaccttttgcagctatccaccagagatggtaaaagagatgccgaagaaagttcttgtcaaagaggtacagagacttcaattagctttgggggagcaaaccaaaatggctaagcttagtcaacagcagtgtgataagctaaaaaatgaacagatcctatgtcggatatgctttgagagagacatttgcatagttctgcttccatgccgccattatgttctttgcgaagcgtgctctgataagtgccggtcatgcccaatttgtcgagtgagtattgagaacaagctacctgtttgtgatgctatgagttcagctgattcaataagtgatacagtctagatgttcacatgtcgaccacagttctaggaatttatgttacctacttctcgagccagcgaagatgaccacagagaggaagtcaaattgttttggctatggaattcaaaggaatgctagaataagtcttttgtgtcagagtagggtacaagaaaatcagaaggcttgctcgctaacccacacataaccctgagtgatatgacacaaaggaagcaaaagaagcgtgcgagttcttggaatcttttcttgcatatggtgccaacatgaaaatccacttaaatcattgaattctgaggcacaattcgctagttcggatgtttggtttcccatgtaaggaatcttaccaactgagggcacagttaagaaaaatcttgtgcagc

SEQ ID NO: 21768 - DNA, 2366 bp, Oryza sativa
  ref <308>: DATABASE ACCESSION NUMBER: AK072005
  ref <309>: DATABASE ENTRY DATE: 2001-12-06
tcgaccatcgcgcccttctccgtgcgatgcaagctccaggccaagctgatgcctccccacccgagcctacaccgcctctacctcacttgcttcaacgagtacaagagcgcagtggtagtagttggagatgaggagctacacctagtggcaatgccgagcaaggtggagaaggtgccatgcttttggtgctgttcagtacgctctgggatctatgcagcatctgttgggatgctgaacttgcggtgccttgctatcgtatttgatctcgatgaaacccttattgtcgctaacacaatgaagtcctttgaggaccggatcgagatgctttcccgtgagatggatattgaagacgaccccgtcaggatagcagggatgtctgcagaaatcaagcggtatattgaggacagggagctgctcaaggagttcattgacacagatacagttacagataatggcagaatcgttgggacccaaaaggaggaagttctgcctatctctggtgggcaggagcgtgttctccggcctgttatcaggctgccagaaaggaatgcgattctaactcgcataaatccagaggttcgcgatactagtgtttttgtaaagctaaggcctgcttgggaggatttgagaagttacctgactgctaagggacgcaaacgatttgaggtctatgtatgtacaatggctgagagagattatgctcttgagatgtggaggcttcttgatccagaagccaacttgataagctctcataaccttgcagagcgtgtagtatgtgtaaagtcaggttcgaaaaagtgtctgcagaatgtttttaaagacaaaggatgccatccgaagatggccatggtaattgatgaccgactgcaggtttgggatgagaaggatcaacctcgagttcatgttgtcccagcatatactccatattatgccccacaagctgagatggcaaatgctgtgcctgtgctttgtgttgcaagaaatgttgcttgcaatgttcgtggtggtttcttcagagagttcgatgaaaatctattgagaaaagtgtttgaactaatgtatgaaaatgagttgctagatcttccatatgctcctgatgttggtgactactttagtctgtgaggacactaattttgcaccaaacaataaggatgttgcccctatacctgaggggtatgagtggagctgaagtagggaagaggttgaatgggctggcatatcctagagaccagaacaaatatccaatctaacgggggatcattggcaacaaccccctcattatttgtcacggtgttgcaagaaattggacggctgtgcgaatccagggtggagttcaggtctactgtaagcagtggaaaaaacatgcaattttctgttgaggttctatttagtaatgaaaaaatcgggatcggcattggaaaaacaagagatgaagcccaagtactagctgctgaaaaagctctccagaatttggaaagcaattacttgtcattcatggctcctgttgctggagttcttaataaagatgtgaacaagcctcctgggagtggaaatggctttctcgaagatattactctctcagaggatatttctatggaagagccatctggaagtacattaaaagaacaggatcattcaaaagctttggataggttgtcctctgttataagtcttattagagaactttgcttggaggaccaacatgtagtatttcgcgatcaagtacgggattctggctcagcattaaatggagaataccatttccaggctgaattaggaggacaaattcttgggaggggcattgatttgaacaaagattttgcgaagcttcaggctgcagaagaggcgctgaagaccttgaaaacaactacggacccacaaatcaagaagcatttgagaccagtaagatgcaacagctgaatttccccttatatcccacagaggtgagtttgataatgttgaaatgtgaggccagctgttgataacatgccattttcaaaattgtggcattctggcaatccattggtttattactggaagcgcttctccaattatggttggctggctgcctcttgaaccatgattttcatgcaaagtgttttttgcctctccgagtttagaaggtgataaattatagagaattgggcatggtgcatcgtggattctgttgaccttggaccgtttgctccatacaaccaaagctgtaatcttcacaggatactggcgtagttggatagctgtaaacaggtaggggtaggggtatgtcatgaatattgaatgtttccttgacggatacagttatttgtaaacaagttagtttaattaaagtggaatgtccacgctgatatttcacgtttacatgtttt

SEQ ID NO: 21769 - DNA, 2942 bp, Oryza sativa
  ref <308>: DATABASE ACCESSION NUMBER: AK072006
  ref <309>: DATABASE ENTRY DATE: 2001-12-06
ttggagcgaaaaaaaaattggaaaagcgcgcgacttcgatcccggccgctgcccggccggtgacttgccgccggcgaccgccccgcaccccgccctcccgtcgcccgtcgcccgtcccgtcgtgccgccgtcgacggtcgaccggcgcccatcgccgcatcagcgcatcgcgctgcgagcgtcctgcgccccggccgcccggtgacctcgtgggggtgactcgccgccggcgagagccctgcgccccgcccgtcgcgccgtgacaccgtcgacagtcgaccgtcacccgttgctccatcgcggctccacacacaagcgctgcgattccccatcgccgcttcaagccctaggcccctacttcgcgatctgtcgctgcttcagacaaggacgatcgtcggcctactgcagcaagtacaaggtatgttcctatcgctacccacccttctcacctcaatcgtgataggatttgagaaatttgcttgatctattggttaggagatgtttggtgctgtgtagatgctttacattagacctgaatagaatctgatctaatcatagtgacctcaatggcgatttatagtgtgtgttattattggttggatcctaggattcacactggaattttggtcctatgtgcagaactgaacttttgaaatatcagagtgcaagcatttgaatgtataaatccatttgctagatacatattactggaacttcatttgatatactttgtgcagtttgtagatacatgcctacgtataaattctctgaaatgctctgacatttttatgtagactttggctgtaatataaattctctgaaattcgtatgtcttgattcttaaattgctgtgataagttcttcttttctaggaagtacagtactgaattgtgggttgtacaatacttaaattataaaatcatccctagtatatttttgaattaatccatgagttgtttcgaagagctgtagctgtacaatctgacctatatagtaaaaaaatgttctactcttgatttagaccatatgctctgatatggatgacctaatatactgcctatatatgcatataagttcagaaacttctgtagattgttctgaaaatctgagattgcagtagtgcttgttctgaactttggttttcaatatagtataaatttggttttcaatttttgacatttcccagaacaatggctgtagtataaattatctgaaatggatattttcaattctctgaaatggctgtagcactgaaatctgaatagtaggatttgttctgggttctctgaaatctgaatatatatagcctgctcaaaaaaatatatagcttgctcgatagggattaacatgcttatatttacttcagtctttcctgtaagcaaatttcataacccaaacaacctaagtctttcctggtctctacaaaattcataacccaaacaacctaagtctttcctgctgatttcatatgtgttattgctatgcatgatatcaaggcaaagcctctttttaggctggttgcctgattgtaatggtttgataagagtatactggacgtttctttttctttacacttttgtattctttaacagagcacaaaacataattggaacatcatggataaagggtggatgaaagcatcgagatctagtattgaatataatatcggggttaataaatttatagacttcgccttgtccacttcagctagtgacaataggattctttgcccttgcaaaacctgtgggaatagatattggttaggtgaacatgaggttcgagagcatctgatttgtgatggattcttggctgggtacacctcatggattcatcatggagaaagcatgttgaattccaaaccaagtgatgcctcaagttcacactgtgaagaacataatgatgacatggaccaaatgctacttgatggcctcgggatgtatgacattcgtactttagggacaaatgatggaccaaattcatagtttgttactccaaggttgcaaaaatttagatgctaaatattactccctccatctacttttgataatcatatttcatcttgacacacagaccaaggataagtgattctacttatcattcatttaaatatgctactagtcattcctcgtaaacaagcgattcattaatatttacatttctcgatgcccatgcaaccaatcttgtgtggaagaatgaagagtcatgcattaaatccaagaaagtcattaagatgaaaagttgttggattgaaatatgactatcaaaaataaaattttcagatttggaaatatgactatcaaaagtagatggagggagtatttgtacccaattctaggtgttaactgctgttagacacatctcatctgaccaaggagacatatctgcaccaaggagacaaatacatgatctaacatacaaggagaacataggacatgaagatgtacattctaggacaagaagtcttggaaaagccagcgctggttccttaagtgctatcaagttcagtaatacccaagttctaacaacttcacggttctagcttatgaaagtgaagcatattattttcgctgtatggttttcttcacatggcttgcaaatgcaacataccaccaataagaactggaagctatactgtcaagattttgtacaaagtgcaatatagacacttgtgattgtgtgatcatcatatgctggaggatgaaaacaaattgcactttacagtagcatcatgtcattcttgttgattatagttttgtcctgtgactgagaaatcattgttgttattagtttttgatcttaaatttgatttctgtatttgagttgcaatctcatattggtatgctcacaatttgtttgcgagcgcattgtggaaaagaccactaattactaatgatgcaatgaacgccatggatcttcttgctggcattttaaaaaatgcctcc

SEQ ID NO: 21770 - DNA, 1819 bp, Oryza sativa
  ref <308>: DATABASE ACCESSION NUMBER: AK072007
  ref <309>: DATABASE ENTRY DATE: 2001-12-06
acggctacaacgcgctccagtgggccacgctcaacaactacccccacgtcgcgctctacatcatcgagcatggaggcgacgtcaacgccggggacaatgcgcagcagacggccctgcactgggcggcggtgcgtggagccatagctgcggcggacgtgttgctggagaacggtgcgagggtcgaggcggccgatgtgaatggctaccgggcagttcatgttgcagctcagtatggacaaacagcattcttgcaccacattatctcaaagtacggtgcagtctttgagtgtttggacaatgatgggaggagtccattgcactgggctgcctacaaaggaaatgctgatacaattaggttactgctgtttatggatgctaatcaagtaaggcaagacaaaaatggttgtactccattacactgggcagcaataagaggaaattatgaggtgtgcactgttcttgtacatgctggtaccaaggaggaactcacattgaaggatagcggtgggtttactcctgtggaacttgcaaacgacaaaggtcatcggcatctttcctatatcctttccaatgctacaaaagtaacatttgaagacaagtactgctcagggagatcgcggaagattggatatgcttctatcctgttttgctttcttattgtccttatcaccctttttctgaactcaattatttttgcaccgaatttttctagaataactgccgctgttggtatttggtcatggggtgctatttctcttgcctttgcttcattggtgatgttctacagagtaagcagaaaaaatccaggctacatccaagccaataccaagcgacttgatccaaaggaaccacttatggagattgaccttaattcttctgcttggacaggcaattggtctcagttatgccccacatgcaagataattcgcccaatgcgctccaaacattgtccaacttgtaagcactgtgttgagcagtttgaccatcactgtccttggatatcaaattgtgttggaaggagaaataagtgggacttttttgtgttcctttgtatgggaacaactacagcatttctgggcgctgcgattgggttccacagactttggacagagcccattatactctcatcttctgagtcatggattaacttcatgctgtcaaaccatcctggtgctgtactgttcatgttcatggatgtctttttattgactggagcgcttattctgacaggagcacaagcaacacagatagcacgcaatctcacaactaatgaagcagcaaaccagtcacgctatgcatatcttcgggggcctgacggacgcttcaggaatccttacagtcgaggatgccggaggaactgcgctgattttcttgtaaatggatacagtaatgacgaggaggctgcatggccaacgcttcaacaaacagtgcaacgaagctagtcacaaatttctggagcaaataccagtcttatacagtcacacagttcataagatccaggagagaaggtttgaacaattttctgacttggatggacaacaacaggtgcggaaagcgatctcccctttgagccactctgcttcatccaggtgtttatacaaggttgagtcatgggaatggtttgattttgtagattatgtgtatgtgctatatatgtattcttttttggcggttacatcactattaccatacatatcgtgttgtattcgatttcgagtgccaatagatgagaaatgcaggtttgaacttctgatgtataataatctgtaacattagatgctttcgtgcaagtagacaaataccctgagaaattttcacc

SEQ ID NO: 21771 - DNA, 2077 bp, Oryza sativa
  ref <308>: DATABASE ACCESSION NUMBER: AK072008
  ref <309>: DATABASE ENTRY DATE: 2001-12-06
ggttcgcctcctccctcgtcgagacctcgaagctgtgaaaagaccagaatacccctcatccccaaaagccccaaacccgaggaggcgagaggaggaggaggaggagctcgtcggcggcgagcgatggcggcggcggtggcggagctgtgggagacgctgaagcaggcgatcgtggcgtacacggggctgtcgccggcggcgttcttcaccgccgtggcggcggcggcggcgctgtaccacgtcgtgtcggggatcttcgcggggccgcccccgccgccgccgccgcggccgagggacgagcccgaggcggagccgctcccgccgcccgtgcagctcggggaggtctccgaggaggagctccgccagtacgacgggtccgatcccaagaagcccctcctcatggccatcaagggccagatctatgacgtcacgcagagcaggtccgttccttacgtctccgaaatcatatccttttttcctttgtgatcgctgtgatgatgctttcgatttgggaggtggttgcatgtttctactgtagtctgtcaattgggtaatcgattctgcccccaaaatgacacttctttttgaaaagaaagaaaataaaatacttttcacagatgtaaaccatagtacctacccttttcgattctgcagtgctccaggtgagaaaaattgaggtttgttcgaatcataaagtttctgatgtgtgtagttatcatcaccctaagatttagcaggtttcaggtgtgtcatgtttgttcagaatttgtttgcaatggtggaatgattcagtagattatgttgggagaatgcaaactagcccaaaccctctagatacttgaatagtcgacagttaaccaatctggagaaacgtctcaattcatggcagcactgataataggaggtgaagaaaatcagatacaaactggggagaaaaaagaaataagcgaataaaaatcgtgcagaaaatgacagcaatcaagttaggtttgaattttgggctcaccaagattccggaccgagtagcaagtgatgactttttgtgctaggtcattgaacataacatatactcctgacatcagttgcctaatgtttcatagtgttacctcatgacttcttatttacaaatgcttaataattagtcattgctgttaatatgttgatgatccgtctcatggggagttgaaaaggaatgtcctgctctttatgctgggtaataggtactctggactgaaagtctgaaagaattagataaagttgtttgctgatcttagttttttttaatatagaagttcaataatgctacaagataatatatgagttctctttatcctttgctatgcaagatgcagttgctggtggtgcacctatatttgtgggtagatgataatattaattttggatatcttggatctattgcttggaagctttaactttttaacttacattattgcttatacttttccaatgacaatcatttctttgctacactgtttcccattcaaaacacatggacagttgtggctttttaggtgagggattgtgctacatgatgtctacataatatattcatagtctcaggatatgcatgtttatttgtgttaggaattgttgcattgcccctaatattctgttttgaaagtggatacttaaatattttttaactgtgtttctaattaccattcacattttgacggccatatgcaggatgttctatggacctggtggaccttatgcgctattcgctggcaaagatgccagcagagcactcgctaagatgtccttcgagccccaggatttgaccggtgacatctctggtcttggcccatttgaactcgacgcattgcaggactgggagtacaagtttatgggcaagtacgtgaaggtcggtaccgtcaagaagaccgtccctgttgaagatggtgccccaagcacttcaccagaaacaactgaaaccgccgctgccgctgagccagagaaggcgccagcaaccgaagagaagccgagggaggtaagctcggaggaagtaaaagaaaaggaggatgctgttgccgctgctgcacctgatgaaggcgcc

SEQ ID NO: 21772 - DNA, 1883 bp, Oryza sativa
  ref <308>: DATABASE ACCESSION NUMBER: AK072009
  ref <309>: DATABASE ENTRY DATE: 2001-12-06
caacacaatcttctacgacgccggctcgcccctcgcccctcgcttgaacgcttagagatacagtttttgccgcgctagttgatccctcctgcattcgcaccatggtggaggctgcctcggctgcgccggcgacggtggtcgttccgctgacgcagacgctctgcgcgaatgcgcctgcgacgagcgtcaccgtcgtttcgaagcagaccgttcggcccgacggcgcgtcggcggttggagacgtcaagctctcggtctccgacatgccgatgctgtcgtgccactacatccagaaggggctcttcttcccgccccctggcgtgccgatcgcctccctcgtgtcgtcgctcgtgtgcgcgctctcccgggcgctcgcggtgttccctgccctcgccggccggctcgtcacgctggatgatggccgcatcgtcatccggtgcgacggcgtggccgttgagttctaccacgcggtcgcgcccgctctgtcgctgggagacttcctcgtgcccaacgccgacgtgccgaccaggctgacgaaggatttgttccccatggaccgcaccgtgagctacgacggccaccgccgtccgctcacctcgttccagctcaccgtgctcggcgatggagctgtcttcgtcggcttcgtcgctaaccacgccgtcgtgggcggcacctccttctggcacttctttaacacgtgggcaggtctctgccgcggcacgccggtccagccgccgggcttgcgccggaacttctttggcgactccacggccgtcatccgcttccccggtggcgcgggtcctgccgtcaccttcgacgccgacgcgcccctccgcgagcgagtcctccatttcagcgccgccgccattcgcgagctgaaggccaaggccaaccagtggaaaagatccgacaaatttgccgaggctaacgggaagcatgtggatgaaacgaaggctcatggcggttacagagagatctcgtcgttccaatcgctgtgcgcgcatatctggagggcggtgacgcgatcccggcggctgctggcggccgacgcgaccacgacgttccgcatggcggtgaactgccggcaccgcctgcgcccggcgatctccccgctctacttcggcaacgccatccagagcgtagccacaaccgcgacggtggccgagctggcgtccaacgacctgcggtgggcggcggccaggctgaacgcgaccgtggtggcgcacgaggacggcgccatccgccgggccgcggcggagtgggaggccgcgccgcggtgcttcccgctgggcaaccccgacggcgcggcgctcacgatggggagctcgccccggttccctatgtacgacggcaacgacttcgggtggggcagggcgatcgccgtgcggagcgggcgcgccaacaagttcgacggcaagatgtcggcgttcccgagccaggctggggacggcagcgtcgacgtcgagttttgcctcgcgcccgacaccatggcccgcctgctcggtgaccacgagttcttgcagtacgtgtcgcgtgcaccgtgacgcacgtattctggtgtggtgcagtgagcgaggggacgatcacgagatgcgagttccccacatgacatgattatctctctggtggtgatgcagattgcagtagccgctggacacatacgttgctgtgctggattggtgtatgcttgcaaaaatatctaagctatatatccgagtatccgttactcttctggtattccatccattaagcggttggccaagtttgaacagccgcacagagagttgcttttaggatcaagtggagtcgtgctctgttccttcctccctgttagaagtacttgtcttgtgagttcgatggataattatttgagtacaaatttc

SEQ ID NO: 21773 - DNA, 1466 bp, Oryza sativa
  ref <308>: DATABASE ACCESSION NUMBER: AK072010
  ref <309>: DATABASE ENTRY DATE: 2001-12-06
gcttctcttctcttctctctctcagtctcactctcccaatccgcctcggcccgagcgcgcgcgcgctttccccccctcgccgccggcgacgagctcgaggcggcggtgcgctcgcctacctccggagggcggagcggggggatggagcccatgagcgtggacggcggcgggggatgcggcggcctggacacgcagatcgagcagctgatgcagtgtcgcccgctcgccgagcaggaggttaaagcactgtgcgagaaggccaaggagatattgatggaggaaagcaatgttcagcctgtcaaaagcccagtaacgatttgtggtgatattcacggacaattccatgatcttgtagaactttttcggatcggtgggaagtgcccagatactaattatttatttatgggggattatgtggatcgtggctattactctgttgagactgttactcttttggtagcgctgaaggtgcgtcacccacatcggattacaatccttcgcggaaatcacgagagccggcagatcacacaggtttatggattctacgacgaatgtttacgaaagtatggcaatgcaaatgtatggaagatattcacggatttatttgactattttccactgacagcactggtggaatctgaaattttctgcctgcatggtggtttatctccatcaattgagaaccttgatagtgtgcgtagcttagatcgtgtccaagaggttccgcatgagggaccaatgtgtgatcttctatggtctgatccagatgaccgctgtggttggggcatatctcctcgtggtgctggctacacttttgggcaggatatatccgagcaattcaatcacaccaacaatctcaaacttgtagctcgggctcatcaactagttatggaaggatataattgggctcatgaacaaaaagttgttactatattcagtgctccaaattattgttaccgatgtgggaatatggcatccattttggaagttgatgactgcaacagccatacttttattcagttcgaaccagctcctaggagaggtgagcctgacgtgacacggaggacgcccgattatttcctttgagttaatggtgctaccatttgtcaccttgtactgcgaatttgcgatagtcaaatgctggtcagtgatactttgctggactgtgaaacctgcgcataggccaaccaacaataacaagggaacatcagatcccttcgtaaaacttgaccctccattggtcaatgcaagagatgctgctatcctgaaacaaagtgtcatgctcatgcagcgatgcctgagtttttcaggtgataaaaaaggcccatccatcctcaccctctcctttttaggcatttttacagaggaaatctagtggcaagactgaacttctatttgtattttgtagcgtaagcttgtatcgatagtcttgtaatttgtatcatcaatggcaaggcaacctaatc

SEQ ID NO: 21774 - DNA, 1911 bp, Oryza sativa
  ref <308>: DATABASE ACCESSION NUMBER: AK072011
  ref <309>: DATABASE ENTRY DATE: 2001-12-06
ttctgccacatctcaagaacataagtcttgttcacctgcgcaagtttgctgagttgactttgcgaagtcctgttctttcttacattaaagtttccagatgctcagtacttcatcgtgttagcataacatcaaatgctcttcagaaattggtgttgcaaaagcaagagagcctatcaagtttgtcattgttatgcaacaacttgatcgatgtcgatcttagtgactgcgaatcattaacaaatgcagtttgcgaagttttcagtgatggaggtggttgcccattgctcagatcattgattcttgacaactgtgagagtctgagcactgttgaactgaatagtagttccatggtcaatctctctcttgctggttgccgctccatgacattactaaaactttcatgcccaaatctgcaaaatgtgaatcttgatggctgtgatcacctcgaaagggcgtcattttgtccagttggtcttgaatccctaaaccttggaatatgtccaaaattaagtgatcttcacattgaggccccaaagatgtctctattggagctgaagggttgtggtgttctttcccaggcatcaataaattgccctcgcttgacatccttagatgcctcattctgcaggaaactaatggatgattcactgtctcaaacagcagaggcgtgcccgctaattgaaaatcttatcctgtcatcatgtgtatcaattgacctcaatggattgtcctctttgcattgccttcataagctggccttgcttgacctgtcatacacatttttgaccaacttgaagcctgtttttgacagttgcccacagttaaagatcttaaaactttcggcttgcaagtatctcagtgattcatcattagatgccctatacagagagggtgctcttcctatgttggttgagctagatctgtcctactcatccattgggcagactgcaatcgaggagcttctttcatgttgtacaaatttggttaatgtgaatctgaatggatgcacaaacctgcatcagttggtgtgtgggtcagatgactgcagttctggtgacatgcctgttgatgtttgtccacctgattcagcaccagtgaggagtgaagagatcagtgaaaggtctgatcgtctgcttgaagttctgaattgtactggttgtccaaatattaagaaagtcatcatcccttcaatgacaacctatctacgcctgtctaaaatcaatcttaatctgtccacaaatttaaaggaagtggatttgacatgctccaatctttatactttgaacctgagcaattgtagctccctggaggttctgaagcttgattgcccaagactgacaaatctccaacttctggcatgcaccatgttgcaagatgaggaactagaatctgcaatatcgcgctgcagtgcattggagattctcaatgtgcactcttgtccaaagataaatgtgctggactttagcagactgcgtgtggtttgtccaagcctcaagcgcatccaaagcagccttatcacataatttgaggctgcgattatttcgaggagagttattgaggcaatagtttgcatccgtgcggccccttccatggacgcgggtgattctagcttagattcagaaacaacaacaaaaaagaagcccttcatggcactcttgtacatactagtggcggcagcatcaccattatatttaatggcaacgtatattaggagccagggggtgacgcgagccgcttctcagttgattctcgtgcggtaataagtagtaccatctagctgaatcctggtgggtgttcgaacttgtaattgtttctgtttccttttcttacctcctgtattccgctcctatggagcgatcagatctgtattccggtttacatatgcgttaataatcatcttggttggatctg

SEQ ID NO: 21775 - DNA, 1859 bp, Oryza sativa
  ref <308>: DATABASE ACCESSION NUMBER: AK072012
  ref <309>: DATABASE ENTRY DATE: 2001-12-06
gagccataggataacaaacgcacggttctcatcttccatcgtcactcaccgacaccatccgtaggtcttccaggagctccttcctgccacgtcatcaatggcgatgatgggtggctgacagtcaaacgcaccccacgcctcctccccttcccccctctctccctccatggcttccctcgcctcccctcctctcccctgccgcgccgccgccaccgccagccgcagcgggcgtcctgctccgcgcctcctcggccctccgccgccgcccgcttcccctctcctctcctccgcttcggcgcgcttcccgcgtgccccctgcaacgccgcacgctggagccggcgcgacgccgtgcgggtttgctctcaagctggtgcagctggaccagccccattatcgaagacattgtcagacctcaaggattcctgctggagatttttacggccacatacaattcgaggaactgccttgggatccatatcattagttggctagagctttgatagagaacccccaactgataaattggtggttgggattcaaagtgttctatgggctcgtggcgttaatctgtggcaatggttacatcgcgtgggatcaatcatatctatgacattagaatcgataaggtatacatgccatatttaccaattgctgccggtgatctctcagttcatacagcatggctattggtgatattatttgcgtttgccggattttcaattgttgcgaccaactttggacctttcattacctctttatctcgccttggtctatttcttggcaccatatactctgttcctccattcagacttaagagatatcctgatgctgcttgtcttatcattgcaacggtccgtggttttcttctcaactttggtgtgtactatgatactagagcagcactgggtcttacattccaatggagctcgcctgttgctttcattacatgcttcgtgactttatttgctttggtcattgctataaccaaagatctcccagatgttgaaggggatcggaagtatcaaatatcaactttggcgacaaagctcggtgtcagaaacattgcatttcttggctctggtttattgatagcaaattatgttgctgctattgctgtagcttttctcatgcctcaggctttcaggcgcactgtaatggtgcctgtgcatgctgcccttgccgttggtataattttccagacatgggttctggagcaagcaaaatatactaaggatgctatttcacagtactaccggttcatttggaatctcttctatgctgaatacatcttcttcccgttgatatagagaccaagcaatctgatatggtctgcatgttgagtgcggcaaaaactagaagcccatatgaacagtgggagtaagggaacgaacatgccatccatgggaagactctgataactctctctcgcccgggctgtaaagggtaagcactgttgtgcatatatatgaaaggaaggtgataaagcagggatgctaaattgctactgggatccttaaaggcttatagtggtcaccagtggaatgtgccttaataatttggttacctagcagagcaagtttttgcaggttattaggtaatatctttgagggaatgaacttagatttcattgttttaaggtctggtcacacaacgggtagtagttctggagcggcaaaagacgaccttgttttacactaccaagggaggttaactctagttttcatgtgaccacttaccttgagagttgagaccatggaatcacttgtcgactcctcggcttgtatatttctagtgtcagcatttgcattctcctccacacttgtacttgaagagttgaagacaacttttttgtttgtgt

SEQ ID NO: 21776 - DNA, 1418 bp, Oryza sativa
  ref <308>: DATABASE ACCESSION NUMBER: AK072013
  ref <309>: DATABASE ENTRY DATE: 2001-12-06
ggctactagctcagacagcaatggaggtcaaggtattgagcagcaagctcgtcaagcccgcctacaatggcggtgtcgccgcggcccccgacgtggagtatattcctttgtcgatcttcgacaaggtgacgtacaagatgcagatggcgatcatctacgcgttcccgccgccggcgccgtcgacggcggccatcgagaaggggctcgcggcggtgctcgcgcagtaccgcgcgttcgcggggcagctcggggagtcgcccgacggcgaggcggcggtggtgctgaacgaccgcggcgcgcggctggtggaggcggcggtggacgccgacctcgtggacatggcgccggcgaagcccacgccggagctgctccggctgcacccggacctggagggggagctccaggaggtggtgctgctccagctgacgcggttcaggtgcggctccctcgccgtcgggttcacctccaaccacgtcgtcgccgacggccacgccaccagcaacttcctcgtggcgtgggggcgcgccaccagggggctccccatgggcgccccgcccgtgcaccaccacgccgccctcttcaagccccgcccctcgccgcacgtcgagcacgaccaccgcaacagagagtactacctccccgccgccggcgacgacagccacggccacggcgacggcggcgcggcggacaacatcgtgatccacaaggcgcacttcaccaaggacttcatcgccggcctccgcgcggcggcgtcggaggggcgcggccggccgttcagccggttcgagaccatcctcgcccacctatggcgcactatgacgcgcgcccgcgggctcagccccgacgaggcctccaccatccgcctctccgtcgacggccgccaccgcctcggcgcgccggcggagtacttcggcaacctcgtcctctgggcgttcccgcgcgccaccgtcggcgacctcctcacccggccgctcaagcacgccgcgcaggtgatccacgacgaggtggcgcgcgtcgacggcgcctacttccgctccttcctcgacttcgccctctccggcgccggcggcgacaaggaggggctcgcgccgagcgccgtgctcaaggacgtgctgtgcccgaacgccgaggtggacagctggctcaccttcccgttctacgagctcgacttcggcaccggcagcccgacctacttcatgccgtcgtactttccgacggaggggatgctgttcctggtgccgtcgtacctcggcgacggcagcgtcgacgccttcgtccccgtcttcaaccacaacctcgaggcattcaaggagtgctgctactccatggagtaaaattcaaaatcaaaatcaaaatcaaatcatttattcgttattattattgattatggagtaataataataagttaaatttttatt

SEQ ID NO: 21777 - DNA, 1430 bp, Oryza sativa
  ref <308>: DATABASE ACCESSION NUMBER: AK072014
  ref <309>: DATABASE ENTRY DATE: 2001-12-06
gctgctaacctcgccccactttccccgcctcgggtcgcgccgccgcgtccccgccgcgccgcgacgcgacgcaacgcatgccccccaacccgactccgccgcggcgcgcgacgacgacgacgacgagggcgaccagcggcgtccgccggggggaggaggagcaggggggcatggcggtgtcggcgtcggcgggggaggaggaggaggcgttcgaggaggtggacccgacggggcggttcgggcggtacgccgacgtgctcggcctcggctccgtgaagaaggtgtaccgcgggttcgaccaggaggaagggatcgaggtggcgtggaaccgcgtgcggctgcgcgcgctcgccgaccgcgacccggccatggtggagcgcctccacgccgaggtgcgcctcctccgctccctccaccacgagcacatcatcggcttccacaaggtctggctcgaccgcgacgccggcgtgctcaacttcatcaccgaggtctgcacctccggcagcctccgcgagtaccgcgaccgccaccgccacgtctccgtcaaggcgctcaagaagtgggcgcgccagatcctcctcggactcgaccacctccacacccacgacccctgcatcatccaccgcgacctcaactgcagcaacgtcttcatcaacggcaacaccggccaggtcaagatcggggacctcgggctggcggcgatcgtggacaagacccacgtggcgcacacgatcctgggcacgccggagttcatggcgccggagctgtacacggagacgtacacggagtcggtggacatctactcgtacgggatgtgcgtgctggagatggtgacgcgggagatgccctacgccgagtgcgacagcgtcgtgcagatctaccacagcgtcacccggggcgtcccccccgccgcgctcaagcgcatcagggaccccgagctccgcgccttcatcgagcgctgcatcggccagccccggaaccggccctccgccgccgagctcctccgcgaccccttcttcgccggcatcgacgacgacgatagcaccggcacgctcggctagcctgttaaccagctgggtagtactagaaattattgtatgtgaattcgattggaaacaaataaacgttctaaacgaattaagctccagcgagtagcaaatgtttataggttcatgtctcaccggcgctcgagctgtagcctgtagctttggatgtggttaattagtggctagtactgtagtatttattgtactgtttgttctttggtttgtactgatttgattcatgagcttcaaagaaatggaagatgaggagctgtatttggctttggctttgcgtgtcaaatgtgtcacaatcctttcaaaggatggttgtaaattaaaggtgtgagatttccatgagctggatgctggagtttatagttcaatact

SEQ ID NO: 21778 - DNA, 1861 bp, Oryza sativa
  ref <308>: DATABASE ACCESSION NUMBER: AK072015
  ref <309>: DATABASE ENTRY DATE: 2001-12-06
gagacgcagagaccagtagctttcgcagaggcggcagccaccaccgcctcctcctcctcctcctcatccgacggtgtgcaaccaagcgatggagttctccggcggcgcgaccgtgtcggcgccgttcggttgctgccgtgcggcgtggggcgccgcggcggcgggtgcgggggcggagggaaggagcaggagggttgtgccgcgcgcggtggagccgcggcggcgcgggcggtggatggtgaggtgcgtggcgacggagaagcacaaggacgcggcggcgcggcgcggcggcgtggaggtggagttcgccgacgaggaggactacgtcaagggcggcggcggcgagcttctctacgtgcaaatgcaggcgtccaagtccatggacagccagtccaagatctcctccaagctgctgcccatacccgatgaaaattcagttcttgatttggtcatcattggctgcggtccagctggcttatctctagcagcagagtcagctaagaaagggctcaatgttggtctcattggccctgatcttccattcacgaacaactacggtgtgtgggaggatgaattcaaagacctgggcctggagagctgcattgaacatgtctggaaggatactatcgtgtacctagacggtaacaagccaataatgattggccgtgcgtatggcagggttcacagggacttgctgcacgaggagttgctgagacgatgctatgacgctggcgtcacatacctcagctcgaaggtggacaagatcatggaatctcctgatggacatcgggtagtctgttgtgaaggggatcgtgaggtactttgcaggcttgccattgttgcatctggggcagcatctggtaggcttctagagtacgaggttggtggtccgcgtgtttgtgtgcagactgcatatggtgtcgaagtcgaggtggaaaacaatccatatgatcccagcttaatggttttcatggactacagagattgcttcaaagacaaattctcacatcctgagcaaggaaatccaacgttcctctatgccatgcccatgtcatccacacgaattttctttgaggaaacatgcctagcttctaaagaagcaatgccctttgacctccttaaaaagcggttgatgtctcggttggatgcaatgggagttcatattcgaaaagtatacgaggaggaatggtcctacattcctgttggagggtccttaccaaatacagaccagaaaaatctcgcatttggtgcggcagcaagtatggtgcatcctgcaaccggatactcggtggttagatcattgtctgaagctccaagatatgcatctgtgatatctgatatcttgagaaaccgtgtctaccctggagaatatttgcctggaacctctcaaagttccagtccatcaatgcttgcatggagaacattatggccccaagaacggaaacgtcaacgatcattcttcctttttgggctggctttgataatccaactgaataacgaaggcattcagacattctttgaaacctttttccggttgcccaaatggatgtggcgaggattccttggttcgacgctttcttcagtggatctcatactctttgcattctacatgttcacaattgcgccgaaccaaatgcgaatgaaccttgtcagacatctcctctctgatccgaccggctcaacgatgatcaagacctacctgaccttgtaaaaccatttcagcagtctacaagaatattaggaaatgtacagttttgtagtttgtacataacatagtgagagccagaggatatgggggttgggggttacttatcatgctagaacaacaaaacactgcaagaattttatgcatgaatttggc

SEQ ID NO: 21779 - DNA, 1430 bp, Oryza sativa
  ref <308>: DATABASE ACCESSION NUMBER: AK099234
  ref <309>: DATABASE ENTRY DATE: 2002-08-28
gaaccaaacccgcgaaacccccacaaacgacggtggtgaaagaagatgagagggctactcgcgtgcgccacgctcgcccgccgcgccgccggcgcgacgtcgacggcgcggcggcacctggcgggcgcggccgatgtggcggaggcggagctgaagaagacggcgctgtacgacttccacgtcgcgcacggcgggaagatggtgccgttcgccgggtggagcatgcccatccagtacaaggacaccatcatggactccaccctcaactgccgcgccaacggcagcctcttcgacgtctcccacatgtgcggcctcagcctccacggccgccaggccatccccttcctcgagtccctcgtcgtcgccgacgtcgcggcgctcaaggacggcaccgggacgctcaccgtcttcaccaacgaccgcggcggcgccatcgacgactccgtcgttaccaaggtcaccgaccagcacatctacctcgtcgtcaacgccgggtgcagggacaaggatctcgcccacattggggagcacatggaggccttcaacaagaagggcggcgacgtcaagtggcacgtccacgatgagcgctcgcttcttgcattgcagggacctcttgctgcaccaactctccagttgctgacaaaagaagatttaagcaaaatgtatttcagtgacttcaagatgattgacatcaatggatatgcttgctttctcaccagaactggttataccggtgaagatgggtttgaaatctctgttccatcagagaatgcagttgatcttgcaaaggccctcctggagaaatctgaaggcaaggtgagactgactggtttaggtgcccgtgacagtctccgcttggaggctggcctctgcctgtacggcaacgacatggagcaacacatcacaccagttgaggctggtctctcatgggcaattggcaagaggaggaaagcagaaggcggcttcctgggagcagatgtgatcctcaagcagctccaggaaggcccaaagatcaggcgtgtcggtctcctctcgcaaggaccgcctcctcggagtcatagtgagattgtgagcaactccggggagaacattggtgaggttaccagtggagggttcagcccctgcttgaagaagaacatcgccatgggctacgtaaaatccggtttgcacaaggctgggacagagttcaaggttgtcgtccgtgggaagtcctacgatgccgtcgtcaccaagatgccgttcgtgccgaccaagtactacaaaccctcatggatttgtacaaaggatgctccttcggttgaaattttctcatgcaactctcttgtcgctgcttgttctgcagcaccgcaactgtaacttctgtaaggtctcatcttacagcctgacattttacctctgcccatctaataatatgaaatgtgatatgcagc

SEQ ID NO: 21780 - DNA, 1365 bp, Oryza sativa
  ref <308>: DATABASE ACCESSION NUMBER: AK072016
  ref <309>: DATABASE ENTRY DATE: 2001-12-06
gagagaggctcacatggatccgtacactagcagggctccggcgagtggtggtgtcgccgccggcgacgacgacgaggaggcggcgtgcctgcaggcgtttgagctaatgtgcatcttcaccgtccccatgacactgaaggcggcgatcgagctcggcctcctcgacgcactagccgccgccggcgacggccgcgcactgaccgcggacgagctggccgccgcgcggctcccggacgcggcgccggacaaggccgaggcggcgtcctcggtggaccggatgctgcggctcctcgcgtcgttcgacgtcatcaagtgctcgacggaagccgggcccggcggcgaacctccccggagacaatactcgccggcgcccgtctgcaagttgttcaccgccggcggcaacagccaccgtggatctctggccccctcggtcttgttcggcgtcgaagagaactacctgtgcacctggcgtcagttggcggcggcggtgggcggcggcggaccgtcggcgttcgagagggcgcacgggatgcgaatgttcgagtacatggggacgaaccgccggctgaacacgctgttcaaccaggccatggcgcagcagtccatgattgtgattgacaagctgctcgaccgcttccatgggttcgacggcgtcggcgtcctcgtcgacgtcggcgggggcaccggcgccaccctggagatgatcacctcccggtacaagcatatcaccggcgttaacttcgacctaccccatgtcatctctcaggctccatctattccgggtgtgaaacatatagctggaaatatgtttgagagcatatctaatattggagatgcaattttcttaaagatgatcctccacatgcaaaacgatgaggactgcatcaagatcctcaagaattgccaccaagccctgccggacaatggcaaggtgattgctgttgagattgtcctcccgacgatcccagatctggcccaaacagcacgatacccgttccagatggacatgatcatgctcagcaattcccggggaggaaaggagaggacagagctggagttcgccaagctagccacggactctggtttcagtggtgccttgcgaacaacctacatcttggccaactattgggttcttgagttcagcaagtagctctgaaaaatcatgtcaagttcaatttgctaagcattttaatgtgtgcatggttatttcaataccatacaaatggtgatcagaatcgctatatatactgaacaatatatgtcaaatatacaatataaaatgtaaagtgtcccttaaaattgaacaatattgtacatatgtttcagcattgctaataaaagcatccaactcaggttatggctagc

SEQ ID NO: 21781 - DNA, 1378 bp, Oryza sativa
  ref <308>: DATABASE ACCESSION NUMBER: AK072017
  ref <309>: DATABASE ENTRY DATE: 2001-12-06
gcgctgttcatcctcccactccacctcggagctgagctctgcttctctcccgatctctccacccaccgcagcagcatcctttcgacctctctagggttccagcctcgagttggcctcgtcccccccccccccccccacattcgctgcgaggttgctgctcgcttcacttgtcttcggtttgatttccccccacctaactgattctgattgatacggctcggctcgtgtgtgcggctcacttaggtttgggattctcttccggattggattggtggagtggcagggaattgttagttctggtgtggtttgtggttaagagaagggggaaatagctatggagtgtctgaccacaagttttactaggaatccgggaagggagtatagtctcatatgtccgagcgaagctctgtctgaaaaacaaaggattcaaagaagggtcctatgctattttccagcttccacaaactcaagacgatgtcgcaagttcacaactatggcatatcctgttagcccaatagctggcagacgttcaaattggagatcttttgctgcaagtctgaatttggaagatggtcctgcatcctctgactcaacatcatccccttcagagcaaactagtgatggtggtgaagtttatggtgacccttctgaaaatctgaattctcggaaacttaaatctgacgagttgaaatctcttttggctgattcagaacgatctaagcttttgaaaaagcttagtgaagcaaaccaatacaaccggttcctcaagagacagttgcaaatgaaggataatgacgttgtgaagttcaagagtgaacttgccgttatggaacttgaactgcaggctctggttgccctagctgaagagattgctaattttgatgttccatctgggtctaggaagataaatggaaaatatatccagtcacatcttctcaccagattagaagctgttcatgataaggttatggaacaaattaaggatgtagactctttaaagcaccaagaaatttctgtcttctgggttggcattgctgagaatgtacaaattatgggctccttcgatggctggtcccagggagaggcaatgtccatggagtattcaggttaccaagcaagattctctgcaactctgaatcttagacctgggaggtatgagatcaaattcttggttgatggagagtggaggctgtcactggagtacccaattgatggcgaaggttcaatgcagaacaatatacttgttgtaaattaatgtagatatctgttggctcctagtttgccatagttgtaacttgcagctataaaacctagcgcaagattgaactgtactcgattgctatcatgcatccgatttgcaaaatttcactttaccatg

SEQ ID NO: 21782 - DNA, 1706 bp, Oryza sativa
  ref <308>: DATABASE ACCESSION NUMBER: AK072018
  ref <309>: DATABASE ENTRY DATE: 2001-12-06
ggtcttgccacgccactcacctccaactaccaagctgtctgtgagcccgtgactgggcagagcagcacaggggcgagacgcgccggccggccacctccggcaccgatgggcgcggcggcggcgcacgtcctcgtgttcccgatgccgctgcagggccacatcaacgtcatgctccacctcgccaccgccctcgccgccgccgccggcgtccacgtcaccttcctccacaccgaccacaacctccaccgccttggcaacgccgccgccgcaaccacggcgggctcgccacggcgcctccgcttcctgtccgtcccggacggcctccccgacgaccatccccgctccgcgagcgacgtcccggtgatggtcgattccctcctgggcgctggccaagccgcgtaccgtgctctgctcggctcgttgttggtcgggagcggcggcgccggcggcttcccgccggtgacctccgtcgtggcggacgcacttttaacgttcgcaatcgacgtcgccgaggagctcggcgtgcccgcgctggccttccgcacggcgagcgcgtctagcttactggcgtacatgtccgtgcccaggctcttcgagctcggtgagctgccgttcccacccggcggcgacctcgacgagccggtgcgtggcgttcccggcatggagggattccttcgccggcgagatctcccgagcaccttccgccgccacggcaacgaccacgacgtccatcccaagctgcaaatgctggtcgacctcaccacggggagctgcaaggcacgggcggtcatactcaacacggccgcgtcgctggaggcgccagcgctggcgcacatcgcgccgcgcgtgcgcgacgtcttcgccgtcggtccactccacgccatgtcccccgcgccggcggcggccaccagcctgtggcgcgaggacgacggctgcatggcgtggctcgacggccaggcggaccggtccgtcgtgtacgtcagcctggggagcctcaccgtcatctcgccggagcagttcacggagttcctgtccgggctcgtcgccgccggccacccgttcctctgggtgctccggccggacatggtcacggcgaggctgcagcacgccgatctgcaagaagccgtcgcggcggcggcggggcacagcaaggcgcgcgtcgtgcggtgggcgccgcagcgggacgtgctgcggcaccgcgccgtggggtgcttcctgacgcacgccgggtggaactcgacgctggaggccgccgtcgagggcgtgccgacggtgtgctggccgttcttcgtcgaccagcaacagcaggttcgtgggcggcgtgtgggggacggggctggacatgaaggacgcgtgcgacgccgccgtcgtggcgaggatggtgagggaggcgatggagtccggcgagatcagggcgacggcccaagcgctggcggagaaggtgagacgggacgtcgccgacggcggctcgtcggcgacggagttcaagaggctcgtcggcttccttcaggagctcgccacgcgtatccaacacgctaattgaccatagtcggttggcctcgttaatcaaagccattacgcacgttgattgtggtacagtggttgttgttgtggtcctagacgcgatatcatgctacagtcgtatgaataaatgatcatgctatcatatgataaaagacaataaaaggaagtccacttaatttttt

SEQ ID NO: 21783 - DNA, 2151 bp, Oryza sativa
  ref <308>: DATABASE ACCESSION NUMBER: AK072019
  ref <309>: DATABASE ENTRY DATE: 2001-12-06
ggctactactccggagcagcgaccaacaccaactacctcgcgtcgcggcggccgcagaggatggcgccgccgctctatctcctcctcctcctcccgctcctcgcctgcgccgacgaggtccctgaccgctacgccgtcctccgcgccccgcagggcccgggtgccagcgcggcggccaaggagtacctcgacccgaccttcccgctccccgcgcccccgccggcggcgccgtcctgcaccgtgccggtcctctcctactccttcggcgacacctacggcgccgcgccggccaaggcctcgtacgcgccccccgccgggtgccccgcgccctggtccctcgtcgtgctcaccttctccgcctcctgcgccggcgaccagtacgaccgcgtcgccgccgtctggctcgacggcgccgagctcctccggaccaccaccgcggagccgacccccgagggcgtccgctggaccgtccgcaaggatgtcacccgctactccgcgctcctccgctccccgcccggcggcgtcctctccgtcatgctcgagaacgtcgtcaacgacaagtacaccggggtgtacagcgtcaacgtctcgctggagttccatggaactccgccgtacctctccgacgcggcatcatcctcccctgctggcgtcgcaagcaacgatcccaaggaacctatgctgccggagtcatacttccagccggcggatctcatcgtcccgatctcggatgtcgccggcaacggcaagggcgggttctggttccgcatccagaacgcgtcggactcgcactccaggctcgtaaccattccgtcgagcacctaccgtgcggtgctcgaggtgttcgtgtcccctcactccaacgacgagtactggtactccaacccgccggacatctacatcagggagaacaacctcaccacgcggaggggcaacgcggcgtaccgcgaggtcgtcgtcagcgtggaccaccgcttcgtcggctcgttcgtgccgttcccggtcatctacacgggcggcatcaacccgctcttctggcagccggtggccgcgctcggcgcgttcgacctgcccacctacgacgtcgagctcaccccattcctcggcctcctggtcgacagcaacgcccacgagatcggcctcagcgtgttcgacggcatcgccgagtggctcgtcgacgccaacctgcacctctggctggaccccagcacgtcggacgtgcacgccgcgctcggcgcgtaccagacgccgcgcctgaaaatctcacgccactactcgacgcggctgctcgagggcaggttcaagatcaaggccaagaggaagtcctccttcagcggctgggtcaagtcctcgttcggcaacttcaccacggaggtggaggcggagctgaaggcgaccagcctggtggagttcaccggcgacggccggaacaagaccgtgtcgctggaggcgaagcaggagacgaagacgctgatccgggcgggcgacacgcggaaggtgatcggcagggtggagagggaggccaagtacccgctgtcgctcttcgcggagaccgaggacggcgagaacggcacgtccgtcgtcacggtgagcctcacccacggcctcagcgtggagacggaggtcgagacgaaggccctcgagagcaaggagaagctcgatgacgcgcaggccgcgcaagggtggatggtgctcctggaccacgacgtgctcaacgggtcggtgacgacgacccaggcgtaccggttcagcgacgacgagcgggagtacgagcgggcgatcgacgtcgtggacggcgccgtgctcagcgacaacgtcaccgagagcttcagcgccctggccgccgcagcggcggacgctcgccgccgccggttccacgccggcattgctgcgttgtaaggctaccttggattgccgtgggagttgagctgtttcgtgtcatcgatggctacggaatccaggtgaaattcgtcagttcgaagaattcttatgtgcaggattcgtttccgaccgcatcgacgtgaccaagactattgcttttcttcagaggtaaattgtgcactgtaatttgtatttagcgtatagtttctgtaatctgtattatgtatgcaattttgtcggtgtgaatcgtcgtttctgcttttgcagttc

SEQ ID NO: 21784 - DNA, 1807 bp, Oryza sativa
  ref <308>: DATABASE ACCESSION NUMBER: AK072020
  ref <309>: DATABASE ENTRY DATE: 2001-12-06
gtatcgatcgtgaggaagatcagtagagagcgcactcaacttcgccaaatcgccgataatggccgacgcggccaccaccccgctgctgacgagccatgaagcaaagccggccaaggcactgtccatcgacgacgccatcgagacgtacatcggcgccaccggcgcccgccagctgctcacggccatgttgctggccttcgcttgggctttcgaggcgcagcaggtgttcatgtccgtgttcacggacgcggagcccacatggcactgcaccggcgtcgcggccggcgaccccggctcgttctgctcgctggcggccgcttcggcttcggcttcggcgtgcgcgctcccgcccggcacgtgggagtgggaccgcccggccgagacgtcggtggtgtcggagtgggcgctcaagtgcggcggcggcggcccggcgctcgtctccctcccggcgtcgtcgttcttcgccggcaacctcgccgggggcttcatgctcacgacgctcgccgacactctcctgggacgaaggaagatgctcgtcctgtcactggtgaccatgtccgtcgccggcgtgctcacggtcttctcgccgaacgtgtgggtgtacgccgccctgcggttcgtgtgcgggttctgcagatccacggcgggcacgtccgcgatggtcctgtccacggagctcgtcgggaagtggtggcgcaacacggtgagcgtcgccgcgttcgtcttcttctccgtcgggttcatgtcactcccggcgctcgcgtacacgctccgcgaggcgtcgtggcggaacatgtacgtgtggacgtcgctcccgtccctctgctacgccgtgctcctctacttcctcgtccaggagtcgccgcggtggctgctggtgcgcggacggaagcaggaggccatcgcggcgttgcggcagatcgcgtcgctcaacggcggcgaaggcattacaacgtcgagcttcaccaagctggaaacgtgcgccggggaggtcggggacggcgtgcccggcggcgagggcatgttctccacgctgcggtcgatatgtgagcggcggtgggcgctccggaggctggcggcgatcacgacggccaccttcggcgtcggcgtggtctactacgggatgccgctcagcgtgggcagcctgagctccgacctctacctgagcgtggcgtacaacgcggcggccgagctcccgtcgtccgtcctctcgtggctcctcatgggcaggttcaaccggcgcagctcgctggtcgcgctcaccgcggcgtccgggctgtgcagcctcgcgtgcgtcgtcatcccggacccggaggccggcgccggcggctcgcacttgcgcctcgccgccgagctggcctccttcttcgcgtcgtgcgcggcgtacgacgtgctgctcatgtactcgatcgagctgttcccgacgtcggtgcgcaactcggcggtggggctggtgcggcaggcgggggtgctgggcggcgtggtggcgcccatgctcgtcgcgctcggccgcgagaggagctactggtcgttcggcgtgttcgggctcaccgtcggctgcctcgggctgttcgtcaccttcctgccggagacgaaggggaggaggttgtcggacaccatggaggatgaggaggaggccgccgccgtcttgtatggaggataaggctatggcgcgagcgacatggataacaacggggagctcgtgtagatgactttcaggtttgttctgtacatcttggaaattaaatttgaaaatatacttttcattaaaaaaaattcagaaatattcgaaatgcaaaatttttac

SEQ ID NO: 21785 - DNA, 1640 bp, Oryza sativa
  ref <308>: DATABASE ACCESSION NUMBER: AK072021
  ref <309>: DATABASE ENTRY DATE: 2001-12-06
gaccttcctcctcttctctcttattctcgttctcctcttcatctcgtttttccctttctctttctcgctctcttctctccatggcgctgtggcgcacaagggctgcggcgctgcgccccaattgtagggggcgtcgccgccgcctctgcctggctgcccggcggggtgccgccgccgcctcctctctccttccttccttcttcttttccccttatcctccctctttttctctctcatcccaactctaaccctacccgttgccctgcctctccaattgccatggctgccgtggagatggccggtgccaagcaccgcgcaactccggcggccccgacctatctccatgagtgtgctctccggtctgtactcccccccccccccctctcctgatttctagtgttttatattggtaagatgttattcccttttgtgctactgatatatgattgtggtgtaccattaggttaatcctaatggtcaacttaatgactctatgctatggattgtaattactagttctagggttctagatcaattgatttgctagattggatgatgccagtatgcccatgatgaatgaatgctcacatgaataaacctatgaattgcattactaaaatagaaatcacactagcatgattaaatccttaattatgcttatgcaatgaccatcagagatattgaaatttgctacatactaataaactaacatgatcagatccttatgttgccatgctgaatagtaatccagaggattaatatgatttcattcatacatgatgcatcatgacagtatcacttaagggatttaatgtcctaaaaattataaatcttgatcttgatgtcaaagtatactgattacagaaatcacaggaaaataatggtgttttatggtattggtcttagcaatgttatgctgatcaactactaaggttcagattctgatattatgctcttctagattacctgatatggtgacccttgagttataagtaaatataccctgttataagtaaatatgcctactctgtttattattccatatattcagaataattcttgtactgaactgctacatgtttaacagaatactaatataactacagatgtccctaaagtattattggacctattatcatacaccaacacatatacagtgttacagagagatacctattgcgatttttttcctctcctcaatttgtaggtcagtgtcaaccgaaagcaaaaatatcagcaagtaaaaagtgcacaagccatgcacaaaaatttccttacgcattcgtggtaaacagaactagtgctcttctgcagcaaagttgggttctgctggtttttgtaacaaccttgcaggcacactttcctgcagccaggccttgcgggtggcatttctcctcaagatccgcatcatgttgccagtgaaacgcgaagcatatattgctgccctgaagctgagagttgtagcaccgtcattaacgattgcgaactgcaacctcttctccttctcgcgtagagagtcttcgatcttctttctgcagtacctatgccaggctgcttgtatgaaacaggctgcgagtagaacttaagggctcgtccgttttggaggaaaaacagaggatttcgatttctaatgattaatt

SEQ ID NO: 21786 - DNA, 2223 bp, Oryza sativa
  ref <308>: DATABASE ACCESSION NUMBER: AK072022
  ref <309>: DATABASE ENTRY DATE: 2001-12-06
tttacggcgtgacggccggagacagcagcagcaaggcacacctgcagcctgcgctggtggttctctactccctggccctgttccagggcgtcctcttctactacagggccatctctgcttgggaagaacagaagctagtgaaagatgtggccgacaaatacatgtttgatacagtgtcgcgcagttcagtttcggactatttacatgagatcaaggtcggatgtgagaatgacccgtcctttgccagagggaggaacctgatcacatacgctgtcaagctgatggaatccacatcaccggatgggtacctttcaggtgcacggattcttgatacactcatcaagtttaatagagatgatgcatcggggagcgaattaccggggcagagtatgcagatatacaatatgattggatctgcatcctccagtcccatactccacaacttagttcagatgctggatttcaaaagtgcatatgatggagagatcaggttgcgagccgcaaggattgttgagcactttgctggtgaggtccgtttagacaaaatcctgcaggggattcgatgtgtatcttccttgcttgaactcgagcagaaaggatttcagaatgaccaccatagttctttccaagaagacgacggcgaccaactttcttttgaagaagaggatgatcaccagatttctgtcaaagaaaaggattattaccccaaagattataaacagatgcaacttacaggcatgcagatccttttaaagctctcctacgacaagaacaacttgttcctcatgagcaacacagatgatccggccttgatcaacaagattgtggcacttataacgtccaagggatcacttcacaaaaaacaacataacgaatggtcctgtatggcagagctcggggtgaagatactaagccgatttatgcgatttatgtatggccctacaaaatcaaacaatattctgtggcatgaaatatcaacaagcagcaaagcaatcggcaccttggagagtattcttgagtgtgaccaatgtgactctgtgctgaagaaacacgccataaggattctcaaaaggatattcatggatacatcttcggctatgggtgaaggagacagagaaaggttcattggctccttgatggacatgtctcttcacaacagtaatggtgactttcaaaatctggcaggtgtagatctggcgctcaagaaacaagggttaagcattctcaaagaaatatacttgaatccatcttcgattatgggcgaaggagacagagaaaggttcatcggctccctgatggacatgtttcttgacaacagtaagggcgactttggaaatctgccaggtgaagatctggacctcaagaaacaagagttaagtattctcaaagaaatatgcatggatccatcttcgtttatgggcgaaggtgacagagaaaaattcatcggcaccctgatggacatgtttcttcacaacagcaagggcgacttgtttgaaaaactagcaggtgatgatctggtgcagatatgtagaagaagtggaagcagtgccacgatcatattgaggaaatatggtcatgatattgttgattgtattgctgatactcgttcaagcgtatatagcagcatgcacagaaaaattgcagcaaagatcctcaatcatctgtgtagtccctactccactgacgaggaacatcttcagaatctgaaggaggccatcattgatttgatacccaaggtgctaagagaagcacttggttgggggttgacaggagaagagatactgcgagtggcagtttcaggccttgaaggtacccaagatgatgactggaaattgcaggaagcattggcgtccctctgtgcaaccgtgtttaacagaattgtcagcaaggatgcagatttgactgctcggttcaacaacatcgccgctggtatctgcgaccagacaacgaagcctcgcatgaccttcgcagacctcatcaatgaagctgtaaaagttcatcgcatcgaatttaaaaaaccagaaaaaccaaaaccagctgccaggccggaactgtacgagtttgtgactgcgaaatacaccccgccccactttatgtttttgggcgaggaagatcccaacgcgtgttgtatctcttgataacaccctaatttgtactttctccgtttcacaatgtaagtcattctattatttcctatatttatatggatattaatgaatctat

SEQ ID NO: 21787 - DNA, 1927 bp, Oryza sativa
  ref <308>: DATABASE ACCESSION NUMBER: AK072023
  ref <309>: DATABASE ENTRY DATE: 2001-12-06
gggtcgcctccccactccgtccaccccgccgcaccgacactctcctccgccatggatcgcgacccctccgtctccgacgaggacgacgacctcgagaccctcgtcccgcagaaccacgtcaagccgccctcctcctccttccacgtcgccggcctccgcgccgcggtccctccctccgccgcctcgctcggccgcgtcctctggtcccgccgctacctcctcctcttcgtcgccctccccgtcctcttcctcgtgctcttcgtatcccttggcggcgcgtcctcccttcgcctgcccgcctccatccgcctcccctccgccgccgctcccgccgccgaccccgcggcgtcccggatgcgcgacgccgagctccgcgcgctctacctcctccgctcgcagcgctcgggcctcctcgccctcttcaaccgtacggcagcacccaccaacggcagcagctcgggctcgaacgctgtctcgtacgccgatctccacgacgcgctcctcggccagatcaagatcaaccgcgagatccaggcggcgctcctctccgcgcaccgcactggcgctgcgggcaatgcgacggaggatgggttggatcttgatctgccggctgacgggtgcaggaggagggaattgccgtccaaccggcggaccatagagtggaaccccaagaaagatcgatttctgttcgccatctgcgtctccgggcaaatgtccaaccacttgatttgcttggagaagcacatgttcttcgcggcgctgcttggccggatcttggtggtgcctagccagaagctggattatcagtacgaccgggtgcttgatatcaaccacattaatgattgcattggaaggaaggttgtaattacctatgaggaattcactgagaacaggaagaaagtgagcattgatcagttcatatgttacgcggcatcacccccttgtttcattgatgatgatcatgttaagaagttgaagggattggggatttcactgggaaagatccaggcagcttggccagaggatgcgaagctgaaggagccaaagaagagatttgtgggggatatcatgccaaagtttaccacggatgctgaggtgctcgcgatcggtggcatgttctatgctgatgttgaggaagagtgggtgatgcagcctggtggcccattggctcacaagtgcaatactttgatccagccaagtaggcttattatgctcactgcgcaacgctttgttcagaccttcttggggggcaactacattgctttgcattttcggcgacatggcttcctgaagttctgtaatgtgaagaaagagagctgcttcttccctatccctcaggcagcagaatgcattcttcgaatcgttgagaaagctaacgccccagtcatatatctgtctactgatgctgccgagagtgagacaagtctcctgcaatccttggttgtgttcaatgacaggcaagtccctcttgtgaaaaggccagagcaccacaactctgagaaatgggatgccttgttatacagaaatcacatgggtggagacaatcaggttgaggccatgctcgacaagacgatctgtgcgctgtcgaacgttttcataggtgcatcaggctcaaccttcacagaggacatcctgcgtctacggagaggctggggttctgcgtcccactgcgacgaatacctctgccagggtgagctacccaacttcatagcggagctagactgagaaaatgacatcctagaagaagaattgacagctacatccccctttttttccccactacgatctggtggcatgatacacattctgtaaattggcgtgtacatcctagtgtaaaagagcgatgatatttgttgtaccggtacccccattgatttgttcggtgttgttacacggttaggcaatagaaagagtttggtttttgcgc

SEQ ID NO: 21788 - DNA, 1830 bp, Oryza sativa
  ref <308>: DATABASE ACCESSION NUMBER: AK072024
  ref <309>: DATABASE ENTRY DATE: 2001-12-06
gagcacttctccggtatccaccttgtcagccgccgatggcacaccagccggtgtgacacacagcgtcactccactcacagcctcgccgcctgggtcgaagccctaatcgagagcgatgccgcgtcccagaggcaggaagcgtgcggcggcggcggcggaggaggaggatgcggccacgcgggggagggggaagcgtgtcaaggcgtcgcccaagccggagacggaggcggagtacttccccgataagcggaatctggaagatctttggttgtcagcctttcctgttgggactgagtgggaaaatattgataagataaaggagttcaactggaactttgaaaatttggagaaagccctagaagaagggggagagctttatgagaaaacagtttacttgtttggaagcactgaacctcaactattgggtgtgaatggcgaatcgaagatagtacttattcctattgtagttgctgttgactgtccttttcctccttcagataaaattggtataaattctgtccaaagggaaaatgaagagatattgccaatgaaagcaatgaagatggcctgggtgccttattttccgctagaggaccggctcagtaggattgacagtttgaaaacaaaaatatttactcttggctgcactcagcggaggtctgcactgaggcatctcaaaaccgaacgagtcaagctgtttgactactgcatgccatattatatgccactaaatcctcctgaaaatgaagatgatacagttatcaatatcctatatccttttgaaccaccggtattttgtgagtttaactgggagatggatgattatgaggtttgtactaatttggtagttttgctctggttctacctttggaagtaacctgtgtctggagtcattctgttgaaatgcaggactttgctgatgagaaagttaaagaggaggggctaccggaggatgagagagaaaaaatgaaggaattcctaaaggagaaggttagagagagaaaaagagagctgaaacaggctaaggaagctagaaagaaagctattgatgatatggatcctaagatcaaagaggcatttgaaaatatccaattttacaaattttatcctgtaaaaactctagatactcctgatgtaagcaacgtaaaggcaaggtacatcaatagatattacaggaatgcacaccatctgatgtaattgcatccaatcgtgcattttcactgagcattgccaaagaactgagctgtcaaacatggcaccgaaattttggaagccgtggttgattttgcaaggggttatgtgcgggctcaacggtgttggatctggtgatggtggcgctaataaaaaatcatattttgtcgccagtggtcatggtgctgatgctgactgtcatggagcatggatagtggctagcctagtggccccactagtcagctgctacgtgctatatttgccaggcaagttggtttagtgaaaagaagcagcgccatccatggtactcgtccagtccgcgggatctcgtgtcgcgaattcacgagcagccacggtcgaaaaggagagatgcaggattgcaacgccgtgcaccgtgcgtgttgtgacacggcatcttaatttcgcaccaaacgaaggcgcaaccttagctggagaaacttgcaggctacctgaagcttgaagagttcagatcaattggtcaactgaagattagtttacacctgtcaccaatttgtgcttctctttgatttgtaagaagcatagtaaattttgatgatttcagttctatagaaaaaatcctataaaaaccttcgaaactaagtattaaaattgaattct

SEQ ID NO: 21789 - DNA, 1351 bp, Oryza sativa
  ref <308>: DATABASE ACCESSION NUMBER: AK072025
  ref <309>: DATABASE ENTRY DATE: 2001-12-06
gctctctctctgcttcgaattcctcacctcacctcacctccaggcggcggcgaaaccaccagccgcttcgcttcgcctcgattccaaccctagccctacccctatccgaatcccatgcagacggaggcgcgggtcggggtcgtcgtcgacggcggccgcgccgccatgggccgccgccacatcggcaccgtcgcccacctcgccgccgggggcttcgccggcgccgtcagcaagacctgcaccgccccactcgcccgcctcaccatcctcttccaggtggcaggtatgcattcagatgtggcagctctaaagaagtacagcatatggcatgaagcttcacgaatagttcgagaagaaggatttggagcattttggaaaggcaatctggtgacaattgtgcatcgtttaccttattctgccatcagcttttattcatatgagcgctacaaaaaatttctccaaagggttcctggccttgatgaagactcaaattatgttggtgttgctcgtttacttagtggcggtttggcaggaattactgctgcatctgtaacttatcccttggatgttgtccgtactcgtttggcaacacagaaaacaaccaggtattacaaaggcatctttcatgcagtgtctaccatttgtagagatgagggtgtcaaaggattgtacaagggccttggggccacattattgggagtcggacctagcatagcaatcagctttactgtatatgaatcattgaggtctcattggcaaatggaaaggccccaagattcccctgcagttgttagtttgttttctgggagtctatctggtattgcatcatctactgccacatttccccttgatcttgtaaagagacgaatgcaactgcaaggggcagctgggacatcgtcagtctgtaaatcaagcataactggaaccatccgccaaatctttcagaaggaaggccttcgtggcttctacagagggatagtccctgagtacctgaaggttgttcctagtgtagggattgccttcatgacctatgagaccctgaagagcttgctctccagcatagacgaagacgacgagagctgagatctttacaaaatggctacacgcttcaaagagatttctggcaatgagttactgtgagactgaactgtatcagagtgactacaggccagacagttttgtaggtgttgataggataaagctttacctgatatgtgtcttgtgttgtaccatataggtcaagaagagcaaatgagtattccatccgtgtacacctctgagcattatgctcaaattttgtgtcgtaagatgtaacgccccttgcaaggatgggaaaagaaactctcaaggc

SEQ ID NO: 21790 - DNA, 1891 bp, Oryza sativa
  ref <308>: DATABASE ACCESSION NUMBER: AK072026
  ref <309>: DATABASE ENTRY DATE: 2001-12-06
gcacggcgacccgcctgcggactacggctcgatcgcggcggtggggatgttcgtggcgctcatctgcgtctgcatcgtcgtcggccacctcctcgaggagagccgatggatgaacgagtccatcaccgcgctaatcatcgggttgggtactggaggagtggttttgatggtgtcgagctggaagcactcgcgcatactggtgttcagcgaggatctcttcttcatttacctgctcccgccgatcatattcaatgcggggttccaagttaagaagaaacaatttttccgcaacttcatgactattacgttgtttggtgcgattgggaccctaatctctttcagtgtaatttccctcggttctctaggactaatatcaaggctgaacataggttcccttgatcttggagattatcttgcacttggggcaatattctcggcaacagactctgtatgcaccttgcaggttttgaaccaagatgaaacacccttcttgtacagcctggttttcggggaaggtgttgtcaatgatgcaacatcagttgtgctattcaacgcaatgcagaactttgatcttgcaaatttcagcagtgttaaattcttgcaattcattggcaattttctttatctgtttgccacgagcacctttcttggagttgctgctggacttctcagtgcttatatcataaaaaagctgtacttcggcaggcattccactgatcgtgaagtttctattatgatgctcatggcttacttgtcttacatgcttgctgaattgcttgatttgagtggtattcttacggtgttcttctgtggtattgtaatgtcgcactatacctggcataatgtaacagagagttccagggtcacaaccaagcacgccttcgccacattgtcatttatcgccgagacatttctatttctttatgttggtatggatgcattggatatggagaagtggaagattgtcggtgaaacattcagcccaatgaaatctattgctttgagctccactattttgttcttggtgctggtcgcaagagctgcttttgttttcccactatcttttttggcaaatttgaccaaaaaaactgaagagggaaagatctctattaagcagcaagttattatttggtgggcgggtctgatgagaggtgctgtgtccattgcattggcctacaataagttcacaaggtcaggccacactcaactccctagtaatgctatcatgatcactagtacaatcactgttgttcttttcagcacgatggtctttgggctcctgactaagccattaatcagactcctaattccagcaagacacctcaaccgggaatcgagtgcgctttcggatccacctagcccgaaatccttccttgatccactgatcctgaacggttccgatgtcgatcctgagattggtgtgggcattcgccgaccgacaagcctccgacttctcctagcaagcccgacacagtcggtccaccattactggcgcaagttcgacaacgccttcatgaggccggtgtttgggggccgaggattcgtccccttcgtccccggctcaccaactgaaaggagtgtgccattactccagggaaatgagaactagaaaactttttcaaaggagcgtgccattactccagggaaatgagagctagaaaacataaacaaaggttgtgtaaatctgaggtagaagaacaatcagcaaacacagtttctgtaaatttatctgaggtagtaacagcgttcttggtagctgtggtacatgctgatgtgttatgtacctaatattgtagatagcatggatgtatatatataaagcctctgtagtttagcaagaaatggtgctgaaaattttgccacgatttatacaatatggtatgatttttgc

SEQ ID NO: 21791 - DNA, 2079 bp, Oryza sativa
  ref <308>: DATABASE ACCESSION NUMBER: AK072027
  ref <309>: DATABASE ENTRY DATE: 2001-12-06
gggccgatcccaccaccaccaccaccatggccaccgcctccacctccggcgaccccaccgccgccgccggcgagcccacgccgtcgtcctcagcatccgcgcagccacggcagccggcgtcccgcatatcccacatcgtgcgcacctacctcgacctctcctccaaccccaagaagcgccgcgccgctcccaagagccaccccaagcccgccgccgccgccgccggccaaggcgcccccgatgccggagacgggaaggacggcggcgggaaggcggcggcgaccccatcgtcggcggcgcagcccacgaccacgcggctcctccgcgagctcggcgtccgggtctcccgctacacgcacgaggagcgccgcgacatcgtcctccgctacatgcagaagcggagcggccgccagggcgtcaagcgcgccaccgccaaggccccatcgaggcaggctctcgcggagcggcggcggcggggtgcgagagggcagttcctcggcaaggagggcgccaagactgtagataaaccagaagaagatccagaggtgccgccagaagttattgctaacgctggaggagtgcccatagttggaatggttttcgagaatgaagagaaagcatatgagtattatgctagttatgctggaaatgtaggattcagtgttcgaaaaggattgtgggataaaacggtgaaaaatgttgctaggtcaagggtctttgtatgctctagggagggatttcgctcaaagaatgaggccaaaagacctcgcccagagactaggacaggttgtcctgcacggatagctataaaattggtatccaatggcaagtaccgggtagcagaatttgtggaagatcacaatcaccagcttgctgcaccatttgatatagatatgctgaagtcagagagagtgttgaccaaggttcaaccaggaaaccgaaatgctagtaacattcctccaggatgcaagaattacattcgggccaagtcttcaacacacatgaattcagaggaccttggagctctaatggattattttcgaagaatgaagagtgataatccctctttttactatgccattcaggtggatgaaaatgataaagcaacaaatgtcttctgggctgatgcaagatcaatagtagactatcattatttctgtgatgtgatctgctttgacacaacacacagatcaaatgactgcagaaaacccttagctttgtttttgggtatgaaccatcataggcaaacaatcatatttggctctgcttttctgtatgatgaaactgttgaatctttcaagtggcttctcgagacctttaagagtgccatgtgtgggaaacagccaaagacgatattgacagatcgatctgctgctttgaaggaagccctgagtctcacctggcctggtacaattcaccgttcttgtgtgtggcaaatataccagaatgcttttaagtccttagaacatgtttttaatactcttgaggaattcacacatgattttcaccactgcatgtttgatatcgaggatgaccaggagtttgatgagatatggaatgtgataatcaagaagtacagcctcaaaggagaggaatggttaactaagttgtatgaagatcgggaaaattgggccttgccatataaccggcaaatattctttggggacattaaagggatgttacaagtagaaacttcttgcgttgggctgagagagttcttggattgtgagaaagatctctctaaattttttatgttctttgaaagctcaatggagaagaggaggcaagaagagatacaagctgattaccaagccagcgaaggggcaccaagaatatctctgccactgctatggcaagctgcaaaagtgtatacaccaatcatctttgagttatttagaaaggaatatgaactgtgtatggactgtatggcttatagttgtggggagtttggctctctttctgagtacatgatcactgttaagaataaaactaaagaccagcttgtgcggtttgactcatcagatggcacagttgcatgtacttgtaaaaaatttgaaaatgctggaatattatgttgcc

SEQ ID NO: 21792 - DNA, 1418 bp, Oryza sativa
  ref <308>: DATABASE ACCESSION NUMBER: AK072028
  ref <309>: DATABASE ENTRY DATE: 2001-12-06
gctctctctctctcgctctctccacatcggtcgtgcggtcgtgccgccatcaccatcgcccctccccctcttcctcctctcttatttttccctccctttcgcttcgcttcctctcctcctctccaccattggcgacctcgcaaaccctagcgcggcgagcggggggaagatgagatgggacgcagcggaggcggaggaggtgctggagcggatctgggacctgcacgaccgcctcagcgacgccatcctcgccgtctcccgcgcgcacttcctcctcccgccgcctccgcctcctccgcctccgccgccgtctcagccgtcggcgccgcccgcgcgcgaggggaggaacgggtacgtgttcgtgaaggggttgaaggggggtggaggaggaggaggaggcggggtgggggatggtgtgggcgtgggctcggcgaaggccgcggcggcggaggcgatggcggaggcgaggagcctgcacgccatacggacggcgctcgaggacctcgaggagcacctcgagttccttcataccgttcaatcacaacagcgggcagagcaggatgctgcaattgctagattggaacagagccgactagtccttgccatgaggctagctgaacatcaggggaagaagtatagagtcattgatgaggccttggcgtttgtaggcgaagttggtgacaagagtcgattcatctcaccggaagatgttcgtgcaactcataaccagtcaggggaggatgtaatggacagtgggagcaacggttcaagtattatggggaatgtgttatcttgtagtctatctttggccaagaactcatttcgagtggacaaaatcggtagtgctctgggtaacgctgcagcgtttgctgtaagtatgtttgctttcttgcagctgcatcaagttgcctttggaagcaaatctccagcaatggattacaggaggcacagttaccattctgggagctcactacagagtggcaaaggaaagcaactcgaagtgtacctagccagaggttgaggaatcatcaagtcacttgctgttgcctgtacagaagttttgaccaaataccagttttcaccggttttgttagggcactaatcattctttatgacgaaatggactatgtttcaggctactaggatactaattgttaattcgtttggacgtgttggactacgttccaattaatagacgtcatacctctaaacctgtaaatggatttttcattagagatggatggaatgcttgtaagtctgtattctgtcagccgattggaattgctgtgttaggtttgttgtgtcctcatgagttatgaggattgaggagtgttgaaaggacaactgtttgttgtgccctcatgagttatgaggattgaggggtgttgaagcattcaaggattcaaggttctttgctt

SEQ ID NO: 21793 - DNA, 1745 bp, Oryza sativa
  ref <308>: DATABASE ACCESSION NUMBER: AK072029
  ref <309>: DATABASE ENTRY DATE: 2001-12-06
gatctgccacagccgcgaggcttcacttccactactactacggtactaccccccgctgttccgcccgcgcatccaccgatccgtctcagctcaacaccccacgctgccacgctgccagcaacgcaacccccgagtgcatctctcgcgcgcgcgcgtacatggcaacagcgtagtacttcgccacttgctgcggagacgacgatggcggtggcggcgccggcgaggaggttgacgccgttgacgctgcgggacttcctggagcagtccagcagcgaaggcttccgcgcctacccgcgtttccccgttgccgacgagggagtggccggaggagacctcgcgccgccggtgcgcctcctcatcgaggccgggctacgccggagcccgtcgcggttgccctccttctacaacttcttccacaagagccccggcacgctcgccaagatctcgcgcctctccaggagcctctcgcggcggttcagggacggcctctggaggcgccgcggcgaggatgacggcgaggaagacgacgacattgccgtcgacgagagggactcgctcgggctgccgtcgccggtggtcagcagctgctcctcgtcggagtgtgagtacatggccgagtcagaggctgagctggctacgacggaggaggagaagtgcgcgtcggcgtcgtcggcgtcggagtacgaaaagacgtcgcagtcgagcacggggagcgtcgccttccatggcgctgccgacgccggaggagacgggcataaggaggatgtgggtgacgagcccgtggggcgcaagttggagatggaggacaagcaacagctgagccccgtgtccgttctggatttccccttcgatgacgacgacggcgaggaaggaagcgatgccggcatgtgctcgccgtccttccaacagtgcctcgccgagctccagagatcgaaggcggagctgctgcacaagatccgacggctggagggcctgacgcaggtggtcgtccccgtggatctcgaggcgcaattcaccgagtctgattcctccgagcgcacgcatctcaacgccaactcgactagctcttctgatgacaccgcgacgacggcgcccacgacgccacggcaatgcacggacgaccaagatgtcgttaatcacggcgaggaggaggaggaggagcacagcctgctcgcgcggctgctcgagtcggttgttgtcacggacgaggtctccgagtggctcctgctcgacttctttgccgagggagtggaccggctccggtcgtcggcgtccagctgccctctcaacgattgcgaggaggcggcgctgctgcgcgccgcgggggattgggcgcgcggcgcggggcagcggtggggcgtcggggacgtggtgttctccgggtgggcggcggtggcggacatggagcggagccggaggtggatgtgcgtcgccgaggaggagcgggacgtcggcgcggaggtggacgggctcgtgatggacgcgttggtggacgagctggtcgccgacttggcacttggtggtgcgaccacggtaggggtggaagtgtgtacgtgccgccgatgaagtttcgagcgtgtcagggtgtaacgttttgtgtggacgttaacttgagtgttaacgtgacagggtttacgccgaatcgttcaaaaacaggatgtgtatgatgcaagagcgggtgctttcagtcatgggctttatgactttctcaggatgaatcagtacatatagcagattaataattc

SEQ ID NO: 21794 - DNA, 1736 bp, Oryza sativa
  ref <308>: DATABASE ACCESSION NUMBER: AK072030
  ref <309>: DATABASE ENTRY DATE: 2001-12-06
gagtagcagccctcgtcgacccactcccgtctccgatccgccgccgccgccgacgacgacgacaccggcagccatgtccaaccccgaatcgaacccaccaccaccatccgccacatcctgcccgcctcccggctccgccgcgcacgcgggccacgccccgctctgccgctcctgcggcgcgcccacgacgacgcccgtgcctcccccctggtcggcgtcctccgactccccgccgcctgcgtaccgccccatccgcatgccggccatcaacgcgcccaccaacaccgccgccatcgtcctctccccggtgccccagccgctccccgtgccgcccgcctccccgccgttcgccttccaggtccccgccaagcgcatcacctcccccgacgacatcgcccgcttccacgcctccgtccacggccgccacttcctcggcttcgtcgccgcgctctccgcctccgtccacggccgcaagctctccgacccgctcccgtccccgccatccccggtcgtttccgcgctcctcgagctcatctccgcgctctccgccttcgtcgcgtccaccccacagctcccacacaactcccgctacggcaacgccgccttccgcctgtggcacgagaagctctccgactcggccaaccagctgatcgctccgatcatggccaccgccgggtcgcccgacctcgccggcgccgaggccgagcttgcgccgtaccttctcgactccttcggcaacgccacccgcatcgactacggcacggggcatgagaccaacttcgcggcgttcctctactgcctagcacggcttgggctcatcaccgaggctgattaccccgcggttgtgctacgggtcttcgctgcatacctggacctaatgcgcacgcttcaggacacctacttgctggagcccgctggctcgcatggcgtgtgggggctcgacgattaccacttcctcccattcatatttggcgcggcgcagttgattgatcacaagtacatgaagcccaagtcgatccacaacccggatatcctggataacttctcaaaggagtatatgtacctcgcatgcgttgcctatgtgaagaaggtgaagaaggggccgttcgcagagcactcgccaatgttggatgatatcagtggcgtaccacattggaagaaggtgaacagcgggctgctcaagatgtacaaggctgaggtgcttgagaaagtgccgattatgcagcatttcctctttggttcactcatcaaatgggaggactgaagcaatatccaaaacccctctgcttcgaggcaaatgtccagaacacacacacacaccatcatgttctgcaagtactccgcctggatgcaaaagactgatgtacagcgatgctgctcaatgtctgtacctatagaagctcactttccttctagcgttatgggctccggcttaggggatgtgctcggtttctgcatgatggatagcatagcgtttcatcattcgttgtgctgtagcgtagtagttcctcatcacacccgctgtggagcttaaattctggaccttgtctgttcctgttcagctcacattgctttggagattcccctctggacaggctggtagtggtaatattaataactccatgtactcaggctttttgatgtggatgactgggaagtgaaacagtttctgttgttggtgaaggtacactgtttggtgctatttcatgaataaacatcctcctgccatggtaacc

SEQ ID NO: 21795 - DNA, 1545 bp, Oryza sativa
  ref <308>: DATABASE ACCESSION NUMBER: AK072031
  ref <309>: DATABASE ENTRY DATE: 2001-12-06
gacccaaactaaatttctctctctctctctcctaacaaaaatgtttggtgccaaaaaaaattaaatcaaattcaagttgcgtattaagaccacatggtcgatgtcttaacgagacgccttgtaatatcgtcacactctcgagcttagcttcctcctaccttcctccatcctcttcgtcttcctcctcctctcgatcgatcgcctcgcgaagtcgcgagctagccaagaatctcatctccactacataagcgagaagctggaagagagagagagagagagagagagagagagagagagagagagagtgagaggttagctagctagagatggaggtgatggtgccagtgatggcgccgagcgcgccgtgcagcccaagaacggcggcggagcaccaccacctgccgagctactgctacttcttctcgagcgcgccgacgagcccgacgagggcgagctactccggcgaggcggcggcggcggcggtgggggtgggtgagggggatggggcgttcgatttcgcgttcgggttcagtggccagctgcgggagtcgacgccgatcctcgcagccgccgacgagctcttcgagggcggcaggatccggccgctgaacacgccgcacccgagcattctgcagctggtggatgatagcgcgtacgcctcgcctcggtcgccggggaggaggcggaggatcgccgccgcggaggcggcggaggtgtcgtcgtcgtcgtcgtcgcagagagggaggtcgggccgtgctgcgcctgcgtcgtcgtcgtcgagcgcctcgtctcgtagccggcgagccacgcggtctctctcaccgttcaggggaggaggaggcggcggcgccgacgacgagtacccgtcctcgccgccgtcgccgaggacctccatgatgcgcggctgcggcagcggcagccggaagtggaggctcaaggacttgttcctcttccggagcgcgtcggaggggcgcgccaccggtgccggcagcaaggacccgctcctcaagtacaccatgctctcctcctccgcctcgtcggcggccgcggcgctgcaccacaacccgcagaagcttcgcggcggcggcgacggcagcgcgtccatgcgcaagggccgcgggtcgacggcgtcggccagcgacatgccgtacacggtcggccgcgccgccgccgaggacatgcggcggcgcaccacgacgccgctgccgttccaccggaacagcctcttcggctacctccgctccaacccggccatccacagcatcagccgcaagctcagcggctccggctccaatcgcggcaagaccgccgcttgagcgacacgcgccatggccgccgccggcgagtcgcgcgccatacatgcacgatgctctcgaacccaaccttgcagagagatggtcagaaaatttgccaaaattcgtccccttttttgtttgaattttcaatgtattctttcgtttcctgtgaaaccacaaggtttttcatatactagtgtagatatgtacgtagtacatgggattcgcaagaaatttggaagtccaaagc

SEQ ID NO: 21796 - DNA, 1682 bp, Oryza sativa
  ref <308>: DATABASE ACCESSION NUMBER: AK072032
  ref <309>: DATABASE ENTRY DATE: 2001-12-06
ggtatgagccaactgcaaaaacaaaaaagaaaaagaaaaatggcgccaagattaaccgccaaacggcctgcttccctctcctctcgcggcagaaacgcagttcttcagctatggtgtggatcagagaaatggaggattctgcagagccatcgccgcctccccggcggcgtccggtgcagctccggctcgccggacagcggcggcggcggcgccccgccgctcgtcagggcggcggtcagcgccgtcaccgagctactcagggtcctgactcccaagaaccccagagttgttgatgatgatcttcagaagggagatgaaggaggaggaggagcagagttggattcgccgcgcagcgtggatgatgtgattgctgttcttgaagccgattaccagcgagcatatttcctcactgggaactttactccggacatatataccgaagattgcttgtttgaggacccgacaataaagttccgaggaaggtctagatattcccagaacctagatctgcttgtaccgttcttcgacagcccttcacttgagcttgaaaacattgaaaaggggttgagggttgaaacaaagttcatcatggcaacatggacactaaggacatatttaaggcttccatggagacccctcatcgccatcagagggaatacaacatatgatttggatgaagaatacaaggtcactagacatgctgagagctgggatgtctctgcattggaggcgattgggcagatattcgtgccggctccgaaacaaacagatgacatctaattaaccagctaaagcaacacagagcactagtatacatgaatatgatgctggtgctttgccacgtagtgcttctcaaccgcaatgcataactgtacatttcctttttgtgattacacacaagtgggcgaaaaaaaaaaagacacctcgcaagaaaaaagaagctactaaaagatacacctaagatgggccggcccatcggcccatcaccgtcgaatgttccacaagcttcgcggcccaaccccaaccacccaaagccaagcaaccgtacggtctcctctctcgtcaaaccaaacccaagcaaagcacccgccacatcggagaagagagagagagagagagagcgtggaagcttctggaaggttctcgaagatgctgtcctccctgtcggcgtggctggtgaacccgcggcggaacccgctggcccgcctccacatgaacgccgtcgcctcccgcctccgcaaatacgggctccggtacgacgacctgtacgacccctaccacgacctcgacatcaaggaggccctggcgcggctgccgcgggaggtggtggacgcccgcaaccagcgcctcaagcgcgccatggacctctccatgaagcaccagtacctccccgccgatgcccaggcgaagcagacaccgttcagaggctatttatctgatatgctagcactggtgaaaaaggagagcgcagagcgcgaagcattgggagcactccccctgtaccagaggaccatcccatgaagcgtctacttcgtaggcctgtttctaattttcttgatgtatgaaagtgaattcaataaaacgcagtggacgattatgtaccatgtattatgctaaaatccttgttgtgtaatgtgttatgtgtatgcttattatgtgaagatacccaccgtcagttctcc

SEQ ID NO: 21797 - DNA, 1648 bp, Oryza sativa
  ref <308>: DATABASE ACCESSION NUMBER: AK072033
  ref <309>: DATABASE ENTRY DATE: 2001-12-06
ggccgcatcctaattcctaaaccctaacacggaaagccagctctcatctccaaactaatcaggcccatgagccgaagacctctagttggctttagcaatgtcatcaaaaagctcgccaagggaactgactggaaagaagaaactgactaaacatgacgatgaagcattaaggtttattgagctggctgagaatggtaccgaccccgcaactatcgatgcatccgaagaattggcaaagaagccgttatgcacttacacatataggacactttttcgcacttttaactacaaagggatgcatgtgctgcatcactctgccaagggtgcacatgttactcttactcatcatttagtggagtttttgggcattgatgttgacaaaaaggatagcacaggtaggacgattcttcatattgctgttccgagaaacagcggagggtattttggccatgtccttgcaaagcttgaacctagcattgacatgaaagataatcttggattaacaccgcttcagctatctattcttcttggcaaatatgctgcgatgcaaaaattgatagactttggggctgacattcatatccattctctttatggaggaccaattcacgcagcagtagcactggatgatgaaattgctcttgaagctcttatgagaaagaccaatacacgtcttttgctatgatgtgttttcacataatatgaatctagtgttttcacataatgtgtctttattaataggtggatgatattattgatggaggtataacacccttagcatgtgcggcatacaatggttcagttacaagcatgaaaacgttgttgcaggctggagctaatgttcagatttcaaagccaatcggcaaagctatagtagctgacctcacttcatctgaatctatggttcagattctacttgattctggtgctaatgcagacgcaattgatgaggtcatgtttgaggacccacccatcattgctgcagccaaaaggaaacagatgaatgttgtccaacttctattgagttcttccaccccaatcgaaggtgttgactggagcttgaatggtataatagcatatacagaatctgttacgtttaaagcagaggacgatgtccatacagcagcaagagttactgcgctgcgtgagcgcatgtttaatgctttggaaaacataaactacttgctagctgatatttgctgtaaagcgctgagaaatgatgtgagtacaacagagtgggacaggttgaggaatctcaatctgctttatctttcacacagtttccatggtcagaaacctgtcctgtcatctgacgccattgttaatatggccttggtttatcaaaaacaggacaagggcaaggaggttatgtgtttgaaggcagcgttggcgctgaaccctcaaaatgagagagctgaaagtcttttgaggtaagtttgttaagcctttatgtgcttgaccccttgcaaaaaaatttgaagtggaagtggggtaatactgttaagccttttggggtaatactgttcctcaaatggaagtgggacagagaggctctcttttatataaaacaaatttttgtttaatctgcatgcaaacagctgacagattaattcttcagaaatgaatgaggcggctgaagttggattcc

SEQ ID NO: 21798 - DNA, 1614 bp, Oryza sativa
  ref <308>: DATABASE ACCESSION NUMBER: AK072034
  ref <309>: DATABASE ENTRY DATE: 2001-12-06
ggtggctgtttcattcgcgaatccttcacggtcggactcgtcttctccggtctccccaaatcgccaaatctaacctctcgcctcgacccccaccccctctacgcctcgccatggcgtccgacaccaaggcagtagccgctctcttctccatgtacaacgacgacgaggaagaggatgacggcgacgagcccagacccccttcgccgcccgccgccgcaacctcctcgtcgccgtcacctcagaccgaaggcgagggctcaaaccctaaccccaacgctgccgcttcttcggcgcccccatcccctcccctcgccgaggatccggccggccgcagaaccctagccagcccctacccctcgccggggctcccgccgctgccttcgcgccgctcgtcctcgcccttcgcgatttcgtccccctccccgctccgccccgccgcggccatgccgccggccgacctgccgcgcccccctcggcgtggcccgcttgctatcgtggactacgctcatgacgaaacggccatgtcgccggagcaggaggatggggagatcaatggcatagacagatcgggtttggatgctcaggttgctgaggggaattatgaagaaaagactctctcaggtattgttcacatactgaccccaaatatacgatcagaaatgtctcagcagaacgatgcacctgaacagaatcaagtaggggcagctgcagcaatgagtgtaactggagcagaaatggaagatgttcaggtggaagaagctgctgataacatgcagaatgatgatcctctgagtcgtttccttcctcctcctgtgactgcaaaatgttctgcagcactacagcaaaagatcaacaagttccttgcgtacaaaagggctggaaagagcttcaattctgaagtgcgcaatagaaaggactacaggaatccagactttttgcagcatgctgtgcggtaccaagaaattgaccagatagggacctgcttcagtaaagatgtttttgatccttatgggtacgatagaagcgattactatgatgagatcgaagctgatatgaagcgtgaagttgagagaaaggaactggagaagaaaaagagtggaaaggttgactttatcactggaggagtacaagctccaattagtgcggcaataccgaaaattgcagctgctgtatcagcagcagctgctgctggtgcaccattggtttcgatatcgggagaaggcgtacagaaagaggctaggccaaacaagaagtcaaaatgggataaggttgatggggatattaagaaccctgtggctccaagtggacttgataatttgtcagcagccgcgcttctaacttcagcaaatgttggtgctggatacgctgcttttgcgcaacaaaagaggaaagaagctgaagaaaagaaaacaagcgatcataagtcagacagaagatcgtagtgcttctctccttttcttttgagttaaggatgtactatttggaggttttcaattacatagccttataacgtgaaaaaaaaaaccttcaagaattggccaaaaaacatgcttacacaatgtgttccctatgtgttgctatttttactataagctgctttttgggcgtattggc

SEQ ID NO: 21799 - DNA, 1879 bp, Oryza sativa
  ref <308>: DATABASE ACCESSION NUMBER: AK072035
  ref <309>: DATABASE ENTRY DATE: 2001-12-06
gacagagaatggcaacgccccgatgctcagcaactaccgcgcccagcctgcgccaccgctcgccgagcccctcctcctcgacaagccacagcgcgcgcactggctcaggcagctcaaaccgtggcgccgcaatgccgccgacgaccacctctccgccggaatcgccatcaactggagctctgtgcgttcggcgaccaaggactggatcaccaaccccatgaacatcgccatgctcctctggcttctctgcgtcgccgtctccggcgccatgctcgtcctgctcctcctcggcctgctcgacggggcgttccccacgccggcggcgaggaaccactggatcgagatcaataaccaggttctcaacgcgctcttcacgctcatgagcctctaccagcaccccgtcctctgccaccacctcttcctgctctgccgctggcgccccgccgacgccgccgacctccgcgccgcctacttcaaggacggcgccggcccgcgccacggcgagcgcgcccacatggccgtcgtggtcgcgctgctccacctcaccgtcgcctgccagtacgtgctctgcggcctgtactgggggtacaccaagaagacgcggccggagctcgtggagaatgggttcttcgtgctcggcgtcgtcgcgccggtcgtcgccgtcgtgtacaccgtgtgcagcccgctcggaaaagacaactacggcgagctcgcgtgccccaacgccttcgactcggtgagccaacacaaatgcacgggacacgccgtggtcgagccggagtgggccggcggcatgttcgactgcggcggcgacgcgacggcgtggtggctctccctgtcgtgcaccttctgcgccttcgggtggaacatggagcggctcggattcggcagcatgttcgtgcacaccgccacgttcgtgcttctgtgcttcgcgccgctgtgggtgatgggcgtgtcggcgctccacatccacgacgtggtcatcggcgacatggtcggcggcgccggggccctgctctgcgtgtgcggcctgctctacggcggctactggaggatccagatgagagaacgcttcgggcttccggcgagcacggcgtgctgcggctcgccgtcggtgacggactacgcccggtggctcttctgctggccgtgtgcgctggcgcaggaggtgcgcacggagagcctctaccacatcgattgcgagacgttctacaagaagcttcctgttgtcgatgacgttgaagacgagaagaggctaccgttgctggcgtcacaccatgtccaattccatgaaccaccggacacgatgatcatggcagcatcagagggatcaaatgatcatgtggtgattgttcatgaggagatggttccaccggctgtacaggttgtggtggagcaagtcgtcgttgaaggtgataaatctgaagaagaatgcagtgcagttcatgatgagaagatcatgggttcgcctcttccggaatcggtggtgattgtggatgatgatgagataccggccagtttgtcggatggaagctggacggtggagaaggtgaagagactgataaatgttgtcactttggtttctttgctcattcttctctacaccaggggattcattcgttagtgaggcacagaaaatgcatacaaaaggctacagattcaatagctacttagctagatgactgaattctctcatctttctccatttctttttgttggttgtgatcgagaggaagttcattctttggagtttgggtgtacataggcatactgctggcataaagatgccacaggattttgaagggattgtatatttgtaatccgttcccagctgcaattgcaccttggaaatagtgaatctctaatgcaattatatccc

SEQ ID NO: 21800 - DNA, 1500 bp, Oryza sativa
  ref <308>: DATABASE ACCESSION NUMBER: AK072036
  ref <309>: DATABASE ENTRY DATE: 2001-12-06
gactgctagagaagttcagatccttaaagaattcgcttcattttgatcacaaaagatgcccaatcattcacatccatctttttttgtataatggataaaatccggccaccatcgaagaagagagagacacttatcaaaagaacgattctattgttaaatctccgtctgaaaatcacttattcacatccatctggcatctgcgttttgctaacacgaacacaactgaaaatcatctgatgatctctgtcgtatatatatgtacacacgtgtcaatttttttttacttgctacctagcttgttagatacttggatccgtacatacgttgctgactgggtttttgccatgcaggtgcctggacagggcggccatcatggaggcggacctggcagcgtcgccggcgaagacgaaccagacatcggcggcgccggcggcgacggtgacggaggtggaggaggtgaagatggtggtgaagctgctgcccatctggtcgacctgcatcctcttctgggcggtgtactcccagatgaccaccttctccgtcgagcaggccacccgcatggaccgccacctccgcccgggcgccgcccccggcgggttcgccatcccggcgggctccctctccgtcttcatcttcctctccatcctcctcttcacctccctcaacgagcgcgtcctcgtgccggcggcccgccgcctcacccgccgcccccagggcctcacctcgctccagcgcgtcggcgcgggcctcgtcctcgccaccgtcgccatggccacctccgcgctcgtcgagaagaagcggcgcgacgccgccaacgacggcggcggcggcggcatgatcagcgcgttctggctggtgccgcagttcttcctggtgggcgccggcgaggcgttcgcgtacgtcgggcagctggagttcttcatccgcgaggcgccggagcggatgaagtcgatgagcacggggctcttcctggtgacgctgtccatgggattcttcctcagcagcttcctcgtcttcgccgtcgacgccgccacgcggggggcgtggatacggaacgacctcgacgccggcaggctggacctcttctactggatgctggccgtgctcggggtggccaacttcgccgtgttcctcgtgttcgcgaggcgccacgagtacaagcagcccgccggcacggccgccgtggtggtggcgcccgccgctgccaaggacggcggcgccggcgaggagaaggagatggacgacttcgtcgtggtcaaggaggccgtagaagggatggatgtgtagacgtgtagtgtgtacgaatgttagtgtgcaatcgtagtatagaggtttgggtttttgaggtagtgtgcgtagcagttttcgtgcagagtgcagtgtatgatatgatatgatgctagcttcaatctcctgaaaaatgttaatggagatagatgagctgaggtaatgtttgccaagtgaagatattttgaaaaaaaaaagtgttgtaaatttccc

SEQ ID NO: 21801 - DNA, 1857 bp, Oryza sativa
  misc_feature (930)..(931): "n"=any one base of a, t, c, or g
  ref <308>: DATABASE ACCESSION NUMBER: AK072037
  ref <309>: DATABASE ENTRY DATE: 2001-12-06
gaagattttcttattcttcttcttctcctcctctctcttctcctcttcttgcacctcctcaccttctcctctcctctcctcttcttctccatcaccatccacccatccaactggtccaactcctccaatcgtttgcttcttcttcttcctcttctcgctgttcttggtggaggaggagattagggtttgattagggtagatagagagagaggggttgggtttggttggtgtttgtgtggagatggaccccaaattccccccacccccaccgctaaacaaaacggagcccaccaccaccaccaccaaccagcagcatcaccacgatgagcagcagcagcagcatcgcctccagattcaagttcatcctcagcagcaggagcagcaggatggaggtggaggaggagggaaggatcagcagcagcagcagcagatgcaggtggtggttgcggcggcggcgggggagaggaggatgcaggggctagggccgaagcggagctcgaacaaggaccgccacaccaaggtggacgggcgggggcggcggatccggatgccggcgctgtgcgccgcccggatcttccagctcacgcgggagctcggccacaagtccgacggcgagaccgtccagtggctgctccagcaggcggagccggccatcgtcgccgccacggggaccgggaccatcccggcgtccgcgctcgcctccgtcgccccctccctcccttcccccaactccgccctctccaggtcgcaccaccaccaccaccacatgtgggcggcagcgccgcccacggcgtccgccgggttcgccggtgcagggttctccggcgccgactccggggtgatcggcgggatcatgcagcggatggggatccccgccgggatcgagctccagggcgggggagcgggggggttggggggtgggggtggcgnncggcggtggccacatcgggttcgcgcccatgttcgccagccacgcggcggcggcggcggccatgccggggctagagctagggctctcgcaggacggccacatcggcgtgctcgccgcgcagtcgctcagccagttctaccaccaggtcggcgccgccggtcagctgcagcaccagcaccagcatcaccatcagcagcagcagcagcagcaggacggggaggacaaccgcgacgacggcgagtccgatgaggagtccgggcagtagtagccgcgccacctgaatttgttcatccacgcgtcgtctcttcggaggagaaaagagaattctaggaaggacatgcagctaatggaggggggaatggaatgcttttgttactgttgggttgttcttcatgggggtttttatgtctgattttttttcctcgtgtggtgtcgaagctcgaaagaggctactactttgctccggcgacttgttgggatggatcatgatcatcttcagttgttactcctgctgctccatggatggttgccggtttatccccctccaagtgtttaggtgaaagctcaatatttcgcactcgacagtcaacacatgacatgatcttcgaaaggttgcttgatgagcttatgtatctgtgtttgtgttcatttttgcaggtgtataatagccgagagctggatggactggatcatcgctgtcgagtgagtgctttatttgttattgcaggtcgttgtgtagatattcaggtatttttgcagttagagaggtcttctttttttcctttttacgagagtgatgatccgcttatgtgcgacaaatacgatgtccgtcaaactgatcctcacccacgggctgtttctgcaacgcaaatatgatgcatatacatttttagaggcctgattttatatgcttattcttttgtggc

SEQ ID NO: 21802 - DNA, 1900 bp, Oryza sativa
  ref <308>: DATABASE ACCESSION NUMBER: AK072038
  ref <309>: DATABASE ENTRY DATE: 2001-12-06
ttgaagcaaagaaagagatagagatagaagactctgtgtagtgtagtgtgagagagagtgagagagagagagaaagaaaaagctctccctagtccctagtgcgtggaggagtagaggtagagcaaaccactgaaccacatcgccttctttctactggtttctaccgtgttcttgctgctgctgctgttcttcgtgagcctcctcgacgacctcgatctgcttgtttcttcccggctccatggcggcagcggccgggccgtagtggattttgtggatttcattatcaaaacgggaaatagactatggattccaacgagggctctcatcgtataacacgaagtgggattgttagggcaaaacctgctgtcacggccgatggtaagattgagcctgctggggaggggttacctcatggatggttgaaagaatacaggcctcggaagaaccaatctgggtctagagtcaagggtgatacgttctatattgatccaaccaatatgtatgaatttcgttctcaaaaggatgttcaacggtatcttgaatctggagatgttactaattgtgtaatgatacaaaataagaggaaaatggaagacctgcacactgcaagaaaccaatctcatcatacacgaagaccatctgatcacagacaacttgatgctggtgaaggggctactcaatgtgatctaccaatagcaagaggtaatagtgcacggagtgattttttggtaaatgcaaacagttcagacaattctgaagatatgtcatcatcagtgcccaagggtgtgtccgaagggaaacttacacggttaaagcttcagaaggcaagggttccgaatcaatccgtggagcatgaatcttccacaggagaagtagcaaatatggagcataagcccaaggaaaagaaacagaaaactaaacctgtcaaacagatctctacacctcttcgagcgtcacctcgtttagctgcgctgaagattaaccaagaaggcaataatgagcccaaagatgaagctctcagcacaaacacagacactgctaatcagtcacaaccaaagttgaccaaaagtcctaaagcaaaggctaattcctctgtacttcctgagaagagtgatggagcacatacttcaaatgcttctgaaattcctcaaaacaagtatccatcagctaccgagcaaatgcaaggatcatctgttcatcctcaacaggctggaacagctgatgctatgcctgggtccgccctttcatcgttattgcgaagtatctggtcagatccatgcctcaagtttgcgatcaagactcttgcaggtgacatccctgctctagacttcattccatcacaggacatgaacaaagggacgacaccgaattgttcctcttctgcttatgatggtagtagaaaccatgcgcaagtcgaccatgtcggcatgccaatgccaaggccatcagataagttctacggcagtggctggtttcctccccagtgagttccatctggggaatatgtggcaaatcttctcacctgcaaaagcaaatcagaagaaagccaaagactaaccagcctcacaggcttcttagaactcctcattaggtaccttgacaaggatacatgttgcaagaaagactgtatcttgttggaactgtagtagatggttcgtcactaataagtaataataacctaataatatacccccatcttatgctaaactggacactattttctgtctgtctgaatttgtgtagtaacctgactactaattcatttgtttgtatcattagtgcagactagagatgctgattgtatgcagatgcctgtgccagattgtcatgctcagggtcactgctctgccagcacaaagacccttcatgtgtattactactacatgtaataatagcttag

SEQ ID NO: 21803 - DNA, 1530 bp, Oryza sativa
  ref <308>: DATABASE ACCESSION NUMBER: AK072039
  ref <309>: DATABASE ENTRY DATE: 2001-12-06
gggagacactccgtacgagataggcacgcgcgctcatggagccactcgtgcgatcccccgtcacatcgccgccggcgatcgccggagcagcgtcgccatccccgtcccgctccctctcccgcagaagagcccctccggacgccgcggccttccctaagccctgggtgatcccttcctccagcgtcaaatccgccgcgtgcttgcagctgcagcaggcgcgcgctccccgccgatgcgcgcggctcctcgccagcgccgccgaaggaggacgaagaggggaggagggctctccggcctcctccagtgatgcggatgaccaggcggaagccttgcccttcctcgagagtgatagccatcatacgcaaacaagtaaacatggtgagagtggtgggagcaactctggtggatctagagccggcctattcagaacaccaatttcagggggcgtacacactgcgacttctgttcatgatttacccccaccggctcgagctgttcgcaatctgatggagcaggcacggtttgctcatctgtgtactgtcatgtctcggatgcatcatcgacgtgcaggatacccgtttggttctctagtggattttgcacctgatccaatgggacaccccattttttcactgtcccctttagccatccacacaaggaatcttctggaagatccgaggtgcacagtcgttgtacaggtgcctggatggagtggactgtcaaatgcacgtgtaacaatttttggtgatgttgttcccttgcctgctgacctgcaggaatgggctcatcaacagtatgttttgaagcaccaacagtgggcatcccatcagtggggcaacttttactattacaaaatgcagacaataagtgacatatatttcattggaggttttggcactgttgcttggttagatgtgaaagaatacgaggctctcaaacctgataagattgcgactgatggtggggagcaaagtttaaaggaacttaatgcaatgtactcaaagcctttgaaagagcttttatcaaccgaaatagaggtagatgatgcagctcttatatcaattgatagcaaaggtattgatatacgagttcgacaaggtgcacagttcaacatccagaggatagcctttgagctgcattacagcgtagaaacacttgaagaagccaaggaagcgattaggaggatattaggcaaatcaagatggcatgccaaattttagacttccttcaaatctgaatgatgaattcatggatggaaactatcaagcgcctgaatcctgtaaaatatttgtatatactcatgtaatttttgactttgtggtgtgccagatggaataagggaattccatttcactcttgtgttacaagggcctaaaaggcctgaagactaaggatagagtcaaatgttattagcttctgtacagtcaattcacttctagtgctgggtttgataggaaacgaagtacatgcagctaacaaaatgtaatatccaaaaatggtttgacaattgagattatgcaagtctatttt

SEQ ID NO: 21804 - DNA, 1983 bp, Oryza sativa
  ref <308>: DATABASE ACCESSION NUMBER: AK072040
  ref <309>: DATABASE ENTRY DATE: 2001-12-06
gacttctctctcccctcccgtcttctttgctcaaatagccatcgcgagtctcgcgaacttccccagctgcctcaaagccggaggagctcgccgcccactccatgcctcgcgtgctccccgcggagccggcggcgaccaaggcggcgttggctcgcggtttctgacgagctcgcgggcgcggaggcggggcggtcggcgactcggcggcatcccctccctccctacgctgcaaccgcaacaagtaagcccgatcgatcgctgctcctgcctgtttcagtgtttctgctccggttaaaattcagaaagttcacgggaaatgcattgcgaattttaactgtacagatgtttcgtttagtcctatctagaaactttttttttttaacggttcgaccgcgacgacgtttttgtctcaaatgaaaacgaaacgacgtttttagtggagagactacagcaaaatttccaatgttcagaactaggaccaggaggatactctagtctatagctatagctgccataaacgcagatgattttgagaaacgtggcccatgcaccaccaccaccaccgcgccatagctaaacaacaagacaacgtaactcagctagctgcagtttcactttcacagtaggaggaggaaggaagcaaggaacgcgagaaagaggccacagcacatgcagcttcttaaatacacagtaccaactaaagtgtcgcaacagtgctcgtagtattattgcaacgcagctagtagccgagagcagcggtgtgtacctcgacgtgtgtgacatgacatcctaggaagagatctctagccgcgcgctgcccggcctgaacaatggcaggatcgtcggcagtgcagcggcgccgctgcaacgctactagctactcctcctcgctgacacgaagcatcagcttcgtttactacttgtcattaataaaaatctcgatagcagcaaggtttggttgagttgagctcatccggtgtcttctgacttccatggtcagcttgctcgcgtaatctcgtccgttttctaatgcctctagagtccaatggaaatatggaatcttgccctttatttacgtcagtagttgctgtagctctatctggccccttcgtcaggacaaaaggccactgtctctaacatattaaaattcaaacggcttcgaaatgtttacaagtaggtatacttgcattggtttcaattttaaaaaggatcaaaaatatagttggcgtatgaatgcttcaccactcattttttttctgttactataaggagtggcattcctgtccgtgcacgggtcatgcagttccaaatactattaattagctcattaacgtgtattagaacgcaagaagccgagatcggcgcgcggcttttgctgttcttgttataacggttgcagtaaaattattggagcttttgatgataaacacggcttctttccacatagaaagctactgaatttcccactaaaacgaagcgttcatcaaacaatcacctgtgtggaccaaagcaataatagcatcgtctcttaactaatgccattaaaatttaggcccaattcgcttttgcttaaccaccgaatgtacattaaacatcaaatgaagcgtgcaacttggtcgccgcaacaaatacaatcatcgccatgccgtccaagctatgggtatctatagatacaattatttgggggacaagggctcggcatgtttttgcgctgctgtgtatttaattctagtccgatgtgcaacagagtgggattgatggcgacccaagatcagtttgtttacagccaatcttgtttaaccttaggtgtactttggtcacgcatagcttgtgccctgttctaaaggacacgtgtaatggtatcgatcactaccctggtttgaattatgccttctttgtaagcagtgatccttttggaaaatttgtaggaactagttcgatattggtaaataatactcgtaagtacaacaattttgcaattcg

SEQ ID NO: 21805 - DNA, 1788 bp, Oryza sativa
  ref <308>: DATABASE ACCESSION NUMBER: AK072041
  ref <309>: DATABASE ENTRY DATE: 2001-12-06
gggaaaaacagcttcttctcccctctaacccaaaaaggctgaacctccaccttcaccgcctccgcctctttgacctcctcctccgccattgccgaccaccccaagctctcccccctacaggagccaagagaaggggcaccgtgccgtttcttggacggcggcggcgatggacggcggcagggtcgggggcgactacatttccagcctcctcagctcctccccccggctcgacttcggcgtgccggtgctggacgccatcgtggcgccgggaggcggcggcggcggcggcgactgcagcctcgacaagctctgcggcgacccggggttcgcggagcgcgccgcgcggctgtccagcttcaacaacggcggcggcggtgttgggcagcggtacggcggcgcgggggcggggctcttcgggatgcctcctccggctcccggcgacttcgccggaggtggctccagggaggcgtcctccgtgtccgaccccgcctcctcggcgatgaaggacgccgccgccaatgccaagaagaggaagtccacggcggcggcggccgccgccgccaagggcaaaggcaaggagcctccggttggggaagagaaggaatcagatggcaagaggtgcaagacgggcaatggcgagaaggagagctcggtgaagccgaaggcggagcaggccgggagcgacagctccgtcgagacggcggcggtggcgggcagaagcaagggaaggggaagaatgccaagccggtggagccacccaaggactatgtccatgtccgggcgaggcgaggccaagccactgacagccacagcctcgctgagagggtcagaagagagaggatcagccagaggatgaaggttctccaggacctggttccaggatgcaacaaggtaattggcaaggcactcatgcttgatgagatcataaactacgtgcaatcgcttcaacggcaagttgagttcctgtccatgaagctagcaactgtgaatccacttgatttcagtaacctgcctactctgctgcagaaagatatgttccaagcatgcggcccttcagcgagctcggttttctcattagaaagctccaattctgcttttcggtttgccgaacaaggagatgttttccaacagtttgctcaaaacagcatggaaagccagtgcaccctgaatcagttggacctggctctatctcaggctacaaatgctgcacagtatgcttttcaagatggaacagccggcgcaaacttgcagcaaaggaacttctgggaggatgatctccaaagtgttttccatattgagaatggacagagccaggagaatggggtttcagcaccaaacttccatggtcagcagcaagcaggccacatgaaaatggagttctaacctgcttaggccacactgatcaaggaaaagaatgacaatctgtacatagggaagagacccaagtgcaaaactcccattggcaaagctagtgaagctctctgaactcttgaagctaacagtcatcattaggctcttaagagaggatatttcttaatcatagtctgcctgtagggcgatgtgattcttttggtacctactatttgagatgattatattttgatataaccgtaacaaattaaaatagttaatttgtgtataaagatatggtgcagatattacaaagcaccctcttcttcttctttctgattatgtatgagctggccaattagcagctagctggatggatggaaccatgtattaccactgttgcattttgtctatgatgatagttatcctcaccttatc

SEQ ID NO: 21806 - DNA, 1637 bp, Oryza sativa
  ref <308>: DATABASE ACCESSION NUMBER: AK099235
  ref <309>: DATABASE ENTRY DATE: 2002-08-28
gaggccgccgccctccgccagcagttccctgaccggcgccgcgacttctccgggccagtggaacgaagttgccgcatcggcgtcccctgcatcccaccgcatcgagaagggacagggttgctgagggcagcagcgccaccagcccaaccgtggtgatggcttcgtcgccggagaagaaggatcctcctagttgtggccctcgggattcccagcccatcccttgcacggacgatccccccttgtctgaatccccaacgacggacctaggctgccacgatccgcgcgacgaggacgccgaccacccggcaccacccatgggcaaaggtgacatcgacgaggatagtgatgatgatggttacgcagacgaggagacaacttgcccagggcagaacttcacgaaggagcaggcaaaggaaataattcgcaagtggctagaaacatacgacaagaggaatagagaattcatggtggcgtgcgaggagttccaaaagcagggaggggatgagacgagtgcttcttgtccagtatttcctttgaaaccgctcccggagacaacagatttctgtaccaccaagagtttgtgctatcaccgtgaatacaagaccaatgatacttctgagactgcatctactattgggtggcttgaacccaaggagatgctccagatcttctctttgaggttgtccagctccatgtcctatcctattagtgtttacggaatctttgcagtacgtgattacttggaccctttgaggaattatgtcttcaaccgtaccagagatgatcctgtcatagttgaacaggattccttcacattacctctttgcagcccttgtcgaggaatgtatgtagtagaatatgcattgtttgaggttgatctttgggtgaaaatggaaggtggagtatctaatgacaagcaattagtatccgcgtatgtcgagatttttgcccgtggcgtgtttaataaggagataagggggcggatattaagcgaccactgctatctggacatacactatatgtatctttcacagagtattgaagctgtcatacaagtatccacagagattgacagtaacgatcctcgtcatgtgagattcactgcattttgtagtggctttgaccgtgagattttgctgttcaatgggaaattctgcaaggacaagtctttccagcacattgtggcaatgaagtccaagggaaaactggttgttcacttggagtttgagggatccctgttttgctggacttttaacaatggtgagcttggagctgttaattctcccgatgattcagtcctgaagcaatttcatgtcagggtgttgttttctccaaaataatgtgtaccagcctataatagcttctttgggtgaaggagaggaagtaaatcagtataaaaagcttgatacaatgtagtgcttgtgttaagatgcttatctgggtaataaactagaccagtacttgcattcagatttgcaaattgcatccagggccgagattgttggaggcactgttcacaaggaggcttaatctttgaaacctggatgggatgtccatccatcattgtgctctagcctctaatccaaacattgatggattgtacacaatttgtgctttatgggcttaattttacctct

SEQ ID NO: 21807 - DNA, 2040 bp, Oryza sativa
  misc_feature (219)..(219): "n"=any one base of a, t, c, or g
  ref <308>: DATABASE ACCESSION NUMBER: AK099236
  ref <309>: DATABASE ENTRY DATE: 2002-08-28
gagttgccgcgagatagatggcggcggcggtgctgaacgccctctcgccggcggccaccgtcgcgcactcgccggcgcggacgcggcggggctggtgtcggcgatcctgcaggcggtgcgggcggccaggcggaaccggagggagtgccgcctcctggcgcggcgcgcagatgatggtgggcgacctgctgcggctgctgccgccggagtcggagacantgcggcggccggaggtgaggcgggcgctggacgggctgggcggcgcgctccggcaggcgctggagctcgtggaatcgtgccaggagagcggcgccgtgccgtggttgatgacggcggggaggcaggcggagcagttcagggaggtgcagggcgagatcaacgactacatgctactcttccccgtcgtcagccacatcgacatcacccgccgcctcgacctgatttacggcctgctgcttcctgcagactctcaaccccaccagatgccagaggatgcgccaggttcacctggcgaccattttgaagctgatgttaggaatgtggagatcactgcagctgaggtaattccgtttgaaagcaatcaaactataacagagccttttgagttcggtgaacaccatgtagcaggtcatcaggaaggtttggaagagctgctgtccaaagtgcagaggttgaaatggctttgctggtggtctcagcatgattctctagagcgtccatcaacttatgacttattaaaggctgctacaaataatttctcatctaaaagtaaaattgcaagtgggggttgggctactgtttacaaggctcaaatgcgtaatagtcttgagattgcaatcaaagtatatcctatgggcacgggagaaaaacgtgtattttcccagtacgaaagggagcttaatttacttacgaagcttcagcatacgaatataattaaacttcttggacactgcactggagaatgggagctgattttgatatatgaatatatgcccaatgggagcttggacaaatttatacatggcccaaatagagaagtatcgtttgactggttttcgtgcttcaaaataattcaagggatagcagagggtctgctctatctacacacgtatgaagctgagatatgcattgtgcatagggatttgaaaccgagcaacattctgcttgattcagatatgaatgctaagataggtgattttggtatagctaaaactataagcccggcacggcagcaagacacatatgtatcaggcacatttgggtatattgctcctgaatatcttcgtggaggtattttatcaacaaaggttgatgtatatgcctatggtgtcattcttctagagattattactggcaggaggtcctgtattccctgtctaaaagatgatgagtatgtgcatttaactgagtatgcctgggatctatggagaaccggaagatcagctgagcttctagatgcagcattgcgcaatgaggctcgaattgctgagataacaagctgcattcagatagcgttgttgtgtgttcagaaggatccggctgaccggccttccatgttggatgtgcttgcgatgctaagagatgagaagattgtagctgcccctaagaaaccaggtgatcttctccttggagacgaaacgagcgtagagtcaggtgatcttctccttggagaggaaacgagtggagagactgcacattggttcgcaagcagcggcgctacttgcagttctactgagttcacggtgccccggtgagaagagattttgtcatatttgaagctggtggctacttaaggtgcaagtacgttatgtataaagctattacctttgattattcacagcgttgcaagcaaaataagcatggtgaatgtgtatttcagattctgagtaattatggatttaccatatgtgatggaaataaattaaacatacagaaggtggaatgtatagtatatcataaatattttagacaaaattggctacaagcaatataattctgtggcatttgcttatgggcgaaagtaaaaaaccaaacatttac

SEQ ID NO: 21808 - DNA, 3226 bp, Oryza sativa
  ref <308>: DATABASE ACCESSION NUMBER: AK072042
  ref <309>: DATABASE ENTRY DATE: 2001-12-06
gctctccctcttctctctccagccggagggtggggtggagcagtggcggtggtggaggcggcggccagagttgagtggggaaggagcggtggcaaccttcaacatagtatgtatttggggtaaaatttgtgtgtgtgctaccttctctcccatgacttcttggatttgggcgacatcgccggagatgctgtgcatcacctcgccggtgctcacctccgtgtcaaagaatccgatctcctgcctcagcaccgccttcaggtactcacgccgcatccgcagcgccgacctcttgccgatgatcctccagcaggtgatctctgcttgcacagagtcagaaactcataattcgattcaagagattcccaagaattgaactttgtcatggttaattcgcaaaaatgctcatcaagataggctcctacgacgagacctgcagcaaggaacgccatgtacacactaatctgcatcaagcaaaaaaaaacgaaaaggagaagatcggatttgtatcaaagctgagaaatcgaagaaggagaaggagacgtgtagctgttcgtggttgtcgcgcgagaaggagacctcgcgggaggcggcggtggcggcggccttagtgtcgctgtaccggcgtcgtggccgtgcgcggagtagacggcggagtcggcaacgacgctgtcgtcgttgctggcgaaggaggtgttgtgttaggcaccacgacgatggcgcggctcgcgtcggtcaccacgctctgcagctccagccgcctgccgccaccggcgacgggtctgtgcgccgacgaggagatgtcgcggtagtgcgggcgggtggaccgcctcgacatgtagtagtccctcgccgtccgccgaaacagcgcggggcggggaggagtgggccaggcacctgatggcgacgacggcggagggcggcggggtggaggagtcggagtgaggaggagccggaaggaggcgatgcgggccggcggttggcgtccgagggaaggaggcagccacacggcggcgccagacctggcacgacgatgggccgggccgaggcaagggcggtggccgcagtggtcgtcgtcgcgctccacccgccgctcgtcgccgctccacccgccgcctgccacctctcagctccgtcgccacccatctgcgccgcccgccgccgctcgctattctcaggggagagagagaggggggagagagggaagaggaagtagagagaggatagagagaggggatagagagaatgggtagtgaggatgataggtggtgtccacgtgggccccatcatttattattattgtgtgtgaaactgatatttgggtcctatagattttattatatttcggatcaaattgccacgtaaacgccacgtcagataaagaccgagccaaattagccacgtatgtgccacctcagctaaaactgggtcaaatacagccataggaacttatttaaacggtttcaagttggggacctatcgtacccggttttgtgatcaagggacgaaaatcagactgggtgataaatagagggatgcaaagtgaacttattcccacaaactcctatgcccgagaagctaaacaatcctggcccggcccattacttttgatgggccagtattgcgggcccaaaaaacaggccttatcgtctcgtggaagcaatccgccaatcacgccttccttataaacgcccccgctttgattcctctccatttcgaaatttccgaccgttgctcctccccctttcctttccccacccaacggcatctcgtctccacgcgagggatggcggcggcggcgagggaggcggcggagagcccgaaccctaggtcggcgccgcggcgtgcggcggcggcggcggccaaggacgccagcagcttcctcagcccgcgtttccggtcggcggccgcgcaggccgggtgggacgaggagtcgctcctccacgcggcgctcgtcgtcgaggacacccccgtccgcgagtcccgccgcaggaggcgggcctccaccacctcctcctccgccggcggcggcgggagcgccggatctaacactaggaagcggaggtcgtggaggcagccaccgggatcgatcccgccggtggtttttctgctcgacgacgacgagaagaagccggataccacggcagatggcaagaaggaggtggaggaggaagaaaagaagaccgtcgtcgttggggagaaggaggcctgttccgagaaagcagcggcaaccagcgagctgccctgtatggatcgcctccgggaggagctgtcttgtgctatatgtttggagatctgcttcgagccgagcaccacgccttgcgggcacagcttctgcatgaaatgcttaaaacatgccgcagctaaatgtggaaaaaggtgtcctaagtgccggcaattaatcagcaattcaagatcttgcacagtcaacacagtgctctggaacaccatccagctgctatttcctagtgaaaccgaggcaaggaggacttcaatcgcttcatcctcagaaaccaacgacgacttggcgcaacaaatctctcaaagaagtaacagcatggcacaaggtggcataagaagcagcagttccaatggcatcggctacatcacgcagcgcagcacaagaagcagcgctaccaacaacaggagcttcacaacaacaggcagcagaagaagcaccttcgtcgcacaggagggcagcagcacagcaacagggagaggctttgtccgggcttcgcagctggtccctagtgccagggtcgtctcagtgagatcacaccagtctgatgacgcggcattggcgtacaggctgcagcaggaggagttcatgacggctttcgagagcgagggcgagaggcagccacctcggagcagcagcagcacggtgtccgctgctcgagcgaatctgagagctatggcctcccgggccattcgtctccgagctcgtggctggcctgtctagttttggttgcctgtttgttctaatcttttctgcttactaattgctgattcttcctcatagtcatagcagaagtgtcgtggggtattctattgagtggacagatgtaatttgctacgaaataatggttcttcgctgtgtcaagtggccatcattcgttggcactcacaaggttcagtttgtgtaacagtcatatagcatgtcaagttaactcaacttgttcagtgttattgttccttgctaattcgaacatagtcggtttagcctgct

SEQ ID NO: 21809 - DNA, 1816 bp, Oryza sativa
  ref <308>: DATABASE ACCESSION NUMBER: AK072043
  ref <309>: DATABASE ENTRY DATE: 2001-12-06
gatctctccttttttttttctccccaaatcacccctccgccgaaacgggagctcgatctccgccgccaccgccaatccccgaaccctacctctccccccctccacccatggcgctctcccgccgcctcctcccgctcctcctccgccgcgggtccaccccctccctctcccccgcccgcgcgctctccacggccgccgtgacggccgatgctcccgccgcggcggcggcggcggcggaggaggaggcgatgaccatcaagggcgtgcgcatctcggggcggccgctgtacatggacatgcaggcgaccacccccgtcgacccgcgggtgctcgacgccatgctccccttctacctctcccgctacgggaacccccactcccgcacccacctctacggctgggagtccgacgccgccgtcgaggaggcccgcgcccgcgtcgcctccctcgtcggcgccgaccccagggagatcttcttcacctccggcgccaccgagtgcaacaacatcgccgtcaagggcgtcatgcgcttctaccgcgaccgccgccgccacgtcgtcaccacgcagaccgagcacaagtgcgtcctcgactcctgcaggtacctccagcaggaaggcttcgaggtcacctacctccccgtgcgccccgacggcctcgtcgacgtcgcgcagctcgccgacgccatccgccccgacaccggcctcgtctccgtcatggccgtcaacaacgagatcggcgtcgtgcagccactcgaggagattggtcgaatctgcaaggagaagggcgtgcccttccatactgatgctgcccaggcgctcgggaagatcccgattgatgtcaaccaaatggggattgggctcatgtctttgtctgcgcacaagatttatgggccaaagggcgtgggtgctctctatctgcgtcgtcgaccccgcattcgtgtggagccgcagatgagtggcggtggccaggaacgcggaattcgcagtggaacagtgccaacgcctcttgttgttggatttggtgctgcctgcgaaattgcggctaaagagatggactatgatcacaggagagcctcggttctgcagcagcgccttcttgatggcatccgtggacaggttgatgatattgttatcaatggaagcatggagcatcggtaccctggtaacctgaatttgtcatttgcatatgttgagggggagagcttgctgatgggcctgaaggaggtggctgtgtcgagtggcagtgcctgcactagtgccagcttggagccctcttatgtgctgcgggcacttggtgtagaagaggacatggcgcacacctccattcgctttggcattggccgctttaccactgaggaagaggttgacagagcaattgagctcaccgtgcatcaggtgaagaagcttcgtgacatgagtccactgtatgagatggccaaggcaggcattgacctcaagagtatccagtgggcgcagcactgagacagctttcacttagagctaatccctggctgcttttgaagtgcacggaaggacacatagataggcctgtctggtgttggtgaagacatttctatgaaccatgtgatagttctgtcaagacaatcagctagtattgtacatctgttcacttgccaagttgccagctctcaggctggcaactaatgttttctgctaggttagcaccttgttctctagctagaataccccaacacgaaataagaatgcttgagtggttactgtgttgcctgaaaccctttaagatactaattggagttactggcataatgctgttactatatattttggtgctc

SEQ ID NO: 21810 - DNA, 1496 bp, Oryza sativa
  ref <308>: DATABASE ACCESSION NUMBER: AK072044
  ref <309>: DATABASE ENTRY DATE: 2001-12-06
gaacaacacaagcagctagctagcactactgcccagcaacaagctagagagatttgccaaaagaaaaaatggcgatggctaggcgcggcaatggcggctaccagtacggcgcctacagctacggctacggctacagcaagccgcaggtgaactaccacagccagagctccgagagcgtcaccaccgtcgtgacgaagatggacgagatgagcgtccacgagaacgccgtgcagaagatgtcgtcgtcgttccgggaggagaaggtgtacgagcagcagggcggcgccggcggcgacgtgcaggtgtgccgcaatggcggcgctgctgcaggcgccgtgcagaagcacacctacgaggagaagaaggaggaggaggtgtacgaggagagcaaccatggcggaggcggcggcggctgcggcggctacgctcgccagcacggcgccggcggtgggcagaagcacgccacgtaccagcacgaggtgttgaaagggtacgagagcgccggcggtgggtacgccgccgctcgccacaacggcgccggcgccggcggcgtgaagaagcagtactcctaccgcgaggaagaggagtacgacgccggtgggtacgctcgccacaacggcggcggcgtgcagaagcagtactcctcctaccgccgcgacgaagaggagtgcgacgccgcagccggaggagggtacggccgccaccacggcgccggcggcggcgccgtgaagcagcacgccacctacaagcagcaccaggccatcgagggtgtcaacggctgcggcgccggcgggtacaactacaaccgccaccaagccgtcgccgtggctggcggcgggcagcaccactacggtggcgccactgccgccgcgtatggcaacgcctccaacaagcagcacttcactgccgccgccgccggccacgacagcagcggcggccatacccaataccaccaccaatcctacgaatgcgaggaggaagattccgacgaggacgactgcgaggacgacgacgacgacgagagcgacgacgacgacgacgacggccactgcccacctagccgccaaggcagcgtccacagctaccaccaggcggcgtaccagcacgaggagaagcagcacgccggcggccgcaaccactaccatgcatacgagcgccacgaggagcacggcggcggcgcgcaacgctaccagaagtacgagagctccacccaggtgggctacgccggcggcggcggcggcaacggcggatgcgtgcgtggcaatgccaagccatgtttccgaatcatggcctaatcccaaactaattaaccgcgcgtaagtaaaaaaaaaatatcaattgcgttgctgatgcgcttaaaataaactgttcgacgcttggcttaagaagttactattactactaagatctctaatgtatcagaaaataaattgtatgtcttattatagatgctctgcatccactatgtggtaaatgatgataatgtataaggtttt

SEQ ID NO: 21811 - DNA, 1757 bp, Oryza sativa
  ref <308>: DATABASE ACCESSION NUMBER: AK072045
  ref <309>: DATABASE ENTRY DATE: 2001-12-06
gagttatccttaccccggccgcgcacggcgcggcgcaggctgcccggagcggagaatccgatggccgccgccgtccacctccgccctatccactcgctgtctctccctctccctctcctcgcagccaaggccgccacgcccaatcccggctggctcccgctctcggcgaagccaggcgcagggaggaggagaagcttgctggtctgcgccgcctccgaccccagcaaggccgcggggaagggcgaggcgggggatgccgtcgccaggtgggcggcgtggatcccgcgggctgcggtgggaggggccggcccggagcaggtcctcaggctcatctccggcgccgcggccacgcccatctgccagttcgtcgactcgccccgcaccttcctccacgccatcgatccccgggttaagctggtgtggctcttggctcttgttgtcctaccagccagatcaaatatttacttgcggtttggtttagtagcataccttactctcctctctatgtgggttctcccaaaccatatttggaaggaccaacttggaagggtcgctctgctttcaggcatcatattcataatgctgggatttggttctgatggtgctccttcattagtccagacaagaactcctcccccatctgttataggtttgccaaacatacctacatccacaaatggctattcttacacaatcatgaaactgggtccactgcaatttacaaggaaaggcctatcagtagcgagtacgtcagcatgcctctcatttgcgatatttcaaagtgcaagtctctgcttgacaacaactactcctgagcagcttgcttctgctttatggtggtttatgattccactgaagcatatcggcgtaccagtacctgagataatactcacactcttactatctttgaggttcattaatcttgtatttgatgaggttcgcaattcagcactggcgattgtagcacgtcggataaattgggaaaagctggcaactatggaaactattgacattttcttcaactatgtgcggcgaattttcaaaaatatatttgatcacgcagagcaaatatccaaggccatgattgctcgcggatttcgtggtgaccctaacaaccacaagatctactttcttacagaatcttcttttggcattgtggatgtcttttcattactttgcctatttgctctagtggccctggcttccatttcggacaaattggtttgatggaatcaggaactaaagactatcacgacaacttcatccccttaattgcttaaaaatgctgagttgcaaaatcagtttttggggcatcttaggagccccttctgtgtagtggaatcgtggaaacgatggtaacgattgaatcgtcaggaagatcattttggaagatcattttgatcaagtgtatgcaccgcaagcccctttggaaggaagactgaaaggttaacctctggctctaacttctttgcagccttgcaggagcagtgccgtatgcagatccttcattgaaggaccacgtgagaatattgagtataactgcacaatcaaagtatacttcctgtcttcattaggaagtgccgtcaagaacttaagtggggtgaccgctgtgttcttgctaacttattgtatctgcccttagcttgatcctaacatgaacaactgacagtgtaaacctatcttttttcattagccctttctttctctttagttttattttgcaaggatgcagttcgaagcattgaatgtttaattgc

SEQ ID NO: 21812 - DNA, 1855 bp, Oryza sativa
  ref <308>: DATABASE ACCESSION NUMBER: AK072046
  ref <309>: DATABASE ENTRY DATE: 2001-12-06
gagtccgccacccaccgccgcccaccgccgagcggcctccccgcgcggcgaggccaaaccctcccatgtccaccccggccggcgtggcgccccgccgctcctccaggctcgcctccagcgctcctccgctcggagccggccagccttcctcctccccacttcctcggcgccgccgccgccgcgcttcgccgtctggctgcgccagagaggttgacaactcgcctcctccggtggtcatcttagatgacaacgaaatggagcagcatgttgaggcagaagaaatgaagaagcaaggggaagagagtgtggaggcaaatgaagcagaggagaaggacaaggatgcggaggtcttagaggaactacctgattggcttcctgatggttggatcatggaggtacgttgtggcgacaacggcaacatctaccggtattacacttccccggtgtcaggatacacattctctacaaagatggagacactacattatcttttttcggagatggatgagcgtgtgctggagtctcaggcgtgcgccgatgacaatgagcttcatagaatgcacacatggcttccagatgggtgggcaattgaagtcagagctgggggtaagaagatggaaaaaatgtacaagttctatgttcatctgcctactggaatgcggttcttgtcgaaagaaaatgtactgctctattctaatgaggggaagatttccagatgtgatgtaaagggtttgtgtgatacaagctctgaagataatattcttgcaatggtagaatttaatccagatgggcttccagaaggatgggtgaaggaaataatatttagaaagtgcaatgatggaattaggaaagacccgtattatactgatcctgttagtcgtcatgtattccgcacactcaagtctgtaatcaactaccttgaaactggacaaatcactaaacatgcctatattccgaggagaagcgttactgatatgtactcttttgacaggtgcacagatctgcctcaaagtatgctgaaaagactgaaaatacaaggaaaagcaaagaaaaagtctgtaggagcatcggtcaaaggcaagaaactatctaatggcctggcatcaaataactgtatgtcttctgggttggatcctgaaatcgggccagaagaaaggaaacttggaactgttaaatccataaccaaagaagcagttaactcagatactatcaagcgatcaagaggaaggccaccgaaaatcttgatgccaactattgaaagcaccaaacctgagattgcattagtcacgtcagaggctatcaagagatcaagagctgaaggtgtcaattcttgcttaattcatctctctgaaccaaatgaaaagatggtcaaagccaccagtgcagtagaacctgccagttcaaataatgccaaacgacatggagggagcccgcaaaaaaaaatttaagcacattactgacatcactttagattgtgccaagagttcaaataaggagtcagagcatattgttacagcaaagaaattgggtattggaggtggagaacaagtggcaaacgaaaatacattggagcacactaacttgaaagagcaccttggggtaatccaggactacacaagcaacaggaagaaagataaattgaacttgattactgatccagatctgcatgagcataaaaacggcaagtttactgaaaaactagcgtgcactgcagttcataaattttatatgaggagaagtagcaatcatacagtggcattgaaaaaaggataatgaaaacaagatactcttaccgagtttagagcccttctccaaacataattggagcagaataaagaacacttcaattccctcg

SEQ ID NO: 21813 - DNA, 2533 bp, Oryza sativa; identical to SEQ ID NO: 18090
  ref <308>: DATABASE ACCESSION NUMBER: AK099237
  ref <309>: DATABASE ENTRY DATE: 2002-08-28

SEQ ID NO: 21814 - DNA, 2183 bp, Oryza sativa
  ref <308>: DATABASE ACCESSION NUMBER: AK072047
  ref <309>: DATABASE ENTRY DATE: 2001-12-06
gagttcggcccaccccccccccctctcccctccacgccccgctccgatccactcagtgagcgaagatggctccaacatccatgagccttgctgcaaagacgccgcttcccttctcgacacttccttcgagtggcgttgcacagaggccagtttctgtgactgcctccctcgagcacaagactaatgatgccagaaggaagttcctaaagctcgcgcttgggaacctcggggtcgggcttcccaccttgttgggtgctaagagagtatctagacaaggacagagtgaagaaggttgatttgtttgagaatggcacgattgccattgtagaggctatttctcctgagctcggcaaccgtgtgcagagagttcgtgtgcagcttcctggtctaagccaggagcttctccagaagttgagggaaaagaatatcgattttgctgcacacagcaaccaggaggactctggttctcttctgttcaacctgatcggaaacttggctttcccacttatccttattggtggtctatttttgctgtcaagaagagcacaaggtggccttggtggacctaacggtcctggctttccccttggttttggtcaatctagggccaagtttcagatggaacccaacactggtgttacatttgatgatgttgctggtgtcgatgaagcaaagcaagacttcatggaagtggttgagttcttgaagaaaccagaaaggttcaccgctgttggtgctcgcatccctaagggtgttctgcttgttggtcctcctggaactggtaagactttgcttgccaaggctattgcaggggaagctggtgtgccgtttttctcgatatcaggatctgagtttgtggagatgtttgtcggagttggtgcctcccgggttcgtgatctcttcaagaaggcaaaggagaatgctccttgcatagtatttgttgatgaaattgatgctgttgggaggcaaagagggacaggtattggtggtggaaatgatgaaagggagcagactttgaatcagttgctgactgagatggatggttttgaggggaacactggaatcattgttattgctgccaccaacagggctgatatcctggattctgctttactcagacctggacgttttgacagacaggtaagtgttgatgttcctgatgtacgcggaaggacagggattcttaaggtgcacggtagcaacaagaagttcgatactgatgtctctcttgaagtcatagcaatgagaacacctggctttagtggagcagacttggcaaatcttctaaatgaagcagccatattagcgggccgacgtggtcggacagcaatttcctcaaaggagattgatgattcaattgacagaatagtggctggtatggaaggaactgtgatgacagatgggaagagcaaaagtcttgttgcttaccatgaagttgggcatgcaatttgtggaactttgacgcctggccacgaccctgtccaaaaggttactttgatcccgaggggtcaagctcgtggtctcacatggttcattccaatggacgacccaacgctcatctccaggcaacaactgttcgccagaattgttggtggccttggcggtcgtgctgctgaggagatcatttttggggagcctgaggtgaccacaggagctgctggtgacttgcagcaaattactggcctagccaagcagatggtggttacattcggtatgtcggacattggtccgtggtcgctaatggactcaggagctcagagcggcgatgtcatcatgaggatgatggcaaggaactccatgtcggagaagctcgcggaggacatcgataccgctgtgaagcggttgtccgatgaggcctacgagatcgctttgagccagatcaggagcaaccgggaggccatggacaagatcgtggaggtgctccttgagaaggagacattgagtggtgacgagttcagggcgattctctccgagttcacggagatccctgtcgagaaccgggttcccccagccacgccggcagctctccctgcctaaatcccactagttttgtaggaatggaacatgctgtaagatgttcatattttcgattcttggtgtacactaactttactttgccggccggattttttggcatactacatgtaacttactcttggttaattataaaatgtaattagctg

SEQ ID NO: 21815 - DNA, 2188 bp, Oryza sativa
  ref <308>: DATABASE ACCESSION NUMBER: AK072048
  ref <309>: DATABASE ENTRY DATE: 2001-12-06
ggtcgtcttccgcgccgccctctccctcctccaccgcctccgcctccgccttctctcgtgccgccgatctccatcgccggcgtgcggtgcaccgagatccacccgagatgtggcgcggctgcgtctcgcgtggcctcaggagcctctccaagggcaagggctcctcctcctccgcccccgtctccgccgccgctaggctcttctccaccgcctcgtcgtcgtacacggtggtggatcactcgtatgacgcggtcgtggtgggagccggcggcgcggggctccgtgcggcgatcgggctctccgagcacgggttcaacacggcttgcatcaccaagctcttccccacgcggtcgcacaccgtcgcggcgcagggtggcataaatgctgctcttggagacatgacggaagatgactggagatggcatatgtatgacactgtcaagggtagtgattggcttggtgaccaggattctattcagtatatgtgcagagaagcaccaaaagcagttatagaacttgaaaactatgggttgccattttcaaggactgaagatggaaagatataccaacgggcctttggaggccagagcttagattttgggaaaggtgggcaggcctatcgatgtgcatgtgctgctgacagaacaggacatgctatgttacacactctgtatggtcaagcaatgaagcataatactcagttctttgtagaatattttgcgctagaccttatcatggacagtgaaggcacctgtcagggggttattgctttgaacatggaggatggcactcttcaccgtttccgtgctacaaatacaattctggccacaggaggttatggcagagcctacttctcagcaacctcagctcacacatgcactggagatggcaacgctatggttgcacgtgctggtttaccacttcaggaccttgagtttgtgcagttccatcctacaggcatttatggtgctggatgccttatcactgaaggttcccgtggtgaaggtggtatccttaggaacagtgaaggcgagcgtttcatggaacgatatgctcctactgcaaaagatcttgcttctcgagatgttgtttcaagatctatgacaatggaaatcagagaaggccgtggtgttgggccattgaaggaccacatctatctgcatcttaaccatctgcctccagaagttcttaaggagaggcttcctggtatttctgaaactgctgctatttttgctggtgttgatgtcaccaaggagcccattcctgtcttgcctactgtgcactataatatgggtgggatcccaacaaattaccatggagaggtagtgactatgaagggtgacaatcctgattctgttgttcctggtttgatggctgcgggagaagcagcatgtgcatctgttcatggtgcaaatcgtctgggtgcaaattcacttcttgacatagttgtttttggcagagcttgtgcaaacagggtagctgaaaccgctaagccaggtgagaagcagaaacctcttcaaaaaagtgctggagaaaagaccatagcctggttagacaagctgagaaatgcaaatggatcattgccaacttccaagatccgtctaaacatgcaacgtgttatgcaaaataatgctgctgtcttccgtacgcaagaaacactcgaggaaggttgcaaattgattaccaaggcatgggaaagttatcatgatgtgaagatcagtgaccggagtctcatatggaattcagatttgatagagaccattgagttggaaaatctcttgataaatgcatgcataaccatgcactcagcagaggctcggaaggaaagcagaggagctcatgctcgtgaagatttcacgaaaagagatgatgagcaatggatgaagcactcgctggggtactgggagaatgagaaggttcgcttggcatacaggccagtccacatgaacacattggacagtgaagttgagtcgttcccacccaaggcgcgtgtttattagttcgggattcacgcagcgccgtaattctgtgtggtgttaataattcaggggctgggcattcctagctgaaagtgcgacctgaattccatcctcctttttccctcggtattttgtgtaatttgctagaaaaataaaggacaaactcatgctaatgctagtgcctaactggtcccttctgggcaacttgt

SEQ ID NO: 21816 - DNA, 1239 bp, Oryza sativa
  ref <308>: DATABASE ACCESSION NUMBER: AK072049
  ref <309>: DATABASE ENTRY DATE: 2001-12-06
cggatattttacgaggttcaagtggagtggtgtggtggaggtggagctggtggcaagtctgtgtcaaccatggcatcgccctccggcgccggcaagccaccggccgtcctcctcctccggccggtggaccagcccttcgccgtcgcgctgcgcgagcgctaccgcgtgctcgacctcctctcctccggccagcctctcccggccttcctcgccgccgccgccgccgcgcctgacccgccgcgcgccgccgtcgtcatggggggcggctcaatccgcgccgacgcggcgctcttcgacgccgtgccttccctgcgctgcgtcgtcagcacggcggccggcgtcgaccacatcgacctcgccgagtgcgcgcgccgcggcgtcgtcgtggccaactccgggacggtgtactccggcgacgtggccgaccacgccgtgggcatggtgatcgacgtgatgaggcgcgtgtcggcggcggagaggtacgtccggcgagggctctggccggtgcagggggactatcctctcggctccaaggtaagcggcaagcgtgtgggcatcatcgggcttggcaacatcggttcactgatcgccaagaggctggaagcattcggctgcgtcatctcctacaactcaagaaaccccaaacgctcgctcccctacacctactacgccgacgtccgcgccctcgccgccgactccgacgtgctcgtcgtgtcgtgcgcgctcaacagcgagacgcgccacatcgtcggcggcgaggtgctggacgcgctcggcgagggcggcgtggtggtgaacgtggggcgcggcgcgaacgtggacgaggcggcgctggtgagggcgctgcgggaggggaggatcgccggcgccgggctggacgtgttcgagggcgagcccaaggtgtcgccggagctgagggagatggagaacgtggtgctgacgccccacgtggcggtgtggacggcggagtcgaggtccgacctacgtgaccacacggtggccaaccttgatgccttcttctccggcgacccgctgctcacgccggtcatgcttccctaacccaccacctacatactccacgtacagaagtgaactccgataatactccagtatatacagtgatgggtatatatatgtacagtgtaacccaaataagcggcccatcagaggtccattggcccaaaagaggctttatactgtactggaataagttcatccgaggtcccttaactttacacc

SEQ ID NO: 21817 - DNA, 1340 bp, Oryza sativa
  ref <308>: DATABASE ACCESSION NUMBER: AK072050
  ref <309>: DATABASE ENTRY DATE: 2001-12-06
gtctggccgcgcactcctcctcctcctcgcactgcacacgccaacgggttacaagaacgagttggcacgcgagagccctgcagggaggaggaaggatgcacctgcacgcgaagacggactcggaggtgacgtcgagcatggcggcgtcgtcgccgccgcgggcggcctactacgtgcagtcgccgagccacgacgacggggagaacaagacggcggcgtcgtccttccactcctcccccgcggcgtcgccgccgcgctccctcggcaaccactcccgcgagtcctcctcctcccgcttctccgccgccaagtccggctcctcccgccgcaccgccgccgccgggggagacggcggcaaaggcggtgtcgcggctggccgcggcggcggaggtggtggtggtggtgggcggcgtagcccgtggatgaaggaggcggccatcgaggaggaaggcctgctgatggaggacgacgacgccgacggcggcggcggcggcggcggcgggttctcctccctcccgaggcggtggcgctatgcgctgggcttcgtcggcgccttcttcgcgctcttcttcttcttcgcgctcatcctctggggcgccagccacaaccagaagcccgtcgtctccatcaacagcatcacgttccacaacttcgtgatccaggcggggacggacgcgtcgctggtgccgacggagctgtcgacggtgaacgcgacggtgaggatgacgttccggaacacggggagcttcttcggcgtgcacgtcacggcggagcccctcacgctctactactaccagctcctcatggcctccggcaacgtgaagtacttctaccagtcgaggaagagctcgcggcacgtggcggtggcggtggtcggcgacaaggtgccgctgtacggcggcgggtcggggctgagcagcacgccggtgaagggcgcgccgccggcgccggtgccgctgcagctggcggtgcggttcaggtcgcgggcgttcgtgctgggcaagctggtgaagcccaagttcctgaccaacgtgcagtgcagcgtcaggctcgacgtcgccaagctcggcaagcccgtctccctcaacaaggcttgcagcctcgtctaatctaagctgcaatgccggcgagctagctgctcatcactgcgtcatcttcgaaatatcgtcttcttttttttcttcttcttgtttctttcttgtctgatatttacagtatattgtcactgcatactttgcgagttggttagtttggaaggagggtgaggggatcgatcaggttgtgtgtacagggaaattttgtcgcgaacattttgagatatcgaattttgggtggataat

SEQ ID NO: 21818 - DNA, 1555 bp, Oryza sativa
  ref <308>: DATABASE ACCESSION NUMBER: AK072051
  ref <309>: DATABASE ENTRY DATE: 2001-12-06
ggccgtgcccggtcggatctaattaatttacctcctccacctcctcctcctccccccgatcggatcggcccggctcctcctcctccgccgccgccaccgccgccgcagataggagaagatggccgcacttgataccttcctctttacctcggagtctgtgaacgagggccaccctgacaagctctgcgaccaagtctcagatgctgtgcttgatgcctgcctcgccgaggaccctgacagcaaggtcgcttgtgagacctgcaccaagacaaacatggtcatggtctttggtgagatcaccaccaaggctaacgttgactatgagaagattgtcagggagacatgccgtaacatcggttttgtgtcagctgatgtcggtctcgatgctgaccactgcaaggtgcttgtgaacatcgagcagcagtcccctgacattgcacagggtgtgcacggccacttcaccaagcgccctgaggagattggtgctggtgaccagggacacatgtttggatatgcaactgatgagacccctgagttgatgcccctcagccatgtccttgctaccaagcttggcgctcgtcttacggaggttcgcaagaatgggacctgcgcatggctcaggcctgacgggaagacccaagtgactgttgagtaccgcaatgagagcggtgccagggtccctgtccgtgtccacaccgtcctcatctctacccagcatgatgagacagtcaccaacgatgagattgctgctgacctgaaggagcatgtcatcaagcctgtcattcccgagcagtaccttgatgagaagacaatcttccatcttaacccatctggtcgcttcgtcattggcggacctcatggtgatgctggtctcactggccggaagatcatcattgacacttatggtggctggggagctcacggtggtggtgccttctctggcaaggacccaaccaaggttgaccgcagtggagcatacgtcgcaaggcaagctgccaagagcattgttgctagtggccttgctcgccgctgcattgtccaagtatcatacgccatcggtgtcccagagccactgtccgtattcgtcgacacatacggcactggcaggatccctgacaaggagatcctcaagattgtgaaggagaacttcgacttcaggcctggcatgatcatcatcaaccttgacctcaagaaaggcggcaacggacgctacctcaagacggcggcttacggtcacttcggaagggacgacccagacttcacctgggaggtggtgaagcccctcaagtgggagaagccttctgcataaaagctccctttcggaggcttttgctctgtcccattatggtgttttgtttcctcgctgctcagcattgtgattcttaacctgccccccgctgccatttatgcccatgcacgctactttcctaataataagtacttataagggtattgtgtttgaatattttacctagaggaggaggaggatttgttatctgttattgcttaagcttatgtaatggtgaaagaaggaaagatgctacactactttgag

SEQ ID NO: 21819 - DNA, 1995 bp, Oryza sativa
  ref <308>: DATABASE ACCESSION NUMBER: AK072052
  ref <309>: DATABASE ENTRY DATE: 2001-12-06
tccagctgctgcccgcccgcagcatcagcatggacctcgccgccgccgccgtggccgtctccttcccacgccctgctcccccgccgcgccgctgcgccccacgccgccaccgccgcgccctcgctccgcgcgcggactcctcctccccctacccctacacggcggtggcggcgcccgtctacgcccccacgccgcgggaccgggccctgcggacgccggacagcgggtatcactatgacggcacggcgaggcccttctttgagggatggtacttcaaggtgtccattcccgagtgcaggcagagcttctgcttcatgtactctgtcgagaacccgttgttccgagatgggatgagtgatctggatcgggtcatacatggttcgcgcttcactggcgtcggggcgcagattcttggcgccgatgataagtacatatgccagttcaccgagaaatccaataacttttggggaagtaggcatgaactaatgctcggaaacactttcattcccaataatggttcaacacccccagaaggggaggttccccctcaggaattttctagtcgagttttggaaggcttccaagtgacaccgatttggcatcaaggctttatacgtgatgatggaaggtcaaagtatgtgccaaatgtccaaacagctaggtgggagtacagcactcgaccagtatatggctggggtgatgtcacgtcaaagcagaaatcaactgctggttggcttgctgcttttcctttctttgaacctcattggcaaatatgcatggctggtggcttatccacaggatggattgaatgggacggagagcggtttgaatttgaaaatgctccttcttattcagaaaagaactggggtgcaggttttccgaggaagtggtattgggtccagtgcaatgtcttctcaggcgcatctggtgaagttgcattaacggctgctggcggattaaggaaaattggattgggcgaaacctatgaaagtccttcactgattggaattcattatgagggaaaattctatgaatttgtgccttggaccgggacagtgagctgggacattgccccttggggtcactggaagttgtccggcgagaacaaaaatcatctggttgaaatagaagcaaccacaaaagaaccaggcactgctttgcgagctccaaccatggaggctggactagtgccagcatgcaaagacacctgctatggtgatctgaggctgcaaatgtgggaaaagagaaatgatggtggcaagggaaagatgatactcgacgcaacaagcaacatggcggcactagaagttggtggaggcccttggttcaatggttggaaaggcacgactgtttcaaacgagattgtgaacaacgttgttggtacccaggtcgatgtggagagcctcttccctatcccatttctcaagccccctggtctgtagcattgttcaggtcgagccatcgataggtagagatgaataggccctccaatcttgtcacaccttgagtcttgatctgttcctcacttagcatcatgttttcagccagagaactacagaaacagtaaaccaatcagcatggagtttattctcgttgggttagagaaaggcgcctttcgggtgaaatcatgttgcacaaatttttacagatcaggaatggatgctgtaattcaagaaaataagtataattcatcttaggcagttccatccttttgtgctcatctgaacttctgaagtatcataaagaagtgatagctggatgcccgggcctgcatctgcaattgtggaggtctttctggtcagaattggctggaaacaattgttgttagcacacttcatatggtaaatctttcagaggtactgacagacaaagacgtgtgttttcaattatcattgtactaacaaggataccagtgggcctaacagcacatgacggaagttctagcctgttggcataacattggattatagtattacaaagctgattttaaatttt

SEQ ID NO: 21820 - DNA, 2187 bp, Oryza sativa
  ref <308>: DATABASE ACCESSION NUMBER: AK072053
  ref <309>: DATABASE ENTRY DATE: 2001-12-06
gcgtcttccgcggctaactcaatccctttctctggagtcttggagcggcacggcggctgcgcacgcgacctcgcccaccacctgctcggcgaaacgcccggctcggccgcgacgtgtcccaccgcaccgcgcgcgcacgccgcgccgcgcccgagcccctcgccgcctccgcgcggcgcgccgcgcacctatttaaatgcggccccgatcccgcattctctcaactgcactagtccccaccaacggctcggtccagtagagtttatcccccacctatggccagcctcgtgctctccctgcgcatcgcgccgtccacgccgccgctggggctgggcggggggcgattccgcggccgacgaggggccgtcgcctgccgcgccgccaagttccagcagctcgacgccgtcgcggtgagggaggaggagtccaagttcaaggcgggggcggcggagggttgcaacatcctgccgctcaagcgatgcatcttctccgaccacctcacgccggtgctcgcgtaccgctgcctcgtcagggaggacgaccgcgaggcgcccagcttcctgtttgagtccgtcgagcagggatccgagggcaccaatgtggggaggtacagtgtggttggggcacagcctgcgatggagatcgtagccaaggccaaccatgtgactgtcatggatcataagatgaagtctaggagggagcaatttgcgcctgacccgatgaagataccaaggagcattatggaacagtggaacccacagattgttgaaggcctccctgatgcattttgtggaggatgggttggattcttctcttacgacacagtgcgttatgttgaaacaaagaagcttccattttctaacgcgccagaggatgataggaaccttcctgacatccatttaggcctctacaatgacatagttgtgtttgatcatgttgaaaagaaaacacatgttatacattgggtgagggtagattgccatgagtcagttgacgaagcacgaggacgggaagaatcagctggaagctttgttatcaagattacatagtgttaatgtgccaactcttactgctggttctgtaaaacttaacgttgggcaatttgggtcagcactacagaaatcatcaatgtcaagggaggactataagaaagctgttgttcaagcaaaagagcacattctagctggtgacatttttcaagtagtcttaagccagcgttttgagaggcggacatttgctgacccctttgaggtgtaccgtgcattgcgtattgtcaatcctagtccttatatggcctatctacaggctcgtggttgtattctggtagcatcaagtcctgaaattcttacccgggtggaaaagaggacaattgttaacaggccacttgctggaacaattagaagaggaaaatcgaaagcagaagacaaagttttagaacaactgctgttgagtgatggaaagcagtgtgctgagcatattatgttagtagatcttggacggaatgatgttggaaaggtgtccaaaccaggttcagtaaaggtggagaaactgatgaacgttgaacgatattcacatgtcatgcacattagctcaacagttactggagagttgcgtgatgatctgacttgttgggatgctcttcgagcagcattgcccgttggaacagttagtggtgcaccaaaggtgagagcgatggagctgattgaccagatggaagggaagatgcgtgggccgtacagtggtggctttggaggggtttctttccgtggagacatggacatcgcacttgctctccgtaccatcgtcttccccacgggatctcgcttcgacaccatgtactcctacactgacaagaatgctcgtcaggagtgggtggctcaccttcaggctggagctgggatcgtcgctgacaggcaagcctgacgatgagcatcaggagtgcttgaacaaggctgctggccttgctcgtgccatcgatcttgccgagtctacattcgtagatgagtagatcatccagcttaggttttcagataaaaaaagatcacccagtttaggacagctttgttttatgttctgttgctttctagtagagcagaaaccattccggcccttgtgctgtaggatttcgctgctttggattaaaccatcgtaataaattcaataaatgtatagcagatggaatgtctg

SEQ ID NO: 21821 - DNA, 3270 bp, Oryza sativa
  ref <308>: DATABASE ACCESSION NUMBER: AK072054
  ref <309>: DATABASE ENTRY DATE: 2001-12-06
gacctctccactccgctgcttctccccacaccgcgcgccggcgatgccatacccgcgcccgcttcctccgccgctgcactccgcgcccgcgcagcgcgccgtcctctcaacgccgtgcgccagcgctgtcctccccgcgcccgctccgccgctgcccttccagcaccaccccgctggctctccctcgccgcctcgcgccgttgccggatccccgctgtcagggtgccgtcgatacatcgtcgtctagtctccgtcaagccgcttcgcccttgtgtctgcaccgcacctcgccgtcgatcccacgcagtccggccaccgtcgatccctcgccgtctggtttccgtcgacccgcatcagcctagcgccggcaccggatctcctgctgtccggccgcgccgccaccgcgactcctcgctgcccccttcgcaaactcatctggatcacgtctccctcgctgctcctgtctaagacaaaggtgaatttatattgagttccagccggacaactgtgggcgaagaggtaaaaagttaatggctcacgaaggccagcggagactggagtttaacgatgaagcagcgtacaaaggttttcccatggtgcttggccacattgccgacggtcaatgcctgatgccatgccgctccactgatgaggccgagaagatcaggtcgccttcaccacaacgaatccggacacttccgccttccgccatcacgcacggtctgatgagcatcatcgcacgcctgtgcctcatggcctttccattgccaaccatcaaggttgcctaaatttactagcaggtggagaagccatccatgtgctcaataggtctcaagataggtgggtagcaagtttggtttaggctgttcaccataaaagagcaatggaccaatatctcaaataatatctgaatcgagtctgaattcataaggtatatactattttcatccttctgattaactttggatgatcttgtggcctgattcactacataatatctggagtgttgatgctaactcatatagtgctttgctctcactatttcaatactacattattactcaaaataatttcagtagtacatatactattactcactataaggctacactgaaactttgcaaaacaacatctgatgggcctgcaacgtgctgctgcttaggtaagaagtttcagcttcaactttggcattgtgcactgtaggtttcaggttcaaatatctgaccacagtactatccttgacaaattcagttgcagaatggcatctagctcccaaatggtcatcgtgaagcttgtgtcatatatgtcttcttggctgccgcaatctaaatttaggaggctatttctaacacaatgcccttagatgttagttctacagatccaacaaatttgtgttgctcttgtatagctggatttgggacttcatttgatttggggttgatatatggttatgtttcttagatttgagtgggaatttgttttttggttcaatcagaggatggaggataatatgatatacccaatcaaggaccaagaaaccatgctgtgagttggccaatctctgttctcctgcaattacattttcctttttgcagtagatcttgcttccaattgattttgtagggcagtaccaatggacatgaacaggcagcaggatactgtttgctccaaggtaattttgcagcaccaaaacagtactatactggctagcaacatataattgtctcggattacatctatgttattaattatatattgcttctcaaaacaaataatgctaccgctcgctaattgttcccatttagcaacaaccctgttatctagatttactacttatatattgcgtaaatagatacctgaatagggagatgaatatgtttgtgctgaacttcaaacataaaaagcttaattcgaaccgattctattgttcattctcttttcaattagccctatttcttcaagtatatgaatggtggatggatgtaattcatgcatggaatgctttattggtgcatgaactggccttaaattgcagtcaaactccattagcgagcggatttggagagccagatatttttctgaatacttttgtgtgcagatttggagagccactgaataattgattaatgtatttttgctttttgtgatggatcaatgtcgcccaacgaaggtaaccggctgacacaaaattattttgtagtaaatacaaagttatcccacacaatcatatgtctttttttaagcaaatattctatgtatcggcagcaaactatctttttgtccattaattgtcttgttgtcttgttgaggatcttggctgcaactactgatgttcagagcatcacagaagatcaaacagtttttaagaacaaaattagagaaaaatagtgctacagtgcgactgtctgttggctgtttcccctgtatttagtttgtttttgtcagtactgattttagacatgttcctaaaatgtaaggggtgatgtttttacaaaatgtcagcactaattttttacacaatcatattcttggttcccttaactaactgaactattgtttacccaagttttatgcatctccactattgtttgctgtattaaattaatctccagagtttctaccgattattacatgtccatcatgcagaagatatcctcttggagcatatttcagtaattcaatacctaatattattttgctgcaaaggaaaaacatggaggattcatatttcggaataatgtttaacataattgtacccaattgatcgagtttttgatgtacggtcattttgtttcatttttcagttctgtgacaggctatgttgggttttgttttgaaactctatatacagtcactcgctttaactaaacagagatagatgcctaaatcgattcagagtttctggagttgttaaggggtacatccggcagaagaaatttgaggtcaagattgccttaggatgtagggcaatcaatcttgaaccgagcggcactgacactacctcatctcctgagagggactgatttcgaagtgaatatgaaatcgatgatgacaaataaatattacattttttttgcatttggttgttatgtaataaataaacaagtaaggtttatttcatgaattgccaatgtattgcttacaataatgttatttttacttggttcctctatgattttttaatgatgtatcagtaaatgatcagcaataacggtattttcttcaattctatgtatcaacgtgccttacgtgcacgctcactagtattct

SEQ ID NO: 21822 - DNA, 1777 bp, Oryza sativa
  ref <308>: DATABASE ACCESSION NUMBER: AK072055
  ref <309>: DATABASE ENTRY DATE: 2001-12-06
gacgaggtgtgtctctctcccgttcacccgtccgtatccttcccggatcactctctccactctccgctccccaccgcgcgagagatattttcgcgcgccatgtcgctgcccgccctcgccgccggccgcgccgcctccgtgcggccgccgcgcgcctcggcggcctcgggggaggcggctgctgctgcggcggcggatcagccggcggggcggaggccggtgaaggtgatactgccgaagaagaagccgcagaagtggtcgacggggatggcgcccggggagtacggcggcgggccggcgacgcccaagccgcgcaagtactggatggggaaggaggaccgcgaccccgtgggcaacaccgacgacttcatctggaacaaggacttcctcccacacatggagcgcgtcatcgccaacggcggcgcagacacgccccccaccatcacccgcctcaccccggtggatgaggactcggaatcagggttcctaagcatcaaccgcgcaatgagcctcgacagtgtggatgttgatctgagcaaggagcttcaggcgccaaccaggccaatcttgaaaacccaggttgaggctgcctggagggggcgggccattggagctgaggctgtcaacggtgttgcgtctcctagatggaggctagttccgactcgccgggaacaagcaaagtgggaccgagcagctaaggcagcaactggtggcagtgatgtcatactaagggaatcaaagtcaagagggcagcaaggagaccctgaggtattggcagctaaatcaagggagcaatatctagagttgaaacaaagattgcagttgtttactttaggcattggtggcattggtttggtctccgcctatttttcctactctcctgagattgctgcaagctttggtgcagggctgattggatctgtcctgtatctccgcatgcttgggaccagtgtggattccttagctggtggaactggagaaactgtgaagagtgctgctgcccaaccaagactgcttattccagtggcacttgtgatgatgtataaccgatggaatgagattttagttccagattatggcttcatgcacctggaattgatacccatgcttgttgggtttttcacctacaagattgcaacatttgctcaggcaattcaagaatctatacctgcagttgggaatcgtgaatcttgaacatagttctggtgaatagaattaaaggtagttgccctgaggaagataggtcacggagatactgaggccaaggttttataagaatctgatctgggtatgttaccaagataagatgcacactcagtcattgaggagcgagaattctccatgacatctgttacactctcatttgttcaaaaagatgattggcaagaggtcaagtacacacacctaccccgtacattccatttattgcacgcctacggactacagcaactctcagcattgtcacaggtaccacatgaacacatgatctattgaatgacttatggagtaattaactgtgaatggtgcagagccaaaacatgggcaaccaaaagaactcaagaagacgaagatttcaataaatcacggctcaatctgccactctgattcatcatctcattgcctcgaggcctgctgctgctgctagtagtagtagtacattcatttgaactgcctaccaattttgaaagcacccaaatttccaaatttccttttcttatctctttcgttgctggcctcatccatttggccaccaaaagaatcctaaaatggtatctcc

SEQ ID NO: 21823 - DNA, 3903 bp, Oryza sativa
  ref <308>: DATABASE ACCESSION NUMBER: AK072056
  ref <309>: DATABASE ENTRY DATE: 2001-12-06
gagttccctctccatttcattgatatttgtgtgtaagctctacaatgggtgaactggtgaccagcatggtgatcgggccactggtccacatggtgaaggagaaggcttccagctacctcctggagcagtacaaggtgatggaaggcatggaagtgcagcacaagatcctcaagcgcaagctgccggccatcttggacgtcatctctgacgctgagaagcaggcatctgaacacagggaaggagctaaggcctggcttgaggagctcaaggcagtggcctatgaggcgaatgaagtcttcgacgagttcaagtacgaggcgctacggcgtgaagccaagaagaacgggcactacaccaagctcggcatcgatgcggtaaaactctttcctactcacaaccgtgtcgtgttccgatacaagatgggcaggaagctctgccggatcgtgcagaatattgaagtgctagtcgcagagatgaatgcctttgggtttaaattcgaacctcagtctatagagtccaaggaatggaggctaaccgattctgacatctttgacccaatgaacattgctagcagatcgagagatgaagataagaagctgctcgttagcatattgctctcccaagcaagcaatgtaaaactcgccgtccttcctattgttggaatgggagggctaggcaaaactaccttagccaaactcatttacaatgagcctgaaattcagaaccatttccagttgatgatctgggtatgtgtgtctgacaactttgatgttgcgtctgttgctagaagtatagttgatgcagttcctaaaaaaggtgataaagtaaccatcaatgaaaatcaaacctcggcacttgacgagcttcagaaattagtgagcgggcagaggtatctccttgtattggacgatgtttggaatagggatgatgaaaaatggcgtaaactgaagaaatgcctcgaacatggtagcactggtagtgcagtgttagcaacaactcgtgaaggaggagttgctgaactaatgcacacaactgatgcatataatcttactgctctaaataacagtgtcattaaggaaatcattgacacagcagcttttagaccgaaaaaggagatcaagcccgctgagctagttcaaatggatgataagtcattattatctaaaaagaaggaaatgattgatcagtttgtggagagatgtgctgggttgccattggcagcaaaagcactaggttctgtactttataccaagaccagcctggaagaatgggaggcagtattaagaagcagcagtatctgcactaaggagactggaattttaccaatactgaagctcagctatgacaatttgccgtcacatatgaagcagtgctttgctttctgtgctatttttcctaaggattacgagattgataaggatcgcaaatggattaatcccagaaataaaagatatccgccttgaaaccactggagaaggtattttcaatgaattagcttctagatctttctttcaggagttgaagcgagtccgatttgacaaatatagaagcaaccatgggcattgttccagaatcatatgtaagatgcacgatcttatgcatgatgttgccacttcaattatgggaaaggaatgtatcgctataactaaatatcctactgaaagagggtcatattcaaatgctactcgccatctacttttatcatgtgatgatccagataatgtgatgaatgattatctgaaaaaagaatctccagctatccaaacactgctctgtgctgaacctattttcacatcaagttcattgcaacactcagcaaaatacagagctgtacgagcattgaaactcgatcagtgtaggagtttgttcttacttcagccaaagcatctacatcacttgagtgatctctatcgacttccaaaacaaatgaagtacatgacagccctctgtcacctccacactcatggatgtacaagtttgaagcacatgcctccagatttgggaaaactcacttccttacaaacactcacttgttttgtagctggtactggctctggttgcagtaatgtcggagagctacaacatttagatatcagcggtcaactagagctacgtcagatggaaaatgttaacgaggaagatgcaagactgatgaaacttgaaaacaagaagctctcaacactttctttagtatggaatgaaaatgacaaagaagatcgatcttacaccaatgcatcagattgtcatgagaaggtgatcgaagctctcaaacctcatgatgagcttcgcgttctgaatgtcaaatcctgcaagagctcatctttcccatcatggatgggtatgcttaaacgccttgtagagattgatctagataattgtacaatgtgccaaaatattccttcagttttggcagctacaagatcttcaagttcttcggctggatggattccatggactgcagtatttgtgcagcattggtcaaaacagtgagataccgtcaacattcccaaaactaaaagagcttaaactaacaaacttgaagagtttcaaccgatggtgggaaataaatgagagacaagaaaagcttgattttcctcagcttgagaagctggttattaagggatgtggagagctaacatcactgcctactagtgacagtaatatgtcagagcctgcattaccagctttaaaggaactcgaactctgtgatttaaatcaattcgagagatggcaggcagcggaaggaacacaagacaaaccaccgaccttccctaaccttgagaacattagtattgtgaaatgtccagagttgacaagtctaccagaagcaccaaagctcagtgtgttagacataggaaatggctctgaacagatgctcctttgcatacctagatacatggcttcattgtccactctgagattgcagcatgaaggtgaagaaacaacacctctaactgaacgctttttgattgagtgggtggatggcaaggacaatcagaatcgtgagtaccctttgccagttatgaagctagttggcttcaacgtgttcttccgttcaggtgcacaagcactatgggcatgctttgcacagcttaaagatttggtaattattagttgtgatggtctcatccactggccagagagagaatttcagagcttggtagccttgaggacattagtgatacagcgatgcagcaaactgaagggattctcgccacaagctcttgagcagtcaacatcaggaagggagatactcctgccacgtctggagtcactatcaatacatgaatgtgaaagtttggtagagatcttcaacgccccaccatctctcaaggaaatggacatagacgacaaccctaagcttgagtcgatattcggccagcagagacacgggccagcagggccttgcagcgacaacattgtgtctgctgttgcgttggaaccatcatcaccagctggggaccgcttctctcctcctgaatcactggagtctcactcgggcgagctcccttcgttggtacaactcaatctccaccactgcaaaagcctggcatcgctacaagattcaccgcaagcatactcatccctccaacagcttatcattaatgaatgccctgctctaaaagtgctccctacatgcctgcggcaacagctgcccagcctcaagcggaaatatctagacgcccatcatgaaggtacgcaataatttctttattcccataacgaagcgaattcgatcaatcccccgtgtattttgtcatttttatcccattataccactctattgttccaacttgttcagatatcctaggctgaactattttaggcatctacaggtaatcaatccaaagatatgtaagtgcttataaaagtttcaagctcgtgaaaaacagataaatgcag

SEQ ID NO: 21824 - DNA, 2627 bp, Oryza sativa
  ref <308>: DATABASE ACCESSION NUMBER: AK072057
  ref <309>: DATABASE ENTRY DATE: 2001-12-06
gagggtttcgtcacgtccccgtcccccggcgatggggccgaccgcgccgccgccggacgccggcggcggggagccggaggcgtggtacggcagcatccagtacctggtcaacatctccgcggtgggggccgcctcctgcgtgctcctcttcctcctcgtcaagctccgcttcgaccaccgccgcatcccggggccctccgcgctcgccgccaagctcctcgccgtctaccacgccaccgcgccgcagatcgcgctccactgcggggccgacgccgcccagttcctcctcttcgagcgcgcctccttcctcgtgctcgccgccgtggccgccgccgccgtcgccgccgccctcccgctcaacctcctcgccggggacgccgccatcgccgaccagttcgccgccaccaccatctcccacatccccaagtcatccccgctcctctggctccatctcctcctcaccgccgccgtcgtcgccatcgcccatctcggcatctcccgcatggaggacgcccttcgcatcacccgcttccgcgacggcaacggcaaccccagcgaccccaactccagctcggttgccgtcttcaccatcatgatccagggcattcccaagacgctcgccgcagacaagaccccgctcaaggattactttgagcacaagtaccctggaaaggtgtaccgggtcatcgtgcccttcgatctctgcacgctggagtatctagctgaggagtgggggaaggtgcggaacaggatttcttggctggaggcaaggatggatgcccgcaacctatttgatgaatttgctcagggtggaagacattcagaagagcattggattgtgaggagatgcaaagagctgtgggtgatgacagcagagaggttcgggtttactgacgaggaaatgctaaggaggttgcagacaaagaaacttgtcctcggtagcaggttatcggattataaggatgggcgtgctcccggtgctggcatagcctttgtggtttttaaggacgtgtatacagcaaacaaggctgtgagagatttccggatggaaaggaagaagacaccaatagggaggttcttcccggtgatggagctccagcttgagagaagccgttggactgtggaaagggcaccaccggcatcagatatctactggaaccatctagggctgagcaagacctcactaggattgcggcgtattgcagtcaacacctgcctcattctgatgctcttgttcttcagttcaccattggcaataattagtgggatgcaaagtgcagcgcggatcatcaatgtggaggctatggataacgccaaatcatggcttgtctggctccaaagctctagctggttctggaccattatctttcagtttcttcccaacgtcctcatttttgtgagcatgtatattatcatcccatcagtgctgtcttacttctccaagtttgagtgtcatctgacagtgtcgggagagcagagggctgcattgttgaagatggtttgcttcttccttgttaatctcattctactgcgtgcgctggtggaatcatcgcttgaaagttggatactcagtatgggccggtgctacctagacagtgttgattgcaagcagattgaacaatacttaagcccctcttttttgtcaagatcttcactctcctccctggcattcttgatcacatgcacctttctaggaatatcctttgatctgttggctccaatcccttggataaagcatgtaatgaagaaatttagaaagaatgatatggtccagttggtccctgaagaaaatgaggactaccaactgatgcatgatggcgaagaaacaaataatttgagagcgcctctaatgtctgagagagaagacagtggcattctgaatggtattgaggagcatgatctttcattgtacccgataaacaggagcttccatatgccaaagcagacatttgactttgcacaatactatgcatttgacattacaatattcgcgctcacaatgatctactcactgtttgctcctctgacagttcctgtcggcgcagtatactttggctaccgataccttgtggacaagtacaatttcctgtttatctacagagttagagggtttcctgcaggcaatgatgggaagctgatggacatggtgatctgcatcatgcaattctgcgttattttcttccttgttgcaatgttactattctttgcagtccaaggtgatcctatgaagctacaggcaatatgtactcttagtttgttagtcttttataaattgctgccctctagaagtgatcgcttccagccatccttgttggaagggatgcagacagttaatagctttgtagatggtccaacagattatgaagttttttcacaacctgacctggattggagcctgtatcaatcctgaagaaaatttcaaggtcaatacacacttgtttagttatttcttatctctttcacctgagcttttcattgtaccactcttgaccttttgtacagttacataggtaactcttttggcttctagctgaatttgtttgttggaaatgaaaagcacgcactgtttagatcattaaagctgtgtatctaaaattctatgagaagaaaatacttaacattatcct

SEQ ID NO: 21825 - DNA, 1497 bp, Oryza sativa
  ref <308>: DATABASE ACCESSION NUMBER: AK072058
  ref <309>: DATABASE ENTRY DATE: 2001-12-06
gatttttgctacacctcgtattgtatcccaagccaaggagagcatactacactgtttctgttattattgtgtgaagtgaaacaatggaggcagtaggaggaagaagaagaaggccaagaacaatgctgttcttggtgctagtagcgttgatggtgatcatggccatggcgaagacggcgagtgctggcacaagcacggcaccttcctcgcccacctcctcgacgtccaccgcatcctccgcctctggggcgcccccgacgccgtcgcgcgctgcggcctctaccactccgcctactccaactcctacgtcaacctcgccatcttcgaacccgacgtcggccgcgaccacgtgcgccccatcgtcggcgccgccgccgagcgcctcgtccacctcttctgcgtcgtcccgcgccaccagctcatccacgacgacctgctcttccactacgccgaccaggacctcgtcgccgacctcgccgcctccgaggcgtcactgcaggacgcgcggcgcgggctgttccaccacgacggcgaggcctggcggctcaagatccagcgcctcctcccgccccacggaatcactgtcaaacacatcaggactggcgaggatgtggcactgtcgaggcgcatcgcggcaaccttccttctcatgacaatggcggacttcagcgaccagctcttcgactggcaggatcgcctcttcgacaacaccaatggccgcctcgagttcagtggcaatacctggacttcgctctggccaggcaccggcaagcccggcctctggactgcctccatatcccgcatgggcgcgctctacagcctcatcgttcgcgaggaagagatacacatagctcaacgaaagcatagcaacaatggccaagaagacgatcgtgacgaggacattgagctggtgatcccaccggtgttcaatggctgcacccaggtgctcaccgccgacgaccagaaggcggcacgggacctctactgggatgcagtttgcagcggcggcgaggacgagacggattggcgcaaggtggaggagatcctgcgacggtgcattggcaggaacccgtttgtaggagagcctcacctggttcttgctcaggtgcttctgaacatggagatgtatgaggaggcagaggagcagatagaggcaggggtgaagctgttgctggagtgggggagcagctgggacaagaggatgccatgggaggcttgggtgtcatggggcagggcgatgctgatcaaggccaaggacaaggattggccgcacacctccttcggcatcctcagcatagggcttgtcaagtgagtgaacccattcacctccactctctgatggtaaattaagctgcacctgtactgtacatgtcataacatcacctgataattgctgtatcctctccatcggtatatatatgcttagctcgatggaggaaatcaaacatgatggatatgaaataaatcgctccacaaatatcaaaataatttgacgct

SEQ ID NO: 21826 - DNA, 1847 bp, Oryza sativa
  ref <308>: DATABASE ACCESSION NUMBER: AK072059
  ref <309>: DATABASE ENTRY DATE: 2001-12-06
ggctcttgtagtagctagctaccagtccaaccaacaccaacaactgcgcgagtgagcgcgcggctattgcgtgccacggcgtgccgttgagcgatggctggaggtgggttccccgtggccggcggcgccccgccgggcgactatggcggcggcataaccttctccgtcgtcgtcacctgcctcatggccgcctccggcggcctcatcttcggctacgacatcggcatctccgggggagtgacggcgatggagtcgttcctggcggccttcttcccgggggtgctccggcggatggcggcggcgcggcgggacgagtactgcgtctacgacagccacgtgctgacggcgttcacgtcgtcgctgtacctggccgggctggccgcgtcgctggcggccggccgcgtcaccagggcggtcgggaggcaggccgtcatgctcgcgggcggggcgctcttcttcgccggcgccgccgtcaacgccgccgcggtcaacatcgccatgctcatcgtcggccgcatgctgctcggcttcggcattggcttcaccaaccaggcggcgccggtgtacctggcggagacggcgccggcgaagtggcggggtgcattcacgacggggttccagctcttcctcggcatcggcaacctgacggccaacctgacaaactacggcgcggcgcgcatcccgcggtgggggtggcgtctctccctcggcctggcggcggcgccggcgtccgtcatcctcgtcggcacgctgctcatctcggacacccccagcagcctcctcgtgcgcgggcgggtggagcaggcgcgcgccgcgctccggcgcgtgcgcggcgccaaggcggacgtggacgccgagctggagggcgtggcgcgcgcggtcgatgcggcgcgcgccaacgaggagggcgcgtaccgcaggatcctctggaggcagcaccgcccccacctggtgatggccgtcgccgtgccgctgctccagcagctcaccggcgtcatcgtcatcgccttcttctcgccggtgctcttccagacggccgggttcggcagcaacgcgtcgctgatgggggccgtcatcctcggcgccgtcaacctcggctccaccctcgtctccatcgccacggtggaccggtacggccgccgggtgctgttcctgaccggcggcctcgtgatgatcgcctgccaggtcgcggtggcgtggatcatggggtcgcagatcgggcgggacggcgagtcggcgatggcgaggcgctactccgtggcggtgttggcgctgacgtgcgtcttctcggcggcgttcgggtggtcgtggggcccgctgacgtgggtgatccccggcgagatattcccggtggagatccggtcggcggggcaggggatcagcgtggccgtcaacctcggcgccaccttcgtgctcacgcagacgttcctcgccatgctgtgcagcttcaagtacgccacgttcctctactacgcggcgtgggtcgccgtcatgaccgccttcgtgtgggcgttcctgccggagaccaagggggtgccgctcgaggccatgggcgccgtctgggcgcggcactggtactggcggcgcttcgtgcagccgccaccggcggccaaggacgccatgctgccggaggtcctcgtgaactgacaacgtatactgtacgtgttctctgccttgaccgtgtggcggcgctgcattaattcgtgggaagttgtgtaaaattaaatctggtttctggtttaacggttcctacatggttgaataccatcccgtgtttgtcctcttgcgaaaaatttgtattgtttacatatgaacaaatccaaagtccgtgttctattttagtttct

SEQ ID NO: 21827 - DNA, 1414 bp, Oryza sativa
  ref <308>: DATABASE ACCESSION NUMBER: AK072060
  ref <309>: DATABASE ENTRY DATE: 2001-12-06
ggtggccgccgctcccgagcaagagaagcggaagaaggaagtccaccgcgcgaaacgccggagatgccgccgggggcctcgccggcggcgtcggcggaggcctggacgtgggagaacgccgccgcaggagcggccgccggcttcgccaccgtcgcgaccctccacccgctcgacgtcgtccgcacccgtttccaagtgagcggcgggaggggatgctacgacttgccgccgtacaggaacactgcgcacgctgtgtacaccatcgcgcgatctgagggtctgagaggactttatgcgggattttatccagcagttcttggatcaactgtttcctgggggctatatttctttttttataacagagctaaacaaagatacttacaagggaaagatgatcagctccgtccagttcaccatcttgtctcagctgcagaagcaggtgctttggtttgcctattcacaaaccctatatggctggttaaaacaagactgcaattacaaacgcctagtcatcatacttcacgatattctggattttctgatgctttgagaactattctgaaagaggagggatggcttgcgctttacagagggattggacctgggcttttgctggttactcatggagcgatacagttcacggcctatgaggaacttcgcaaagctttgatatttgccaaaagtagacagacaagaacagacaacagaagctgcgatgattccttgaattccattgattatgcggcacttggggctggttcgaaagtaactgccattctgcttacttatccttaccaggtcatccgagcacgcttgcagcaacgacctggtagtgatggcactccaaagtacaaagatagctggcatgtagtgaaagaaactgcaaggcatgaaggtgtccgtggattttacaggggcatcacatcgaatctgctcaaaaaccttccggcagcttcccttacatttgtggtgtatgaaaatgtgatcaaattattcaaagcagcaaaggagaagacataatatttccaattgttcccaggagaaacaagaaaagaatgtgcgtcatgaaatactgagccaatcccaccttctggagttcgaagcaacattcatcttcattgctgcgttattgtctcatccacttaacatgcacaggctagagaaatgttacatgagagaagttgcgattgacataatcgccgtagattttgttttgaggaacatagatcagtttttgtttcttcctgaagtagttcttcctgtagtccagttgaatacagtttttggatccttatgtaatcgggagcctttacaggtctacccatgtgcatgtgtacatccaccatgtctacggctgctcaactgagttacaacagttgtataaaactgaagtaatgccagacaaaattacacc

SEQ ID NO: 21828 - DNA, 1976 bp, Oryza sativa
  ref <308>: DATABASE ACCESSION NUMBER: AK072061
  ref <309>: DATABASE ENTRY DATE: 2001-12-06
gacttttctctttctaggatttatggtgcttggtgaacagtgtgtccccttgttggcgacgttggatatggaagtgaggggtcagaggaggagcatgctgcccatctccgccggatctggactcccctctgcggtgacctctctccccaggcggcagcgttcggatcagcccctcagcagacgtgaggcgcgagccatcggcagagggctccatggcggcggtgtcctggcctcctaggggtcggcggagtggcctcggtgacggcgtatcttgtgccgctggcactcacctctccctcgccatcttcctagcctccgccaccactgcccctcctcgtcggacgacgagcttgatggtggcggcgcaagagcaagccagggtcagtcgttccttacaccccttgcctttgccccccactcgccagatggcgagctagatggtgccggcgcccctgctctcctttcttggccggccatgaggtggggtggcagattggaagaagggggcgacaacctcgacgacggctgcacacatcagcggtggagcggatctagagtggccacgggacagtatagcgatattggaaccaaggactatacatctaaattatcagtgtactgaggttcatgatagtgctctgctgaagaatgtggagattattgcaaaaagactcactaatgcatccgtgatttaaggtacttctggtagcattggagtctataaaatttccctacacatctttgatttaaaatattttgctttatgcatgtgtatagaattggagcctttctcaacaataatataagcttatgaacatgaaattctgaaagatcatcaagatatatctttcttaatctaaagagttatgatgatcaggtcaatttttttttcagaattaagtttagttgcatggctaaattggaacctattgtacttgctatgccccgttgtaatgctttggaatttttaagagctccatactgatgtctgctgatctggattggtataagtgttggctatgacattgttttcaggcaattggcaatgtcgtgctgcattgtgaaccttcttcttatcaccctttgatgggttggaggtatagaatcgagatgattgccaaaaatattccggtaattactgccaataaataagaataaaagcagagcggacataaggtaaaaagaaagcagaaagacattcatctagtcgtgttgtatttacttggtttttagagcatgataaacattaaggttcttagagcatgataaaaaattgcaataattaaacgatggttcatctgtctgcacagttaatgtttttctgcataaaattgctcttgctgcaattaccaatactttttctttcttctagtaatatataaagccacttaaaaaagagattttcatgtttgggtttgcaactcctagattttgtggtggtatgttatgaaaatagccgctgagcaactgaaatgaaaatatgcctgttgctaacttgctatatgtttctgcatggacagaaaaaagaccttgggtagttttattcaatattaatcttataaatctaatgaaattgaaattgcattcagggttgagttcattgataacctggaatcgacattaattggaggtggcttgacatcctagaggaagaagagccttgtgatctatatcttcttgtgcgcttctattatttgtattgcctgtaatcatatttgtgtattttgtcctgcgagaaaaatctataaaatcacgttagtgggagtgctagctaaatatagcggaaacaaaagcgggatagaatctgactcgggatagaatcgggatagaatctaactcctgacttgggctgcgcaaacaggagcaggaaaaggtgtgggcgaaccaacctgactcgtatgcgatattgttttcttgcgtgaacctggtaaacctggactctgtttttttgtatgtatattttgtgtgtgaactgg

SEQ ID NO: 21829 - DNA, 1790 bp, Oryza sativa
  ref <308>: DATABASE ACCESSION NUMBER: AK099238
  ref <309>: DATABASE ENTRY DATE: 2002-08-28
ggtaggtcgcgtgcctccgctcgctcgctcgctcatcgtcgtcgtcttcctcggggcctctctcgtcgtggagcggaggcgtgccgcgtagcagggggaattcaactgaggtgagaaatgggggcaaaggactccaagccctcatacagctattcttcttcatatgatcatgggaattcatcatcgggatataactcgagataccctgcataccctgcaaatgcatcttccagtcagaacacaaggtatgctccttctatggagaactatgtgcagccagaaacgcatgccaggttgcagaggaagtactcgaggattggtgatgactaccgctctctgaatcaagtgactgaagctttggcacaagcaggtcttgaatcatcaaatcttattgtaggcattgattttacaaagagcaatgaatggacaggtaaactttccttcaatcgccgatgtctgcatgatattggaaacactccaaatccatatgagcaagcaatatctattattggaaggacactttcagcttttgatgaagataatttgattccttgctttggatttggtgacgcatcaactcatgatcaggaggtattcagcttttatccagagaaccgcccatgcaacggatttgaagaggcattagaaagatacagagaaattgttccgactcttcgattagctggaccaacatcttttgccccgatgattgaaatagcaattggtattgtagacagcactggtggtcagtatcatgttcttctgataatagccgatggacaggttactcgaagtgttgatacacagtctgggcagttaagcccgcaggagcgtgatacgattgatgctatagtaaaagctagccagttccccttgtctattgttcttgttggggtgggtgatggaccatgggacatgatgcatcagtttgatgacaatatacctgctcgctcatttgacaatttccagtttgtgaatttcacggacatcatgtcaaagagcatagcagctgacaggaaggaggcagaatttgcactatccgccttgatggaaatcccaacacaatacaaggcaacacttgatctccaacttctaggccgtcgccaaagaatacagccaagaattcctctgccgccacctatgaggaatgcttattcgaggtctactagctttgaccaacattctggtgtttattcacgatctagtagcttcggcccacaaacaagtggctttcagcaatctgaaagcttcaaacagagacagcctgtggctaccactgcacctgacacttatacctcggaaagttctttagaaggaagacttttgtgcgctatctgtatggataaatcaaaggatcttgcatttggatgtggacatcagacctgttatgaatgcgggaagaatttggtgcgctgccctatgtgccagcagcatataaccacaaggatcaggctgtactgagaaaacaaaaatggatatcctgaagtttctgaagcctgcagaaacagaatctccaacatcagaagaaactcctgtgcaaaatttatgaaccagcctaaattgtactgttctttcgtcttgtaattggtggtttactattattattgcagtgagaaatgtttaggcagatagtgatccatataaaaagctaaggcacacactgtagtattaactacagtagttatgtgaagaagaggtacactaaataatgtacattaattagcttctctattatacattctcctttctttcccttggtaaataagataaaaggttgcaaaatttccagg

SEQ ID NO: 21830 - DNA, 1828 bp, Oryza sativa
  ref <308>: DATABASE ACCESSION NUMBER: AK072062
  ref <309>: DATABASE ENTRY DATE: 2001-12-06
ggtccggtttcctctcctcgcctcgccgcggcgcccgcgtcctcctcaccaacgccagagctccacatcccacctctcctcaggttcccgtctctgatccctcgttgcgttacggggaagcaggcgtggtggttgctccccgtgcggagttttcgattggtttggttgggtgagtttggtgctggggtgttggggattggttggttggagtttggagatggattttccgggagggagcgggaggcagcagcagctgccgccgatgacgccgctgccgttggcgaggcaggggtcggtgtactcgctcacgttcgacgagttccagagcacgctgggcggggtcgggaaggacttcgggtcgatgaacatggacgagctcctccgcagcatctggacggccgaggagtcgcacgccgtcggcgccgccacgacgacgacggcgacgacggcgtccgtggcggcggcggagcacgcggcggtgggggcgccgcccgttcagaggcaggggtcgctgaccctcccccgcacgctcagccagaagaccgtcgacgaggtctggcgcgacatgatgtgcttcggtggcggcggcgcctccaccgcgccggccgccgcggagcccccgccgccggcgcaccggcagcagacgctcggggagatcacgctggaggagttcctcgtgcgggccggcgtggtgagggaggacatgtcggtcccgcccgtcccgccggcgccgactcctacggcggctgctgtacctcccccgccgccgccgcagcagcagacgccgatgttgttcggtcagagcaatgtgttccctccgatggtgcctccgctctcgctgggaaatgggctggtctcgggagctgtcggacacggcggtggtggtgccgcgtcgttggtttcgccggtgaggccggtctcgtccaatggcttcggcaagatggaaggcggggacctgtcgtcgctgtcgccatcgccggtgccgtacgttttcaaaggtgggctgaggggaaggaaggcaccgggcatcgagaaggttgtcgagagaagacagcggcggatgatcaagaacagggagtctgccgcgaggtcgcgccagaggaaacaggcatatatgatggaattggaagctgaggtagcaaaacttaaggagctgaacgatgaactccagaaaaagcaggatgaaatgttggagcagcaaaagaatgaggttctagagagaatgagccgacaagttggaccgacagcaaagagaatttgccttcggaggactctgacgggtccatggtgatcgaagctaaaggcctagttacctgtaactagaacacagtcctttcaatgtgagcagtgatcatagtagttgtaggatggtgaagctgaagacctggttacctgtaactagaacacagtcctttcaaagtgagcagtgattacagtagtagtaggatggtgaagctgccagttacctgtaactagaacacagtcctttcaaagtgagtatagtagtaggttagttcagaatcgccagatcgatctgcccttgtaggccaaccattagtccgtgggcttgtctcttgggcggacaggctgcctgagatattcactcgataggttttagttgtctgagttatatccaagcattgtatgtaacctatttaaccatggtgcctgctacctgtattgtattttgctgctgtaggaacctatgtcggtgttaccatcttgttcttaatttgtgtacttctcttgccattttggataagatgtatctgaacttatacatatgtacttttccttgccattttggacaagatgtatctgaatttac

SEQ ID NO: 21831 - DNA, 1424 bp, Oryza sativa
  ref <308>: DATABASE ACCESSION NUMBER: AK072063
  ref <309>: DATABASE ENTRY DATE: 2001-12-06
gatccacttccaatccatccagcccaagtccatctcccacccttccaccactacccacatcgtctcgccgccgtcgccgccgccggcgtgacctccgccgcaaatccgcagcccccaccaccgccacccaaagctctcatcccgcatgaaggcgtcgatcaagttccgcgacgacgaccggccgctgctgcgtgccagggtgccgatcagggtgctcgggctgccgctccactccggcctctccgccggcggcgacccgcgcgagctccgcctcgacctctccaccgccttctccttcggcccggcgatccgcctctcgtaccgccccaatgaccccgccctccccttctccgtctccgtccgcgccggcgtcgggcccctcggctcccccgcccgcgcgcccttctccctcgccgccgagttcaacctcctctccggcaaccccggatcccccgccttcttcctcctcctcaagccgcgcctcggcgacttctcgctctcccacaccctccgctcctcgccgcatcccggtaataaggtcggggaggtctccgatggcgatggccatgggcgcgaggtgaactacaaggcgttctcgttcgcggcggcggggaagagcggcggcggggtcggcgcgctgctgtccgggatgcggctcaccacgaggagcgtgctcccgctgtggggaagggcgagcctgcggttcagctgggggctgcgcgcgccgccggagctgcaggcggcgctcgccgccgacgacgccatggtcggtgccagccgcagccgcaagggcggcgcgcgggttccggtcagcaagatgcccctgctggtcattgacaagatctccatcgaacagtcacctcgcgccgccgacaaaacgcgcggcaacgcggattcctcgccaccagcgccggcgattgctgccgccgccgacgccgatgcagcggacggcacgggacgcggcggcgaggggttctcgctggtgaggcggcagctggaggcgctgaacgcggagagcgggatgctgcgccgcgccgtggaggacctgcgcgccgaggtcgggagccgcagggcggcggtgtccaccgccggcgcacccgacacctggaggacgccgccggcgccgccacaaccagcacagccataccactactcatctccggtgaagccggatcgccggggcagtggcaaggacatggccgcagccgagaacgccacgaagccttcgtcggatgagcttggcgacgagttgaagagggcattggaggcgcggctgaggtgagagctttggcatccagccattgccaagagctccactccaccaccacggctaaccaacctcactgtccggtgttgctggtacatgctagcttcaggcttgtataattgagcatttccaatcaagaaatcatcaggttttcttc

SEQ ID NO: 21832 - DNA, 1804 bp, Oryza sativa
  ref <308>: DATABASE ACCESSION NUMBER: AK072064
  ref <309>: DATABASE ENTRY DATE: 2001-12-06
gaggtgaggcgaggcgaggatgtcgtgacgacggaaaaacggagcagccgaggcgaggaagccgccaccgccaccgccgcgaccccaatgcgcgcgcctcccgccgcctcagatccccacccctaaccctagcctccgcctcggcccccgcctcgccgcctcctgctgccgcgacgagcgcgccacggacgtcgcgggcgaccccccggaggcggatgcgatcgggcgccctcgcgtagcgcccccgggcttcaccttctcctaggggtaggggagggtagcggtggctgtagccctagacgcggcggcgcgcggttccgtgccctgagggaggggaggagcagatcggtgtgtgtgtgggggagtgatgccgggggacgtggcgacctcgccggcgccggcgccgccgtccgcgtcttcgcagcagagccaccacgccacctccgcccgcggcctgctctgccacgccgccgccggcgcctccgctggtgtggttgcggcgaccttcgtgtgcccgctcgatgtgatcaagacgaggtttcaggtgcacggctggcccaagctcgccaccggcacaattggaggtagtgtaataattggaagcttacaacagattgctcagagggaaggttttcggggaatgtatcgtggtttatctccaactattctggtactcttgcctaactgggcggtctattttactgtgtatgagcagcttaaaagcttgctttcttccaatgatagaagtcatcacctgtccttaggggcaaatgttattgctgcatcatgtgctggaggtgcaactactattgcaacaaatccactttgggttgtgaagacaagatttcagacccaagggatacgagctggggtgatcccgtacaaaggtacacttgctgctttgaagagaatagcacatgaagaaggcattcgtggactgtacagtggacttgtccctgccttggctggtatcagtcatgttgctattcagtttcctgcatatgagaagatcaaagcttatctggctgagcgagataatactacagtggaggcattaagttttggtgatgttgctgttgcttcatccctggcaaaagttgctgcgtcaaccttgacatatcctcatgaggttgttcgctcaaggttacaggagcagggagcacactccaaggcgagatatacaggtgtaatggactgcatcagaaaggtctatcatatagagggtttgaccggtttctaccgtggatgtgcaactaatctgttgcggacaactcctgccgcagtaataacatttaccagctttgagatgattcacaggttccttcttgatgtattccctcctttacctgaacagcaaccccaaccgctgaagcattgattgtacaatccttgtgcccctatccatgttgtcactgttgagtagaaacccagtaaaaccatccatggacaccgtttacctttgttagaaggctctcctaaaagagattttgataatgcaacaggtagctaccactgaaagcacaaatcatagtgtaggacagtaattagcatttctgtgtgtattattacttttgatagcatgcaatgaggaggtatatgggtttagggctgtggggacatggtgattttggtggggtatgttgtccgatgatgatgatgatgaaaaaaaaaaagatactattatgtggatacaataattgctccattcattttattcctcttttatgattcgttttgtgatactgaactcaaatatgccttggagcagactggcagttttgttatataggagtactatatattt

SEQ ID NO: 21833 - DNA, 1628 bp, Oryza sativa
  ref <308>: DATABASE ACCESSION NUMBER: AK072065
  ref <309>: DATABASE ENTRY DATE: 2001-12-06
ggcttggccggcaatagagaacaaactctccaccttctaaccgcttccttgcttgctgccataagccgctgaggtcaccacgggcggccgaccaccaccgctgccgacccatgtcgccgttcgcggccgcccggctgaccatgcatgaccctcgtcggcctcctcgcgtaggtcactgctggcctccttgcaccgtgggccacagcctcacgccgcgtcagtcgtgcctcgccagcaatggccatgcatcgctccagctagatccatgtgccgccggccgctgccttgcacaccaccgtccgccacctcacacgccgtcagttgcgtggcctccaacacctgccgacgagccgttgttgtcgccggctctgaccagatctggcaggagacaccagatccggccacgcgccaccggtcgctagagcccactcccaaagtgccaccggctctccctctttgcctcccggtgctgcggcggctgtccccgaggccatgggatcaggcctcagacctccggggggagagggaaggccccgctgccgctgtccttgcagttacatggttttccggcggcttgctcaggcggcggtgaggtggagaagggaggaggtggtgggtggcagcaggggagggagacatcgcccatgtcgcccaatcctagagcgacgcaggggcgcaaatggatggtctctcctctgtgctcttcttcccagcatatctcaataattcagttgctggggagtaccacatgcatcagatgccgtgttggcacattgtaagagagcaaaggagccttgaggtggtgattcaaattgtggtgcaaattacacgtggagttgaagcatatgcatggagtagccatgggctagctagctaagctgcttaccagtggatggtaacattgtgagctacatgattgacgaccttgactaggacattatcgccttctcttgcatacagggttggccccgggaacttgccattgacagtgaggataggcttggttgagcaaagccgtgtcatgttccgcatgaccacctgcacaagacacagaaaagacagacaaaaccgtgttatcatgcggcaaagtttgatgacgatatatcctcacattgaacttgtaatgccgggtgatggcgtgggcgctgagagcctgaagcaggaagcaggcggccatgaggagcagggagagccggcgtgactccggcaggacggccatgtttgctgcgtgaccagcggcaggggaaggagaactaagagctggtgagagtgcagtgcagtgcatggaaatacggaggtaacgaatgcttataatggcgcactggctagataggagggaatgggcggtgttgggtttttagctgccatgtcgttttaaaatttaggtggggaagccttgcttaacaaggctaggaaccttctgattcatttactttcacgaccattcgcctaaattttaccagcccaatcccagctgctgctgcttctgtacatgcctgatagtgcattccttcagtaccacataaagctacctacccgattactccactatgctgccgcacccagtttctggctgttcatacttggtgaaaccttcacttaattagctatacatacactcttgtttg

SEQ ID NO: 21834 - DNA, 3498 bp, Oryza sativa
  ref <308>: DATABASE ACCESSION NUMBER: AK072066
  ref <309>: DATABASE ENTRY DATE: 2001-12-06
ttggggctcgtcttcctcgccgctcgctcgctcgcctcctccattttttttttcttctcttcttcttacgaactcgaaacgcgaaaaagggagtagatcagatcaaagacgcggaggaggaggaggaggaggagagctagggtttggatcgggagagagggctagggtttcagccatgatgtcgaggtcgtacacgaacctgctggacctcgcggcggggaacttcgaggcgctggggccggcggggggagggaggaggaggtcgttcggggcgaagcggatgacgcgggtgatgacggtgcccgggacgctgtcggagctggacgacgaggacgacgagccggcggcgacgagcagcgtcgcctccgacgtgccctcgtcggcggcgtgcgagcgcctcatcgtcgtggcgaaccagctccccgtggtggcgcggcggaggccgggcgccgcggcgggggggtgggcgttctcgtgggacgacgactcgctcctcctccgcctccgcgacggcgtccccgacgagatggaggtgctcttcatcggcacgctccgcgccgacgtgcccgcctgcgagcaggacgaggtgtcgcagagcctcatcgatggattcggatgcgcacccgtgttcctccccgcggggctctacgaccgattctaccagcacttctgcaagggttacctatggccgctgttccactacatgctccccttcgcctccgccttgccggcggccgcatccggcgatggccggtttgaccgcggcgcgtgggaggcctacgtgctcgccaacaaatacttcttcgagaaggtggtcgaggtcatcaacccggaggacgactacgtttgggtccacgattaccacctcatggcgctgcccaccttcctccgccgccgcttcaatcgcctccgcatcgggttcttcctccacagcccctttccctcatcggagatctaccgctcgctgcccgtccgagaggagatcctaagaacgctgcttaattgcgatctcattggattccacacattcgattatgcgaggcacttcctatcttgctgtagtaggatgctggggatagagtaccagtcaaagcgtggatacattggattggattactttggccgcactgttggaatcaagatcatgccagtgggaatccatatgggtcaattgcaatcagtgttgcgattgtccgagaaagaaaagaaggttgctgagctgcggcagcaattcgagggcaagtccgtgttacttggtgtggatgatatggatatcttcaagggaatcaacttaaaacttcttgcgtttgagaatatgctgaggacgcatcccaagtggaagggaagagctgtgttggtgcagattgcaaacccagcacgagggaagggaaaggatctggaggctgtccaggctgagattcgggagagttgtgatagaattaacaaggagtttggccagtcaggttacagtccagtgattttcattgaccagagcgtgccaagtgcggtgaggcttgcatattatacggttgctgagtgtgttgtggtgacggctgtgagggatgggatgaatttgaccccatatgaatacattgtctgccgggaggggatacctggctctgagtgtgcaccagaggtgagtggaccaaagaagagcatgttggttgtgtcggagtttattggttgctcaccttcactgagtggagccattcgtgttaacccgtggaatatcgaggcaactgcagaggcactgaatgaggccatctcaatgtcagagcgtgaaaagcagctgaggcacgaaaaacattaccgttatgtcagcacccatgatgttgcatattggtctaagagctttgtacaggacctggagagggcttgcaaggatcactttaggaaaccatgctggggcattggattgggatttggcttcagggtggtagccctagacccacatttcacaaagcttaatttcgattcaattataatgtcctatgagagatcaaagagtagggctatatttctcgactatgatggcacattggtgccacaggcttcgctcaacaagaatccaagtgaagaattactgaggatcattaataccctatgcgcagatagaaataacaccgtgttcattgtcagcgggagaagcaaggatgacttgagcaaaaagcttatctcatgtccaaagctaggcattgccgcagagcatggctacttcttaaggtggactagagatgaagaatggcaaaccactgcacagacctcagattttggatggatgcaaatggcgaagccagtgatggatctttatactgaatcaactgacggatccaccattgagactaaagaaactgcactggtgtggcaccatcaggatgctgaccaaggttttggctcttcccaggcaaaggaaatgcttgatcacttggaaagtgtattagcaaatgaaccagtctcagtcaagagtggccaattcattgttgaagtcaaacctcagggtgttaccaaagggctcatagctgagaaagtactcacatcaatgaaggagaaggggcaactggcagattttgtattatgcattggtgatgacaggtcagatgaggatatgtttgaaaatattgccgatgtcatgaaaaggagcattgttgcaccaaaaactccactgtttgcatgtactgtgggccagaagccaagcaaagctaggttttacctggatgatacatttgaagtcgtcaccatgttgagttcactggcggatgcttcagaaccagaccttatggcagacttggaagatgacttggccacatcagtctcatcaatagaaataagtgacagagtggtatcttttagtaatttaaggacagaaggatcttagtctggtgtttctgcgttgcttttctcgccgaaaaagttctgttggaactgagtgagggagtgttaagcaagatgaaacactgcaagattaaagatgctacagggcaaggaagtcgaattcttgggttcatgattcattttggtgaagatgagggtaagggattaaaacatgtagctgcaaatattctgaagtccggaaagagattacagtttgagtagctcccaaatagcctcattatgcgttttgttacggcggcatttactaccagtcgctgctacgaagattcttatgttcatagctgacctgccatgttctttccatttgaatacttatcccaaggctaagtaggaagcatcggcgtggcagaagtgcatcggtgcaatatgggggaatatgagggtaaatcttgtgacaggttaactgcagcttgtgatttcttgcttgttaacctggttaacagaaatcgtctagtagggaaaaaactagtgatgcttttcgtttacttgtaatgttgtggcaatgtggaggatgacatttgattcattgtttgacagcattatctgtatcatccttatatgtagctaatttatattgagttctttacaattaatcaccacttgctc

SEQ ID NO: 21835 - DNA, 1282 bp, Oryza sativa
  ref <308>: DATABASE ACCESSION NUMBER: AK072067
  ref <309>: DATABASE ENTRY DATE: 2001-12-06
gattcccatcgtctccttcctcctctcccccgcatatcctccgcctccctttcccccctctcctcctcaaccctatttcaccaccacctccaccgctgccgcggcgagaattcgatcggttcttggcagccgtagtgcagttttgtgcagttttcttctctcttgttgttgaggatgaagtttgggaagagcctgagtagccagatcgtggagacgctcccggagtggcgggacaagttcttgtcgtacaaggatctcaagaagcggctcaagctgattggtgggggtgggggtggggaggagaggcaggcgaagcgggcacgcgttgcagcggatggcggcgaggaggaggccgccgccgcggcgatgacgcccgaggaggcgggcttcatgcggctcctggaggccgagctcgacaagttcaactccttcttcgtcgagaaggaggaggaatacatcatccgccagaaggagctgcaggacagggtggcgagggcggcggggagggagtcgaaggaggagctgatgcgggtgcgcaaggagatcgtcgacttccatggcgagatggtgctgctcgagaactacagcgccctcaactacaccggattagttaagattctcaagaagtatgacaagaggactggggctctgatccgtctgcctttcatccagaaagtgctacagcagcctttcttcaccactgacctcctgtacaagcttgtgaaacagtgtgaggccatgctggaccagcttctaccatcaaacgaactgtctgtatcgagtgaagatgggagaggcgatagcactaacgaggacaagccttcgaatcccagttcatccttggttaatggtggcactattccagagttagatgagatcgagtacatggaaagcatgtatatgaagggcacggtcgcggcgcttaggtctctgaaggagatccgaagcggaagctctactgttagtgcattctcattaccacctctccagggcgacagttcgccagaggagcagcaggaactgtggaataagattccggtgattgagcaggccgccaaatgacacgaccggcatttcactacatggttatgtacactgcatgaccttgatcttgacatttgctggagatagtaccggggatctcattcccctgtcatatattcagtaatttgtatgattccaggattcctaacagttgtaaaatggtggacatgttcagtatacattgtaaaatcatagaaacccatcataaccatcagacagaactgagatgttttgatcc

SEQ ID NO: 21836 - DNA, 1799 bp, Oryza sativa
  ref <308>: DATABASE ACCESSION NUMBER: AK072068
  ref <309>: DATABASE ENTRY DATE: 2001-12-06
gatcatcctcatcgtcgcgcgcaccactcgcccggtcgccccatccccactctggcactccagcgcccaaaaaccttcgcctccgcctccgccatgggagaccaccgcgccacggccaaggtccgcgtgaacggcgcgccggcagaagcgacgctcttctgcaccgacccgccgggtgcagctaatggcggcggcggagatggaggggagctccggtggcggtgcgctggtggcgccgcggcggagcgcgtgctgtcgctggacgcggacgtgctcggggtcgaggccaggggtaaggaggtggtcgtgaaggccttcgtgctgccggcggacgcggcggccaggtcggtgtcctgcgccgcgggtgcggggaagggaggaggaggacggaggaggcgcaggagggattacgtgttcgagatggccgccggcgaggacgccgccgcggcctggtgcgacaggatgaggggctccctggactctctcggccggcctaagagattgttcatcctggtcaaccccttcggcggcaaaaaatgcggaaagaagatttacgaggcagagatcaagcccctgttcgaggccgccggtgtcaacgtcacaatgcaagagacccggtatcaggggcacgcccggcaggtggcgtcttctcttgaccttgcgcgctacgatggcattgtctgtgtcagcggcgatggtgtcctcgtggaggtagtaaatggaattctacaacgaatggattgggaggaagcgatgaagataccgattggggtggttccagcaggtacaggaaatggcatggctaaatcgctgttgcattctgccagtaagacatactcggttccaaatgccgtatttgccattatcagaggttacagtcagtccttggatgtatgcaccattgtgcagggaaggaagaaatttttcagtgtcttgaatatgacttggggtttggtggctgatatagatattgagtctgagaagtacaggtggatgggaagtgcacgctttgatttctatgctttggttcgcataatgaacttgagaaaatactacggaagtattcagtatgttcctgcccccggctatgaggcatatggagatgtcgtcaagcaggttgagaattgcactgtagaatgccaagaacagattgggaagtctttgtgttcttatcaaggtccttccgttgagtttcaaggttcagaatggagatcccttgatggtccatttgtgtctatttggatcaacaacgtgcaatgggctgctgagagtatcatggcagctcctggggccaagttctcagatggctacatggatgcagtcatagtcagggactgtccaaaggctgatcttttagccctactgatgaagatgggcgatgggagtcatgtaaaatcaccatacgttacgtatctaaaggtgagatgtcttcggttatcaccaggccagcttgtggagaatccaaaacgaggtggcataatagacgtggacggggaggctatcgctagaggagaaggaacgtacggcaaaaaccagaaacaggacgtgatgggttatggcccttccattcagatgacagtgcaccgagcgttggccacaatgtattgtcccaaatgacccctttatctcctctctctcccgagattggagtatttattcgtgccaattgtttcgctctttgttagaaaaacctggtaatcttgagcagtattcattagaaatatcttttgaaaaaaagaaaacgctgatacaccattacaccttcgcatgaaacaacataactggattattttaactgg

SEQ ID NO: 21837 - DNA, 3647 bp, Oryza sativa
  ref <308>: DATABASE ACCESSION NUMBER: AK072069
  ref <309>: DATABASE ENTRY DATE: 2001-12-06
gccatccatttttcttccctttccgatccaaaagcttccttcccttccgccaccacaccatgccacccgccggagacgccgcccacgcgccgccgccgccgcaccgccgcctcgtcttcgccttctacctcaccggccacggcttcggccacgccacccgcgccatcgaggtggtgcggcacctgatcgcggcggggcacgaggtgcacgtggccacggcggtgccggagttcgtcttcaccgccgagctgccgcgctccccgtcctcccagggcctcctccacatccgcagggccatcctcgactgcggcgccgtccagaccgacgccctcaccgtcgaccccctcgcctccctcctcaagtatcatgagacggccgtggtgccccgcgagtcgattttgaggaccgaggcggagtggctcacctccatcaacgcagacctagtgatctcggatgttgttcctgtggcctgcagggtggctgcagatgttggtatcccctcggtctgcattgggaattttagttgggactacatatatgcagaatatattgtggcatctggcgatcatcaccgttctattgtttggcagatagcggaggattattctcattgtgatatcttacttcgactacctggatactgccctatgccggctttccgtgatgtcactgatgtgcctcttgtggtaagagggctacgcaaatctagatcagaggtgaggaaggaacttggaatagcagaaaatgcgaaggtggtggtttttaattttgggggacagccagcaggatggaacctgaagcaagaatggctgcctgatggctggatctgtttggtctgcggtgcatctgattctcaagaggttcctccaaacttcattaagcttgcaaaagatgcttacacacctgatgctatggcagcatctgactgcatgcttgggaaaattggatatggaactgcaagtgaggctttggcctacaagctgccatttatctttgtccgcagagattattttaatgaagagccatttttgcggaatttacttgagcactaccagagcagtattgaaatgaccagaagggacttccttcatgggcactggaaaccttatctactccgtgctctcacacttcaaccatgctatgatggtccaacaaatggtggtgaggtggctgcacgaatcctcgaggacactgctgttgggaagaagtgtatttctgacaaattcaatggagcaagacgattgcaagacgccatagtgttagggtatcaattacaaagggctccagggagagatgtagcgattcctgactggtattctctttccgagacagaagttggtgcctgtccaatctcagaaaatattaaaacaaaagaaagcaccgaatcatgttttgaagactttgagatacttcatggggatctgcaaggattaccagacaccatgtcctttttgaagagcttatctgaatttaatcaaagtgagttaaagagtaatgggaagcaacctcaagagagaattgctgcatctgtgctctttgactgggaggaggaaatgtatatagcaagggcacctggtcgtttagatgtcatgggtggcattggtgactattcaggaagtctagtcttgcagctgccccttcgggaagcctgtcatgttgctgtacagaggaaccacccaagcaatcagaagctatgggaaaatacacaggcaagacggcttgagaacggaggcatggaacctgtggtacaaatagtatcatttgggtctgaattgagtaaccgttcaccaacttttgatatgaaattgtcagatttaatggatgtcgacaaaccaatatcctacgagaaagccagagaatttttttgtcgcaacccatcccagaaatgggctgcttatgtcgctggaacaattctagtgttgatgactgagctagatgtgaagttcactgacagcatgagcattctggtttcgtctgatgtgccagaaggcaaaggtgtttcttcttctgcatcagtggaggttgcaactatggctgctattgcagctgcctatggtctaaacattgctccaagggacctcgctttgctttgtcagaaggttgagaatcatgttgtcggagctccatgtggagtaatggaccaaatgacatctgcttgtggagaagctaacaaactccttgcgatggtttgccagcctgcagaagtgaaggaattggttgccattcctaatcatatgcggttttggggtctggactcagggatacggcatagtgttggtgggggagattacggatctgtaagggtaggcacttacatgggacgaaaaatgatcaagtgtgcagcatccgacttagcttcagaatcctcagtttctgatgctcctgttcaatctaatgactataaacaaaatgccatagaactactgaaatccgaagcttccctggagtatttgtgcaacataccacctcacagatatgaagctatttatgcaaaagatattccagaggtcattactggagatgcatttttgaagaaatatggagatcacgatgatacagtaacagcaattgaccctaaaagatcttacaatgtgaaggctcctactaggcatcccatatatgagaactttcgagttgagaccttcaaagcactcttagaagcagctaataccgatgagcaattgtcagcccttggagaacttatgtaccagtgccactacagctataatgcatgtggtcttggttctgatgggactgatctgctagttaatctggtacaagaaatgcagcacagaaatatgtcaaaaggtgaaagtcctagtctatttggtgctaagattaccggaggaggttccggaggctcagtttgcgtcatggggaaaaactgcctcaaaagcagtgaggagatcatcgagattcagcaaaggtacaaggcagcaactggctacctaccaatcctattcgatggatcatccccaggcgctgccaaattcggctacctgaagatccgacgacgcccctcgtcaccaattgctgccaaatgaagagattggctttcagtttgtcgtgcaactcggtctgtcaatgagtttcatcaagaccgttgattgaaaacattgtgccatcctgtcaactgcaattgttcgttcattgattaattgctccattctggggcacagtcgttgcaattgtagatttcgtgtgacagccaattcgttgggttgctttcgtgtggaactgtgaaaatgtgaaatactggattcttctgaaagaaaaatgctactactattcgcgaaatctggtggctgcaaatcgaggagaggacgacggccggcgacacctatctgcctcgcatcgagagccgcagcccatcgcgccggtgggcagaatctgcatccgcgatctcctcttcctcgtgggggtcttgacgatggcgatgagccgatccaggcaccggcaaaagtgggcggtgatggagcactcgagcagaggaagggggagagaagagggatgagagggggttgacccactgacatgtgggtcccactgttttagctttttatttgagtaccaggtggaacccacctattttgtttttactttttaaatttttaattctagcttctaatgccacgtcaacgtcatgt

SEQ ID NO: 21838 - DNA, 2866 bp, Oryza sativa
  ref <308>: DATABASE ACCESSION NUMBER: AK072070
  ref <309>: DATABASE ENTRY DATE: 2001-12-06
gtctttccatttcgccgcagcgatggctccggctccgtctccgactcctctccccctattcctcctcctcctcctcctcgtcggcgtcgccccgctcgccgcggcgcaggggcagaacatccagacgaggttcccgtccacccggacgccggccttcgccacgccgccgccgatcacctcgccgtctccgtcccccggcacgcctacggccaccccgtcgtcgtcgccgccgtcgtcgtcggggaagcggagcgacatcgccgtggccgtggtgagcacggcgctgagcagcttcgcggtgtcgggcctcgccttcttcctgttcctccggcacgggaagaagagggagctcaccgaagcgggcggggccgggcagcattatggtggagcgcagggcggcgcgctcaccgggaagcggccggagagggagccgaagcggccggcgcggggcaacatggtggacgagaacggcctcgacgcgatatactggcgggagttcgagaaggagggcgacggcgggagggggaggaagcccccggcgagccggcgtccaccgcagccgccgccgccccggccgtaccgcgcggagaggaggcaggatgcccacgagtcgtcggctccgtcgccgccgcggtcgaggaagaacaggatagatcaggagccgctcataccgaggggctccctcgactccgcgtccgctgagtttgacgagtcgctgtacgcgcccagcgccggctccacctcgtccttctctgtggccgccgccgaggcgtacgcgcggccaccgtcgacgccggcgatcaccgccgtcagctcggtaccccgctcgtccccatctccggcaccagcccctgccgcccgaccagcctcaccatctccatcgctgccactgccgcctggaagggaaagcccatcacgaccgcaatctatcgccgccgccgccgtcgcgtcacccgcgccgccgccaccgccaccgcccaaaccagcagccgcggcgccacccccaccgccgccgcctaaagccgcacctccgccaccacctcccaaaggcccgcctccgccgccacctgccgcctccaccgccgccgaagggaggcgcgtcgaggccgccggcggcgccgggcgtcccaaccggttccgcggatcagcaggcgaagctgaagccgctgcattgggacaaggtcaatgtggcggccaccgatcactccatggtgtgggacaatatcaccggcggctcattcaacttggatgaaggcatcatcgaggcactgtttggcaccgccgcggtaaaccgcaagacaaagcctgcagactccaaggatgcctctggtggcagcacctcagctggcctcggacgctcgaactcgccagagcaaatattcttgcttgagccacgcaagtcgcacaacatttccatcatcctccggtccctcaccgtggggcgagaggaaatcattgacgccctcctaaacggccataccgagctcagcacggaggtccttgagaagctgtctcggctcaacatctccaaggaagaggagaacacacttctgaagttctctgggaaccctgacaggcttgctccagcggagttcttcctactccggctcctccttgatgtgcccagcccatttgcacgcgtcaatgcactgcttttcaaggcaaactatgctgctgaggttgcacagctcaagcagtcactccggactcttgagatggcaagccaggagctgaggacaaaggggctgttcttcaaactgctcgaggctgtgctcaaggcaggcaatcggatgaatgctgggacagcacgcggtaatgcacaggccttcaaccttactgcactccgcaagctttctgatgtgaagagcacagacgggagcaccaccttgctccactttgtcattgaggaggttgtgcgttcagaggggaagcgtctagccatcaaccgcaactacagtcttcgacgctctggcagccttgccaagagcaccgatggtggcaacccagcagcaagctccacaagtcagggtccatcacgggaggagaggcaaaatgaatacctgaacctcgggctaccgattgttggaggtctcagcactgagtttgccaatgtgaagaaggcggcactggtggactatgacactgttgtcaacgagtgcgcaattctgggcaaccggctggcaggtaccaagaagctcttggagacctatggggacgatggattcgcaagagggttgcgaggatttgtgaaggctgcagaacaagaactgaatgaactaaaaggaaaccaggagaaagtgcttgaactggtgcagcggacaacggagtattaccatactggtgccaccaaggacaagaatgcacatcccctccagctgttcatcatagttagggacttcctggggatggttgatcaggcatgtgtagtcatcaagaggaaattgcagcagcaaaagaagccaacaccaccaccgtcatcatcacaaccggcggccccagcggccacaaccaagggggcagctgatgacgcaccagcaccggctcagaaaccaccggaagaggtagatagcaaaaggaagagggtcatgccaagattccccaacttgccggcacattttatgaaggacaatgcagactctgattcaagtagtgacgaggaatagaatgaatggagacgtgtaactgtaaatgatgattgtttgcattggttgttttttggaggtataggttagaagcagactgtacataatacattatttgtgttggttattttctccattgcttcatataagtagtataagaacgtggatagatttttgtttagaaacttgtacaaaatttgatacaaggatatcaagaatcgctt

SEQ ID NO: 21839 - DNA, 2201 bp, Oryza sativa
  ref <308>: DATABASE ACCESSION NUMBER: AK072071
  ref <309>: DATABASE ENTRY DATE: 2001-12-06
gggacgaccaactccgcggtggcggcgatggagggcgggaagccgacggtcatcaccaacgccgaggaccagcggacgacgccctccgtggtggcgtacaccaagggcggggagcggctggtcgggcagatcgccaagcggcaggccgtcgtcaacccggagaacaccttcttctccgtcaagcgcttcatcggccgcaagatggccgaggtcgacgacgaggccaagcaggtctcctaccacgtcgtccgcgacgacaacggcaacgtcaagctcgactgccccgccatcggcaagcagttcgccgccgaggagatttccgcgcaggtcttgaggaagttggtggacgatgcatctaagtttttgaatgacaaaattaccaaagcagtggttactgttcctgcatacttcaatgactcacagaggacagcaacaaaagatgctggacgtattgcaggattggaagttctccgcattataaatgagccgactgctgcatcccttgcttatggttttgagaagaaaaacaacgaaacgattcttgtgtttgacttgggaggcggtacctttgatgtctctgtattggaggttggagatggtgtgtttgaggtgctttccacatctggtgacacacaccttggtggcgatgacttcgataagaaagttgtggattggcttgctagcaactttaagaaagatgaaggcattgatcttctgaaagacaaacaagccctgcagcgactcactgaggcagcagagaaagcgaagatggaactgtctacgctgtctcagacaaacattagcttgcctttcataactgctactgctgatgggcctaaacacatcgagacaactctctccagagccaaatttgaggagctatgttcggacctcattgataggcttaaaactcctgtcactaatgccttgagagatgccaaactgtctgttgataacctggacgaagtgattcttgttggtggatccactcgtatcccttccgtgcaagagcttgtgaagaagatcactggcaaggatcccaatgtcacagtcaaccctgatgaggttgtttctcttggggcagctgtacagggtggagttttggccggagatgtgaaagatgtcgttcttcttgatgttactccattgtctcttggtctggagacgttgggtggagtgatgaccaagattattcccagaaacacaacactgcccacctcaaaatcagaggtattctccacagctgcagatggacagacaagtgttgagataaatgttcttcagggagagagagagtttgtccgggacaacaagtctcttggaagcttccgcttggatggaatccctcctgcaccacgtggtgttccacaaattgaagtcaagtttgatattgatgccaatggtattctctctgttgctgctattgataagggtactgggaagaaacaggatatcaccatcaccggcgctagtacactgccaaaggatgaggttgagagaatggtggaagaggctgacaagtttgctcaggaggacaaagagaaaagagatgccattgataccaaaaaccaggcagactctgtggtctaccagactgagaagcaactgaaggagctaggtgacaaggtacctgcacctgtgaaagagaaggtggatgcaaagctcaacgagctcaaagaggccattgcgggtggatcaacacagagcatgaaggatgccatggctgctttaaacgaggaagttatgcagatcggccaggccatgtacaaccagcagcctaatgctggtgctgctggacctactcctggtgccgatgctggaccgacaagctcaggcggtaagggaccgaatgatggagatgttattgatgcggatttcactgacagcaattgatagttctagcgattgaagattattgatggaaggatgatctgtggtggatggctgtgagggtctgatgggtgatggtataggaagaagggagtgaacaaattgttctttttgtttactatggatcccatgttcaataggctctttagtttgcaatttgatagcgtagggttttgccaacattttcctgtgatgttgaatgaaggattataaaaagtagccttcaaaaaaagaggaggcaaaggttttgatcgaagaagtagctgattgatatgaccttgttccttgaaaataaaaatatcattagttcc

SEQ ID NO: 21840 - DNA, 3357 bp, Oryza sativa
  ref <308>: DATABASE ACCESSION NUMBER: AK072072
  ref <309>: DATABASE ENTRY DATE: 2001-12-06
gcgtcaggccaacaagctcattccacccctctctcaggcgttaggcagcagcagcaggaaggcgggagaaggtagcagcaggagcagcaccggcgtgcggggcagcagcagcgccgccgcgccactcggcgcgctggtagcagccccgctgcgcgcacgcgaggccctcaggttcgtgggcttcctggaggagaggagctctgtgtgcgcaagctaggaggaagaaaagacggtgcgggaagaagcctggtccagttatgtgatttgggttgctaagagcacaagcgaggatatgttcccgttctttgcttgctgaaaacttgatggaataagagttgccgtgattgtggtgaacacgggcagcaaggagtgttagttggcatcgctctaggagatggatccattgaaaggggttgaggaatcatcgctggtcactaaaggcgagatgaaaagcctactacaagacttgatagctactgggatgatggggcctagaataggaggggcatcacctgaaataaagctagagcaaatgccgaatgaagttaagttggaggagagccaaaattacttgagctggtctggaaggacaagattgatgttgagggcaaaaggggtagaacactatttggaggaaacttgtattgaaccagatgacaagcttagtgtggactggaaggtgtggaattccaccaactctacggtggcaacatggttaatgacctcagtggctccatccattgcgaggatggtggagacaatttctaatgcatcaactgtgtggaagacattgagcaaaatgtactcaggggaagacaatgcaatgatgatggttgaggctcaagacaaggtggagaacttgaagcaagagggaagaactgttcaagaatatgctagtgagttgcaacaattatgggcagatttggatcactatgagagggggactgggaggaggattgggactggagtcaggcgcaatgggttgtggtacatcaataatgaagaagtaggattggctgcagttgcaggaaatgctgaggagattattttgcttcattgccggttaggacatccatcatttgataacgtaagtaagctatatccaattctctttaatggagtgaacaaaagtagacttgtctgtgacgcttgcgaatttggcaaacatacacggaccccatatgttgggagtggcctccgtagttatgaaccctttatattaatacattatgatgtttggggaccatggccagttactttagtgagtggatttaagtggtttgttttccttcattgattgttacactcgaatgacttggatttatgtacttaagcacaagaatgatgttcttcgatgcttccaagattttcataaattcaaatcagtttgatgcaaatgttcgaatcattcgaactgataatgggactgagtatatcaacaacgaatttgtctcttatgtcttggatcaagggatcatacatcaaaccacttgtcctggaacccctcctcaaaatggtgtagctgagaggaagaaccgacatttgttggaggtggcacgttcacttatgtttcagatgaatgtacccaaatacttgtggaagtgatgactgctgcatatcttattaatcgcatatcttgtggagatgacaaggaagaatgatggggaccaaattagggaatttgcacgggagcaagttgaagagtctgaacaacctgagcatccagtccaagaatcctccccgtgcctctctcctccaactcccttgcccctcattgaaacgtctggtgatgttccccctatacttgaacaagtagaattacctcttacacaacgtagggaaactagaagtaatgctgggaaacctcctatacgtcttggctttgaacatattagctctaagcatgacattgcaaattatatctcatactcccacatttcacctgcatacaaaactttcattgcatcattacaagcagtgcctgttccgaaagactggagatgtgccaagcaagatcctaggtggaaagatgcaatgaaggaggagcttcatgcccttcaggagaacaagtcatgggaacttgtgagacttccaccaggaaaaagagcagtaagatgtaagtgagtatttacagtaaagcaaactcctgaagggaaggtggatagatacaaagcaagatcaattgcaaaaggttatagtcaaacttatgggattgactatgatgaaacatttgctcctgtggccaagatgggtatagtgagagctttggtgtcttctgcagttaactttggatggcctctacatcagctggatgtgaaaaatgctttcctttatggtgatctacaagaggtctatatggagattccccttggatttggaaataaccaaacggtaggaaaggtatgtaaactcaagagatcattatatggtttgaagcagtctcacgtgcatggtttgatagatttaggcgtgcactatgtgagatgggatattcccaatgcaatggagatcacacggttttttatacacataagggttcatgtattaccatcttggcagtgtatgctgatgatatagtgatcaccggtgatgatgggggaagaaattaggtgcttgaaggaaatgtttggaaagacctttgaggtgaaggatcttggacctcttcgatacttccttgggattgagattgctcggtcgtcaaagggaatcgttctctcccaagggaaatatatccttgatctattggcagaaacatgaatgcttggatgtcgttcaagtgctacaccaattgataaaaatcatcaactatgtgctcagacaggtgatccagttgacaaggaggcttgtaggacgcttgatatatctgtgccatacaagacctgatatctcttatgtagtgagtgtggtaaatagatatatgcatgatcctaggtctggtcttttggaggcagctcatagaatcctaagatacttgaagggatggcactatggtgctccattgtgataataaatcagttatcagcattgcaaacaatccggttcagcatgatcacataaagcatatcgaaattgataggttgttcatcaaagagaaaattgatagtggagtgcttggcctagagtatactaaatcttgtgaacaactagctgattgtctaacaaagggattaggcccaagtgaatgagttattttgtaacaagatgggcatgatcgatatcttttgcccatcttgagggggagtgttggtgtaatatgcaactttatcagggacctgcttgtaattctgttaaataaatatatgcatgtgtgggggtactggtcagtggtgaggccaatcattccccaattcccaaatc

SEQ ID NO: 21841 - DNA, 1969 bp, Oryza sativa
  ref <308>: DATABASE ACCESSION NUMBER: AK072073
  ref <309>: DATABASE ENTRY DATE: 2001-12-06
gaaaaaaaaaaaaaaaatcgattttttgttctcctcttgatggttgctgcgaccttcgatgtccctatgcggaatgaaatctcctgctggggcggctaaaaatcggagattttctgtctttttgatccgtctttagtggagctttttgagcctgatttatgcgatgggcttcttggcgtgcttgttcccatgtcctcaagaggtgagagatgaggatgaggaaccaagaagcggccagagagtcagctcagtggaatattcaaagtcgtcagagagttgcccactgaagactgaagggtcgatagatatggttggaattcggcgaaataaggggcatggtgaagcaacgatcttcactttgcgcgagcttgctgatgctaccaacaacttcagcacggagtgccttttgggccgaggaggattcggcagtgtgtataaagcatttctcaatgatagacaggttgttgcagttaaacagcttgatctaaatgggcttcagggaaacagagaattccttgtggaggttctcatgctcagtctcttgcatcatcctaatttagtcaagttgtttggttactgtgtggatggagatcagcgcctgcttatttatgaatatatgccattgggatcactagaagaccgccttcacgatctcagacccggccaagaaccactagattggacaacacggatgaagattgctgctgatgcagctgctggtttggagtatctgcatgatgaggtcattccagcagttatttaccgggatattaaaccgtcaaacattcttcttggcgaagggtataatgcaaagttgtctgactttggacttgctaaacttggtcctgttggtgataagactcatgtgacaactcgtgtcatggggacacatggttattgtgctcctgagtacctctcgactggaaagcttacgatcaaatctgacatttatagttttggtgtggtctttcttgagctaattactggacgaagagcgcttgacagcaatcggccacctgatgaacaagacttggttgcatgggctcgtccattgttcaaagaccaaaggaaatttccaaagatggcggacccctcattacacggccacttcccgaaaaggggtctgttccaggctttggctattgcagcaatgtgtctgcaggagaaagcgaagaaccgcccttccattagggaggttgctgttgctctctcttatttagcatcacaaacacatgaaagtcagaacactgctgctcgccataccctgcctggcccttctgtaccaagagtgctggataatcagattaaccaagacacttccttgcccagtcaacatggagttcatatgccaccgcttgccgggacggatcacatggtacaagaagtcaaggagaattgccggagcagttcgcatcgaccgggaaggggcagagttaccccgaacggcgctgatagagagcgtgcgcttgcagaggcaaatgtatgggtcgaggcttggagacgtcaagagaagacgagcaaaatgcggtaatcaacgaaaagcttctcgctgctagcttcatttgatcataggaacagaattgacaaggtatgccacagattgcatacgttttgaagaaaccgcggaccgaataataactgttagaagacgatagcgaataataatgatcagtgagttcttctgtggacctacaccagagtgagcgcttgggagatttcaccggtgaagtctactaaatttacatccagacttgtttcactacatacatggattcttatttctcatcatatagataatttagcttctataggttaaagtcgcaggaggggatatgtacatgtaaataaccccctcataacagaagtggcagatgcagagcatacatatatttcttttctgtagttggatgtctcttgtgaatccatgtacatgagctggtaccataagtgctacagcttatacattttt

SEQ ID NO: 21842 - DNA, 1386 bp, Oryza sativa
  ref <308>: DATABASE ACCESSION NUMBER: AK099239
  ref <309>: DATABASE ENTRY DATE: 2002-08-28
gctcctcctacctagcttattgttgttggtagctagcgagctcactcctcactcactctctgcccttcctttcctaccatacctctcaattattcctttcctaccatacccctcaattattagtaagatcgattattagtcccagttagttgctagctacaaggaattgaagcaacaagttgtagcagattgagagagagttgggaagaattacacaagaaatttagagaaatagtactagctagctagcaagaatatagatatataatgtcgatcaagcactgcgagcaacacaaggattgcgagcggcagcgcctgtaccggcgttgctgcgcggccatcttcggcatccttctcctcctcctcctcatcgtcctcatcgtctggctcatcctccgccccaccaagcctcgcttctacctcaacgacctcaccgtcgtctgcctcaacgtcaccaccggtggttcctacgccggcgccaccgcctcctccggctacttctccttcctcaccgtcaccatgcagaccaccctcgccgcccgcaacggcaacgagcgcgtgggcatctactacgaccgcgccgacgtgtacgccgagtacaagggcctccgcatcaccgtgccgacgtcgctgccgccggtgtaccagggccacccggacctcaccgtctggtcccctttcctctccggcaacaacgtccagctcccgccctacctcgccgtctccatcacccaggacgagaccgccggctacctgctcgtcaccatccgcgtcgacggctggatccgctacaaggccggcgccttcatcaccggacactaccacctccgcgtcaggtgccccgccctgctcatcgtcaacgacggccggggaagctacggctccaactccggcggcggcaacggctacttcaggttccagcgagccgccgcctgcgtcgtcgacgtctgatccatccatccatctcctcatcctcctctcatgcatccaacaaatcatatcatccttaattaattctcctccttccatatataattgcttgcttaattgatcgatctacattctacaagcacagccctgatgaagaagctatataattaaaagctcagctcaactgatcgagtgaggatcggagtaatcttgcatatatgcctgccaccagtggttttatgtatttacagtacgaattaatttgacctttttcttacttaattttcatgcctgtgttttttttggtactacgtacagtgccatgcttgtggctagctgcatggttcaggtgtacagctacttgtagtaataattcgcatatagagaggggataattaagcaattgctacaatcttgtaattactactagaatatataataattgtacttatcttc

SEQ ID NO: 21843 - DNA, 2781 bp, Oryza sativa
  ref <308>: DATABASE ACCESSION NUMBER: AK072074
  ref <309>: DATABASE ENTRY DATE: 2001-12-06
gaactatttattggtccttctggatctcggagaaaccctccattcgtttgctcgtctctgaccaccattggttcctgaaattgagtcatggctgccaagctagctcgcctccacagtctccgcgaacgcctcggtgccaccttctcgtctcatcccaatgagttgattgcactcttctctaggtatgttaaccagggaaagggaatgctccagcgtcaccagctgcttgcggagttcgatgccttgatcgaagctgacaaagagaaatatgctccctttgaagacattctccgggctgctcaggaagccattgtgctgccgccctgggttgcactggccatcaggccaaggcctggtgtctgggactacattcgggtgaatgtaagtgagttggcagtggaagagctgagtgtttctgagtacttggcattcaaggaacagcttgttgatggacacaccaacagcaactttgttcttgagcttgattttgagcccttcaatgcctccttcccgcgcccgtccatgtccaagtccatcggaaatggggtgcagttccttaaccgtcacctgtcgtccaagttgttccaggacaaagagagcctctaccccttgctgaacttcctgaaagcccataaccacaagggcacgacaatgatgctgaatgacagaattcagagccttcgtgggctccaatcatcccttagaaaggcagaagaatatctgatgggcattcctcaagacacgccctactcggagttcaaccacaggttccaagagctcggtttggagaagggttggggtgactgtgcaaagcgtgtgcttgacaccatccacttgcttcttgaccttcttgaggcccctgatccggccaacttggagaagttccttggaactattccaatgatgttcaatgttgttatcctgtctccgcatggatactttgcccaatccaatgtgttgggataccctgatactggtggtcaggttgtgtacattttggaccaagtccgcgctttggagaatgagatgcttttgaggatcaagcagcaaggccttgatatcacacctaagatcctcattgtaaccaggctgttgcctgatgctgttggtactacatgcggccagcgtgtggagaaggttattggaactgagcacactgacattcttcgtgttccattcaggagtgagaatggtatcctccgcaagtggatctcccgttttgatgtctggccattcctggaaacatacactgaggatgttgcaaacgaaattatgagggaaatgcaagccaaacctgatctcatcattggcaattacagtgatggaaaccttgttgccactctgctggctcacaaattaggagttacccagtgtaccattgctcatgccttggagaaaaccaaataccccaactcagacatatacttggacaagtttgacagccagtaccacttctcatgccaattcactgctgatcttatcgccatgaatcacactgatttcatcatcaccagtacattccaagaaattgctggaagcaaggacactgtggggcagtatgaatcacacattgcattcacccttcctgggctttaccgagttgtgcatggcatagatgtttttgatcccaagttcaacattgtctctcctggagctgacatgagtgtctacttcccgtacaccgaggctgacaagaggctcactgctttccaccctgaaattgaggagcttctctacagtgaagtcgagaacgatgaacacaagtttgtattgaaggacaagaacaagccaatcatcttctccatggctcgtcttggccgagtgaagaacatgacaggtctggttgagatgtatggtaagaatgcacatctcagggatttggcaaaccttgtgattgtttgtggtgaccacggcaatcagtccaaggacagggaggagcaggctgagttcaagaagatgtacggtctcattgaccagtacaagttgaaggggcatatccgctggatctcagctcagatgaaccgtgttcgtaccggggagatgtaccgatacatttgtgacaccaagggagtctttgtccagcctgcattctatgaagcgtttggtctgactgtcatcgaagccatgacatgtggtttgccaacaatcgcaacatgccatggtggccctgctgagattattgttgatggggtgtctggtctgcacattgatccttaccacagtgacaaggctgctgatatcttggtcaacttctttgagaagtgcaagcaggattcaacctactgggacaatatttcacagggaggtctgcagaggatttacgagaagtacacctggaagctgtactctgagaggctgatgaccttgactggtgtatacggattctggaagtacgtaagcaaccttgagaggcgcgagactcgccgttacattgagatgttctatgctctgaaataccgcagcctggccagcgccgtcccattggctgtcgatggagagagcacatccaagtaatggaggggaaaatatgcatcttcagcaggagaagccgtcagctgcattcgaatttgataattttctgtagttgtcatttggcatccatgtttgccatggatgtgtactatgtctaaggtttcagtacttttgcgagattttgggcagtgcttgcctcaaataaacgccggttcctggtgtttatcgttcagaattcaatgcaatgttttattgccgcgcttcctcaatctgtcatgttgaatgaccactccctagtgccctactgtt

SEQ ID NO: 21844 - DNA, 1365 bp, Oryza sativa
  ref <308>: DATABASE ACCESSION NUMBER: AK099240
  ref <309>: DATABASE ENTRY DATE: 2002-08-28
gatctgttccaaaccagtggaaagctagggtttcgccgactcgcgagtggagggcgctgctcgtcgccaggctcgtcgcgccgtcctcgccggcgggaaggccagtcctccgtcagcatcctctcttccgttggtcatcctccctctctttcgccagtcgccatcgctctcttccactggttcgctctctccgtcaagccgtttggttccgccggctctctctgccacgcccctctctttcgtcgactctctccgttgagctctctgagcaccttcacttaactggggccgtattgccaattcaatgatgggatcggcacaagattgggcatttggatggcagccgtggacgggaccggcactggaggacctgctcccacaactctcccatgaggagcaactacgattgcacaaccacttgcgtgagcacgagcgtatcctcaagtggcacaacaagaattctcctccaatatcttctctgcactcagaaggggagcgtgacttcttcatcattatccatgtccgctacgctctccaccattacaatgccaaacacccagatgaggagtttgatgctgtgaagcctctgatggaatccagtgtacgtttcaggggccaggtgtggttccacatcaacttctgggctcgctcccgcaagagcaaaaagatcaagcgcttctttgctgaggtgcactacaagcctcccagcagcagcagctctgtctgctcttacctgccatttccagtcccaggagctgagaggccacccagcagcagctccgtctcctcggatctgctacttccactcccaattcctgtcgttgaagcatgcaccatcattgaagagcctcttgggcagtacaggaagagctgcgcgttttgtcgtggtcacttagacattttacaccccatgggtcgtaaatttgtttgtggaaacgacaaggaccggtttgagcaacaactcttgccgtgcgggtctatagggcttgagatgccattcacttgccgcctgggtccggcctctgtcaacagtagtcatggggaaaaagaagactagggggaataatgaagtggccccttggacgcccttttgctcgcatcgtttgtgccaatcaagtctggtgataacagaaattgaattgtcttgtactaccttcgtcctcaaaatataagaaaaactaaatgggacatatcctactattatgaacctggataaaaatgattctactcagattcaatagtttcttatattttcaacggagggagggagtaaaacgttagcagtcctcttatcttgtgcagaatatgattgtacactgttcagaactcttgagattcagaatattgtttgcctgagggaggttg

SEQ ID NO: 21845 - DNA, 1917 bp, Oryza sativa
  ref <308>: DATABASE ACCESSION NUMBER: AK072075
  ref <309>: DATABASE ENTRY DATE: 2001-12-06
gctctttccactcccgcagtcacaccctaagcccctcctcgcatcccaaaatggcggcggccacctccacttcctccaccgcgctcgcccaccccaaaaccctaaaccccgccgccgccaaggtctcgtcgccgcaggtgatcggggccaccgtgccgtcgctggacttcgagacatccgtcttcaagaaggagaaggtgtctctagctggccatgacgagtatattgtgaggggcgggaggaatctgttcccgctgctgccggaggcgttcaaggggatcaagcagatcggcgtaatcggatggggttctcagggtcctgcacaagctcagaacctgagggactcacttgctgaggcaaaatcagacatcgttgttaagattggtctccggaaaggttctaaatcttttgaagaagcacgcgcagctggatttactgaagagagtgggacacttggagatatatgggagactatctcaagtagcgatcttttgttgttgttgatatcagatgctgctcaggcggataactatgaggaaattttctcacacatgaaacccaacagtattcttggattgtcacatggatttctccttggacatttgcaatctgttggccttgatttccctaaaaacatcagtgttgttgctgtgtgtcccaagggaatgggcccatcagttagaaggctttatgttcagggaaaagaagtaaacggtgctggtatcaactccagctttgctgtacaccaggatgttgatggaagagcaacagatgtcgctcttggatggtcagttgctctaggttctcctttcacatttgctactactctagagcaggagtaccgaagcgatatttttggcgagcgaggtattttgcttggggctgtacatggtattgtggaggctcttttcaggagatacacagagcatgggttggatgaggactcagcatacaagaacactgttgagtgcatcactggaatcatctctaaaactatttcgaaaaaggggatgcttgaagtgtacaattcattgacagaagaaggaaagaagcaatttatcgaggcttacagtgcagcatattatccatgcatggatatactatatgaatgctatgaagatgtttcttctggaagtgaaattagaagtgttgttttggctggaaggagattttatgaaaaggaaggacttcctgctttcccgatgggcaacattgatcaaacacgtatgtggaaggtgggtgaaagggtgcggtcaacacggccagcaggtgatcttggcccattacatcctttcactgctggagtgtatgttgcacttatgatggcacagattgaagtccttagaaagaagggccactcttactcggagatcatcaacgagagtttgatcgagtctgtggattccctgaacccattcatgcacgctcgtggggtggccttcatggttgataactgctccacaacagcccggttgggatcaaggaaatgggcgccacgcttcgactacatcttgacccaacaagcttttgtgactgttgacaagaatgctccagttaatcaagacctcatcagcaatttcttctccgatcccgtccatagtgccattgaagtctgtgctcagttgaggcccaccgttgacatttcagtgcctgctgatgcagactttgtgcgtccagagctgcgacaatcttcgtgaagtttttgccaactccaggggcacctcataaactatgtcagtatctgacggtttcaactctcaaagctatgtatcactatttgagaacctaaatgtaaacttttggagtgtaggattgtcgtttggttgtcactggactagtgctggtgtttggcatgaataaaaatagtggtttaataaatgccgttcccttagagcagcagaggtggctgctccctct

SEQ ID NO: 21846 - DNA, 1646 bp, Oryza sativa
  ref <308>: DATABASE ACCESSION NUMBER: AK072076
  ref <309>: DATABASE ENTRY DATE: 2001-12-06
gacttctctgtatatatatatgcagctgctgctcatcgccaaatcgacggcaacaactaacgattgatcgccatcaagtatagctatagctagctagcttgtgaattcatcaatggagatgacgacgacgacggagaagtgcatcagcagcagcagcagcgtccatggcggcaacaatcgtcgagaagaataccccaaggagggagccgacgacgacgtcgaggcaggcgtcctcggccgtgacggcgaggctgcggcgacgacgacgcggcagcgcctcgtgtcgctcgacgtcttcaggggaatcaccgtcgcgcttatgatcctcgtggatgatgttggtggcattgtcccggcgatcagccactctccatgggatggcgtgacgctagcggactttgtcttccccttcttcctcttcatcgttggggtctccttagcttttgcctataagaaagtgccagacaaaatgttagcaaccaaaaaggccatgcttagggctgtaaaactcttcattgtgggccttatattgcaaggtggcttcttccatggcatccatgaacttacctatggtgtcgatattcgcaaaattcggttaatgggtgtactacagaggattgcaatagcctacttagtggtggcgctttgcgaaatctggctaaggagggttagtagtggcggtaacattggctctggctctatgttaataacaagataccatcatcagatgtttgtgggtttggttctggtggtcacgtacctggtgattttgtatggtttgcacgtgccagattgggagtatgaggtcacatctccggactcaactgtgaagcattttctggtgaaatgtggagtgaaaggagatacagggccaggttgcaatgctgttggcatgattgatcggtctgttcttggaatccagcatctctatgcacatcctgtttatctgaaaacagagcaatgcagcatggcctctccacgcaacggccctcttccacctaatgccccatcatggtgtgaagctccatttgatcctgaagggcttcttagctcgttgatggcgattgtgacatgcttaatcggtctccagattggccatgtaattgtccatttcaagaagcacaatgagaggattaagcgatggtcgattctatcattgtgcttgctcactcttggcttctctcttcatctcttcggtctgcacatgaacaaatcactgtacagcctgagctacacctgtgtcaccactggcactgctggtttattcttcgtggctatctacctgctggtggatgtgaaagggtacaagaggccagttcttcccatggagtggatgggcaagcatgctctgatgatctttgttctcgtagcatgcaacgttatcccagtactggttcagggattctactggaaagagcccagcaacaaccttctgaaactcattggaataggaggctgatcgatgaatatatatcttccggaagttcatgagaggggataattaagctgcaagcacaacatcatcatttgcagtgttaggtagtctactgttgatttagtttttttttaaaaaaaatggtctacggaatggcatagaaatggagcaaggccaaaaaaatcaataaagtcaaccagctgcagatact

SEQ ID NO: 21847 - DNA, 1822 bp, Oryza sativa
  ref <308>: DATABASE ACCESSION NUMBER: AK072077
  ref <309>: DATABASE ENTRY DATE: 2001-12-06
gatctatttatctctgagtttttattttcttgggggtcctgttgcaggttggcgttcaggtgggacgagctcgggagggagatcatggggattgcggtgcccggcgcgctcgccctcatggctgacccggtcgcctcgctcgtcgacaccgccttcattggccacataggcccagttgaacttgcagctgttggtgtatctattgccgtgtttaatcaagtatcaaggattgcaatatttccccttgtcagtgtcacgacatcatttgttgcggaggaagatgctacatccagtgacagagaaaaatatgaaataaatggcgagaatgaattcaatgtttcagacagtgaaatggaagagctggtttctcatgaagaggctagtgctgctcccagtaagtcgtctttcgaaactgactcaagtgatgtcaaaattgaacataagcggaaaaacattccatcggtgtctacagcattactacttggtggggtgctcggccttttacaagcactgcttcttgttatttgcgcaaaacctctcttaggctacatgggtgtgaaacagggctctgcaatgttgatgccagcactaaagtacttggtagtcagatctcttggtgctcctgctgtgcttttatctctggcaatgcaaggggtatttcgtggacttaaagatacaaagacacctctttatgcaactgtggctggagatgcaaccaacatagttttggatccaatatttatgtttgtcttccagtatggtgtcagtggtgcagcaattgctcatgttatatcacatgtatggtggaaaattctgcagatatttcattgcatccattctcttatggaggttaaggctacatgttgacctacttccacccagctttaaacatatgcagttcagtcgattccttaaaaacggtttcctattacttgccagagttattgctgcaacatgctgcgtgacactatctgcatcaatggctgcacggctaggttcagttccaatggctgcatttcagatttgcttgcagatctggctggcttcgtctcttcttgctgatggattggcttttgcaggacaggctatacttgcaagtgcatttgctcgtcaagaccattctaaggccgcagccacagcttctcgtatattgcagctgggattggttttaggacttctcctaagcatttttcttggcattggcctccgtttaggatcaaggttatttactgatgaccaggatgttctacatcatatttacctaggcataccgtttgtctctctgactcaaccaatcaatgcgttagcttttgtttttgatggtatcaattatggagcatcagattttggatatgctgcttattcaatgattcttgtggcaattgtcagcatcatcttcatagtcacactagcaagttacaatggttttgtcggaatttggatagctttgacagtctacatgagcctccgaatgcttgcaggattcttaaggatagggactgcacgaggaccatggactttctatgcagctcaacgcatgcattctcatgaggtggttggactttgttgaacaatactataggaagacaccatggatactttgtaaggttttgcaggtttggtgggaatggaggttgtttgaacaaaagaaaatattcaactgtcatgtacatagataatcacacatgttactactattctaatagattctcccctgtcgtgtatgttgtatttgcccatgtatagttcagtatgttcggctggctattttgtaacaagtttggatataaagtcacgtagcataagatgtttgcacaccgtg

SEQ ID NO: 21848 - DNA, 1584 bp, Oryza sativa
  ref <308>: DATABASE ACCESSION NUMBER: AK072078
  ref <309>: DATABASE ENTRY DATE: 2001-12-06
gattcggaacagggaagccgccgcatccccaaattcgccggcttcctccctcccgagctaggtttccgtctcgccgccgccgccgccgccgcccgcctccttttactttttccgcaccccaattcgctccgctgcccacctcctttcctttttccgctgccagccgactagggtttccgcctcctcgccggacggacgccgcgaaccccccccacacggccacacctcgcgccggctccctcctcgcgttccgcttccctcgcattacaagcggcgccggtcccggatggcggaagatgccaatgccggtcgcaagagctctactcatttagcccaatctcctgaattgcacgcatctcttgaatcgcacgagctgtacaacatacctattacgaggggtgaaggaacattaataactgaactgcgtaaggttatggaggaactacgtgtgtcttattatgctgacacagatgaagaaactcgggagcaactgaaacagttttgggatgatgaattcaatgcaatatcatctggagaaacaactattgagagagatctaaagtggatgcggaaggaggttattgaggcattcgagacatacagtgaggctaatgtagttgattatgagcttgaagatctttctcgtcagtgcttgatttttgatgattgtggtcagccataccatcattataattttacaatgaagtctaagcgtcctgattctgatttggagtctagtactaattgtcctgattctgatttggagtctagtactaatttggagagttgcatttctcgtcactattttgctgaagttaaacttatggatggaaagaaacattatttttgttgtccattggagtcgtttgacaatggtcattgtcatggatgccggaattctggcattgatctgaagcatccttcaaacggtggttatgaggagggcaacgcatactctggactctcttttgatgatgatgaattcgatgcaatctctgaagaaacaactaaggagaaaggtatagagtggatgcgggagggggttattgaggcattcgagacatacagtaatgctaatgtagttgattatgagcttgaagatctttctcgtcagtgcttgatttttgatgattgtggtcagccataccatcattataatttcacaatgaagtctaagtgtcctaattctgatttggagtctagtactaatgtggagagttgcatttctcgtcactattttgctgaagttaaacttatggacggagagaaacattatttttgttgtccattggagtcgtttgacaatggtcattgtcatggatgccggaattctggcattgatctgaagcatccttcaaacggtggttatgaggagggcaacgcagactctggattctcttttgatccaatctaattagatctatagactatagagttgatcatactggatgggtagcgttgctgtgggataattgtctaataaaacagtaaatatgagttgtaaaaaaaatcttacttattgtacgattttattttgtgtggttatatattttttaccttgatcaattattcatattcaaagat

SEQ ID NO: 21849 - DNA, 2880 bp, Oryza sativa
  ref <308>: DATABASE ACCESSION NUMBER: AK072079
  ref <309>: DATABASE ENTRY DATE: 2001-12-06
gtacccctcccaaatcccttctctctaccctattccccacctccgcctccgccgtaatcccacctccccggccaccgccgccgccgtcactccggccaccgcaccgtaactcccactgcggaagcagcccaggaggtaggcggtgaagcggggggtgggaggttttagactagacggcgcgccgctcgccggcgaggtcgcccagccccatgccacccgcgcgcgtcgaccggtcggagatgaggcagaacacaagtcaccaaggttccaatgatcccagagtacaaaaggaaaggcaagcagaatgggccagacctggaagagtttttaataggaacactaacaaaggaggttactttcggaattcattgcctggagtcactagggagtttcgtgttgtgaaagacaatcgacagaaggtagttggtgagactataccaggatcatttcataatggagtcccaagcaatgaacagatcgcttccaatattggagacaaaagctcaactgaaaagttacctgcacaacgccatccggttactcaaaattctaatggacgtggggtagctcaagctgataatggacgcaaagaagtcaagccttctaatgaccaaacagtgggacaatctgatgggatgattacaacaatggttggttcacatgcagttctagcaaagggtaatcagaacagagtgcttgctgtgccatcaggaacaaataattttactggtgaactttgctgctcttcgtcagatccaatacatgtaccctctcctggttctaaatcagctgggacttttggagcaataaagcgtgaggttggagtagttggtgctaggcaacggccatctgataatacagcaacaaatacatccacttcaaacagttcagttaaggtgccaacaagtacagcaacaaaagagaatgcttcaaatggacagcaatctagatcctctggtgtatcatcgaaaaactcccgtcctagttcatctacacacttgagcagtagaccatcttcttcgagtcaatatcattctaagccaaatactcctgttggtcatccaaaagtgaacccacaattggagtggaaacccaaatcagtaagccccagtcctgccaatcatgcagataatgtggtacattctagtgctgcatcatctgttgatggtaatcaggcacacatggctggtttgcctaagaagctttcacaaactaatgtttctgaagatgagcatgtcatcatacctgcacacctcagggtaccagactcagaaagaacacatcttatatttggtaattttgaatgtgatgttgagtcgaaggcttttacattagctcctgatgcttcaactaacagagagtttaatgcccattcttcttcaagatcaactgatgatgtgcctcctactgaccagacggatcttgttggctcttgtgtcatgcttccgaaatcagattcctttgtttcagtttccgaatatcagcacccattgactgaggacatggaggtcttgagtccaggtgtttttggagagcataggacaaatgatatgatttcaacccaggtctcacattcttcacctcaaccccagcatcaggacaattcagcagtgcatgactttaaggaatatgagccagattctaggtatgagatgccatttatcactaaagctgttgatagtgaggcgacccaaaatataccttatccgtctgaggtgatgggcttgcatgctgcaaatttcaatcagttatctgttactgcagcaactcagcacccagtgcctcaaatgtaccacatgcatgtatcgcaatatccaaactgcttgccatatcgacatgttttctctccatactatgtgcctccagtggctgttcaaaactattcaagcaatccagcatttacacaattgccaagtgccagcagctatttggtaatgccaaacggaacgtcacagctagcacccaatggcatgaaatatggaccacctcatcagtgtaagcaaatgttccctggtggccctgctggatacggtggttttacaaatcagaatggttacccagtcaatactggtgtaattggtggcactggtagtgtcgaagatgccaatatgagtaaatataaggacaacaatctttacacactcaaccctcaggctgaaacagcagatgtgtggattcaggctcctacagatattcccgtcatgccgtcaacaccattctacaacatgatgggccaaccaatgtctccccatacagcatacttgccaccgcacaatggtcatgcccctttcagcccagttcaacaccctgctcacctgcagttcccagccatgccccacggactgcagccgacaacgatgaccatggtgcagaacccacaacccatggtgcatcagccagcctgtccgccgttggctggaaatatcggcattgatatggcagccatggcttctggagctcaggttggagcatttcagcaaaaccaactcagccatctcggctgggctcctcccagttttttatgatgatttggatggcagtgctctcatgagacgacaagtgagctggtttcgtatcgacaagaaaaagaaaagaaaagaactgattgaagagctatgctctaatgcaagtaactcatgatacttgccaccttttgtttatgatgcagggaaaaacatgttagtattccagttcatcttgcaccgcccaaagcgtgtcctgcattggaaacaccaattttgactgccagtttgctatcttatttatttctggttttatagtatacatcagttcgatcttaacttttctgatcgatgaaatgtgtgctccgaaatgctttatgagttcaactcaaatcgcatgataattccgctgttcccc

SEQ ID NO: 21850 - DNA, 1202 bp, Oryza sativa
  ref <308>: DATABASE ACCESSION NUMBER: AK072080
  ref <309>: DATABASE ENTRY DATE: 2001-12-06
gtgtgggacgtgctgagcaacgaggaggtggtgtccatcgtgtgcgcgacgccgcggaagcagcacgcgtcgaaggcggtggtggaggccgccgtgcagcggtggcgggccaagttcccgacgtccagggtggacgactgctccgccgtctgcctcttcctccacgaccacaccctcggcacggccgccgccgcctccgccgcagccgccgcggccgccagaaaggcgtgcgccagcgcgttcgccgccatggacggcgagctcaagctccagccgaacctcgactgcgcgttcagcggcacgacggcggtgtgcgccatcaagcagggcagggacctcatcatcgccaacctcggcgactcgagggcggtgctcgccaccatgtcggacaccggctacctccaggcggtgcagctgacggtggaccacaagccgagcgtgccggaggaggcggcgaggatcaagcggagcggggggagggtgttcgggctgaaggacgagccgggggtgatgcgggtgtggctccccggcgagaactcgccggggctcgccatggcgaggtcgctgggcgacatgaggctgaagcggcacggcgtgatcccggcgccggaggtgacgtcgcggcgcgtgacgggcgccgacctgttcatggtgctcgccacggacggggtgtgggacgtgctgagcaacgaggaggtggtgtccatcgtgtgcgacgccgcggaagcagcacgcacgccgccggcgagctgaggacacaaagaagctctcgctccggcgagctcgatattgtccgtgtttttgcagtttttgttgatcttgatgtgctgcaaatacctacaacctccgtcccataaaaaaccaaatcctagcaatggacctggatatatgtgtgtccagattcatcgctggaatttgactcttttttttttggacagagagagtatgaattagtagataaatatagtctattgtaacatagtttagagaagatgggaaaaaaagagaggcaattgcgaaaatgcaaatgttgccaagaaaagagagggaaaaaagaagctgtttttacttttgatgatcatagtgagggggagatattgtaatggctgaagaatggcaatcagccaatctgatgttgtttgtgagataccaattgcttgttggcaatttggaactttggaatgacattgtaaatacctcgc

SEQ ID NO: 21851 - DNA, 1683 bp, Oryza sativa
  ref <308>: DATABASE ACCESSION NUMBER: AK072081
  ref <309>: DATABASE ENTRY DATE: 2001-12-06
ggcctcacctcacgaaaccggcaatggcggccgccggagcatcggctctccggccacacctcgcccttctccccgccggcggcggtggaggcggaggcggcggaacccgtagctatgccctccaagcgctatccttcgtctcgcccctcctcactcattgcggccgacgacgccgctgcgtgctccgctccaaggcctcttcgtctccgtctcccccgccatcgccggggaaggaggcggtggctgtcccgacggcggagtcgtgcgtcaacctgggactcgagctcttctccaagggcagggtgaaggatgctcttgaacaatttgagaatgccctagagctgaatccaaatcctgttgaagcccaagcagcactatacaataaagcatgctgccatgcatttagggaagaaagcaacaaagctgcagattgcttaaggacagctctgcgagattataatctcaagtttggtactatacttaatgatcctgacttggcaccgttcagggcatcaccggaattcaaggaacttcaagaagaggcattgcgtggtggagaagatattggttctgggttccgaagagacctgaaactcattagtgaagtacaagcaccatttcgtggtgtccgaaggttcttttatgtggcgttaactgcagcagctggaatttcaacattctttaccattcctagacttatacttgcagttcaaggtggcgatggtgcccctgatctgctggaaactgttgggaatgctgccatcaatattggaggtattgttgtgctcgtggctttgtatttctgggaaaacaagaaagaagagcagcagatcacacaaatttctcgcaatgaaaccctttcaaggttacctgtccgcctgtcaaccaatcgcattattgagcttgtgcaactccgggacattactaggccagttatactggcaggttcaaaagcatccattactcgagcaatgcaaagagctgagagatatcggactgaactgctgaaacgaggtgttcttctaattcctgtgatctttggtgcttctcagaaagcccaaagtaagccaagaggctttggaagttcaagatctgctgcatcagctccttcagttggggatgactttgagaagcgtactgaatctattgcagcgaaatcacggttaaaagctgaagagcgatttaaggctgatattgtctctcctgaacaatgggaaagttggatacgtgaccagcaagagtctgaaggtgtcactcccggtgaagatgtctatataatcctccgattggatggtcgtgtcagaagatctggaagaggcatgccaaattggaacgacatattgcaggaacttccacgacttgaagaactgctgagcaaacttgaacgttgatgaaggtgtgtatacaactgcagtttgatcatccatatgtttctccattgtattattaattccctaatctatgtatagaccataccaatgtaattttgagggaaaattttgtttatgccactaatatatgaattcccaacttctgacgtactccactagttactgtgtgacttctcgtttatgtcactactatcaagccacataccattttttttcctgttttgctcccattctgtcaatttggactgtaagagaaaacattgcaaaatgacagatatatcttccctgtgtc

SEQ ID NO: 21852 - DNA, 3088 bp, Oryza sativa
  ref <308>: DATABASE ACCESSION NUMBER: AK072082
  ref <309>: DATABASE ENTRY DATE: 2001-12-06
tacgggcgagaggataaaatagggagaaaaaggtcgcgaaaacagcgtcaaccctgctcgccggcgcaccgaccggccagagccgaaaacttccaccaccacaccacagcgtcaaaaggcactccaaaatcccacccaaaaaaaccaatccccaaccccaaccccggtgcccgccacgccacgccgcgtttgcgcttgcaccgagtgcgcccgaaacccaccaaccaacccggcggcacagcaccgcagtttcacggttggtttcaccgtttcgtgcgtgtttttagcgtgatcctcccggacccggaggccggaagcgacaggacagacagggacgaggagctctcgctacaactactacaactgcaagagctcgttggttttttttaacccccaccgcgtccgcgaccccgaccgatttttgcagtggttcgctcgcgacgccaacacgaactcccgaaggcgaggcggctttgcacgcacgcacgcacgcacgcacgcgcggcctacctcctcggcgcgagttgctcagtcgcagggggggaggtgggagcggggcggggcggggcgggcgtcccggtcggggattgcgctggttcgatccccccgcgcgtgtgggggtgtgggtgcgtgggatcgatctctccctctcgctcgctcgctcgcggggcgtcgcatgcggcggcgcggcgaggcgaggcaaatgcgggtggattcgtcgctggcggtggaggagaggtgagggggcggcggcggcgatggcgatgcagacgatgcagacggagcagtagcagcagcagcggaggaagggttcgccagagatggatttcttcagcgaatatggtgatgctaacagatacaaaatacaggaagtcattggcaaaggaagctatggtgtagtttgttcagctattgaccaacatactggcgacaaggttgcaatcaagaaaatacacaatatctttgagcacttatctgatgctgcccgaatcctccgtgagatcaaattgctccggctattacggcatcctgatatagttgagatcaagcatataatgctacctccatcaaggagggacttcaaggacatatatgttgtctttgagctgatggataccgatctccaccaagtcatcaaggcaaatgatgacttaaccaaagaacatcatcagttctttctttatcagatgcttcgtgctttgaaatatattcatactgctaatgtctatcatcgtgatttgaagccaaagaacatattggcaaacgctaactgtaaactcaaaatatgcgatttcggtctagcacgagtggcatttaatgacactcctacaacggtattctggacggattatgttgctactagatggtatagggctcctgagttgtgtggttctttctttactaagtattcaccagctattgacatatggagtattggctgcatttttgctgagattttaactgggaagcctttgtttcctggtaaaaatgtggttcaccagttggatctgatgactgatctcttgggtactccatcaatggatactgttacaaggattcggaatgagaaagcaaggaggtacttgagcagtatgaggaaaaagcagccagtacctttttctgagagattcccaaaagcagatcctgctgcactcaaacttctgcagaggcttttagcattcgacccgaaggatagaccaactgccgaagaggcgttggctgatccatattttaaaggccttgcgaaaacagagagagaaccatcatgccagccaataacaaagatggagtttgagtttgagcggagaaaggtgactaaagaggatgtgaaggaacttatattccgtgaaatactggagtatcatcctcaacttcttaaggattacatgaatggaaccgaaaaaacaaacttcctatatcctagtgcccttgacaactttcggagacaatttgctaacctggaagaaaatggagggaagaatggagatgctgttccatcagacaggaaacatgtttcgctcccaaggactactacagttcattctgctccaattcctcccaaagatcatcaaaatataacttcccaagtaccccaaaggattccaggtagaacaggacgaggggcttgccctgtaataccatttgagaatttgagtgcaatgggcccatacaatcaacgaagggtggtaaggaatccagtgcttcctccagccaccaccaacctatcagcatatgcctaccaccgtaaatcggatagctcagaaagagagctccagcaggagcttgagaaagatcgcatgcggtaccagccatcagagcatttcatggatgctaaggtggtgtcacatatgtcccatgatttgagagcttcctcttactacgtttcaaaggcgaaatctgatgtagcagacagagctgccttacaatccaacatgatgcagggaattggcccttttaatggcattgctgcagttggaggtaactacaataaagtcagtactgttcagtatggggtctcgaggatgtattagggtgcaatggccacttcaaaaatgctccgctgagctgattaataacatgaaagaatccaagtacccaagtgccttatcagccaaagattcagacaaagaatacaggaccaacaatctgatcgaggaagcgtcgaggcggtgaaaatgaaattacagaatgtggaaaagacaaacatcttgctagccattgatctagcctgccaagaaaggcatgccatattgccgtgccgtcagttatttgctgctaagaagaaaaagaaatgggagaaaagggaaaaagatgagcgagtgatctactttgaatgaaagagaacttatgggaataaaaatagcgagcttatgtatatacaataacttgattctatatattactgccagagacagccatttcttttgttccacatgtggacatgtggtggtgtgtgttttctttttgtatcactgggcgtctgagcacaaatgcttgcgagacaattcccttgtagaacaggagtacattttggtgtaacataaaaaagaacaaaaaaaaaaaaaatctgaggactatagtaaatgtt

SEQ ID NO: 21853 - DNA, 3014 bp, Oryza sativa
  ref <308>: DATABASE ACCESSION NUMBER: AK072083
  ref <309>: DATABASE ENTRY DATE: 2001-12-06
gaccccgcccccaatccgcgcctccgtctctccgcctctcttcttcgataggcggatcatgacgcaggcggatcaggcggtgatcagcctgcgcccgggcggcggcggcggcatcggtggcccgcgcgccggccgcctcttccccttcggcgcctccacaggctccctcgacttcctccgcccgcgcggcggcgcatcctccggcttcgctgccaagcttggagacttgcggtttgaacctctcgagcgggttcgttacactagggatcaacttgttgaactgcatgagattatcgacatacctgagaacatcttgaagcttaagcaagatattgacatagaactccatggtgaagatgaaccctggattaacaatgactcaagtgtgcaaactcagtcatataaccgctacgctgagacagacaaccgtgattggcgttcacggattgaacaacctgtgcaaactcctgctattggtggtgaagagaaatcttgggacaaatttcgtgaagcaaaagaatcatacatttcaagtggaaagcaagatcaatttaataatcaagacaaattgagctcccagttcagtgcaaaagctcaggttggtccggctcctgctcttgtcaaggctgaagtcccttggtcaatccagagaggcaatctctccaacaaagaaagagttctgaaaacagtgaaaggtatactgaacaaattgactccagaaaagtttgatcttcttaagggccagttaattgaagcagggatcactacagctgatattttgaaggatgttattagtctcatatttgagaaggctgttcttgagcctaccttctgtccaatgtatgctcagctttgctttgatctcaatgagaagttaccctcattcccttctgaagaacctggtggtaaagagatcacgttcaaacgtgtgctgttgaacaattgccaagaagcatttgaaggtgctgacaatctgcggtctgaggtcaataaattgactggtctagaccaagagatggagagacgtgataaagaaaggctagtgaagcttcggacacttggaaacattcgtcttgttggtgagctacttaagcaaaaaatggtccctgagaagatagtacatcacattgttcaggagctattaggttctgaaagcaacagatgccctgctgaggaaaatgtggaggccatctgtcagttcttcaacacaattggtaaacagttggatgagaatccaaagtctcgacgatttaatgacgtatacttcaaccggctgaaggatctaacaactaattctcagttggcatcacgattgaggttcatggcacgcgatgtccttgatcttcgttcaaaccaatgggtgcctcgacgtgaagagatgaaagctaagaaaatcagtgaaattcatagagaggcagaaaacaatcttggattgcgtccagggtcgactgcaagcataagaactggccgtactggtactggaggtggaggacccctttcaccaggagctttttctatgaaccaacctggtatagttggcatgttgcctggtatgcctggagcgagaaagatgcctggaatgccagggctaggtagtgatgactgggaagttccgcattctagatcaaagcccagagctgatccagttcggaacctcaccccatcattggccaataagccatcacctaataattccagactgcttcctcaaggcagtgcagcattaattagtggcaagacgagtgcacttgtgggcagtggtggcccactatcccatggtctggttgtcacaccatctcaaactacaggaccaccaaaatcactcatcccagctccatctgtagatcctatagttgagcaaccagctgctgcccccaagccaagctctacagagcttcagaagaagaccatatctcttcttaaggagtatttccacatacttcttctacatgaagcacaacagtgcattgaggagctgaagagtcctgattactacccagaagttgttaaagaagccatcaatcttgctcttgataaaggcaccaattccatcgatcctcttttgaggctgttggagcatctctacaacaagaatgttttcaaagcgactgacttggaaactggatgcttgctttacagttctcttcttgatgagcttgctattgaccttccaaaagctccagtacattttggtgaagttattgggcggctggtcttgtcacattgcctgagcatagaagtcgttgaggatactctaaagaaaattgaggacagtttctttcgtgctgcagtgtttgaagctatgatgaaaatcatgaaagcaaatccatcaggtcaggctatcttgggctcacatgttgctaagatcgacgcgtgcagcaaacttctatcctcggaataaatatttgtcgcaagtttgactaggccaacttctaccttattactgatgtcctaactgggaatgttacattggttatttgttactcggtagttggcaggttttgccctttcagttcgagaaactacaacactgaagttgaggaacagctttttgtgagctgtatttttttgcaaggtcagatgactgataatgaagtaaagaaaagctatagatttagctctgataacaccgtaacaatacctcgatggtggtttacgcggctactcctcttgtaacaggtactgctgcgtgttggcaagcatacttgttagcgttgggtacaactgagttcataatttagtcgaaagttgagatctgatgtaattcttccagccaatctcatgacaatttattcgagatttgtttggttcaatttaacctgtcaatgcagtcttatcttctcatctgaggctgtgaggtaggatatgggaattcgtactgtttgcatttcgcgctcttgcgtgtcatgaatctgatggcctcattgtttcgcttatttatgaaataagccaaacgatatatttgtaaacgaaagtagtttatgaataaagcaaatgttgaaaaatagacttcg

SEQ ID NO: 21854 - DNA, 1350 bp, Oryza sativa
  ref <308>: DATABASE ACCESSION NUMBER: AK099241
  ref <309>: DATABASE ENTRY DATE: 2002-08-28
gctccagcaagcagctagctatagctaagctctgagcgatccatggccatgaagtgcctcttcctcttcttcgccttcctcgtcgccttcttccccggcgccgccgtcggcgccgggctgaaggtcgggttctacaacaagacgtgcccgtcggcggagcgcctggtgcagcaggcggtggccgccgcgttcaagaacaacagcggcgtcgcccccggcctcatccgcctgcacttccatgactgctttgtcagaggctgcgacgcctcggttttgatcgacgggaacgacaccgagaagaccgcgccaccaagcaaccccagcctccgcggattcgaggtgatcgacgccgccaaggccgccgtcgaggcggcgtgcccgcgtgtcgtctcctgcgccgacatcctcgccttcgccgcccgcgacagcgtcgccctcaccggcaacgtcacttacaaggtccccgccggccgccgcgacggcaacgtctccatcgcccaggacgcgctcgacaacctgccccctcccaccttcaacgccacggagctcgtcggccgcttcgccaacaagtcgctcaccgcggaggacatggtggtgctctccggcgcccacaccatcggcgtctcccactgcgactccttcaccagccgcctctacaacttcaccggcgtcggcgacgccgacccggcgatcagcgccgcctacgcgttcctcctccgcgccgtgtgcccctccaacagcagccagttcttccccaacaccacggtggacatggacgtgatcaccccggcggcgctcgacaacaagtactacgtcggggtcgccaacaacctgggcctcttcacgtcggaccacgcgctgctcaccaacgccacgctcagggcgtcggtggacgagttcgtcaagagcgagacgcggtggaagagcaagttcgtgaaggccatggtgaagatgggcggcatcgaggtgaagaccgggacgacgcagggcgaggtcaggctcaactgcagggtcgtcaacaagaggagcgccaacgctgagctcgagctcgagctcgccgccgccatggatgatggggatgaagtggcagcgagctaattaattaaggtggtagtagctgatctgatgtcgcgtgttcttcagaggtttcagcaataagtttgtgatcggtgttgttacttgttagatgtatgctgctgctgtttttaacgagaataagagttgctggagaagaagtttttttcttcttgttgttttttaatttgttttctgttttggcttgtgtttgggtgagtgctttggtgtgaacctgtcatgaaatcaaggaagaaatttggcgaaatgttgccg

SEQ ID NO: 21855 - DNA, 1872 bp, Oryza sativa
  ref <308>: DATABASE ACCESSION NUMBER: AK072084
  ref <309>: DATABASE ENTRY DATE: 2001-12-06
gatcttctccaagctctcgtcctccaccaatgtcggccaccaccaccgcgccgtccccgaccccgatccccatcaccaccatcgccgagctgaggcagcaccactcccagctcgtccgcctcggcctcgcctcccacccgccccacgcgcgccgcctcctcgccttcctcgcccgcgaccccgcccacctcccctacgccgcgcgcctcctcgcccaccacccggacccccgccccgccctcctcaacccgctcttcgcctccctcccgccgcgcgccgccgcgtcgctcctcgccctcatgctctccctcccgctcctccacgaccacttcaccttcccccgcctcctccccgccgcgccgctcccgctcgccgcccagctccacgcgctcctcctcaagctcaacctccactcccacgcccactcgctcaacgcgctcctcgccgcctacctcgccgccgcgcgccccgacctcgcccgcgtgctcttccgcaccagcggcggcggcgcgctcgacgtcgtgtcgtggacgacaatggtgggcgggctgtgcaggctcggcctcgtggacgatgcgcgggaggtgttcgatgcgatgcccgcgaggaacctggtctcctggaactccatgatctcgggctacgtcaaggccgaccggttcttggatgcgttggaggtgttcgacgaaatgcgggcgctgggagtggaggggaacgggtttgtggcgacgagcgcgctggtggcttgcacgggcgcgggcgcgctgggtcgcggtagggagatatacaggtgggtggagcagagcgggatcgaggtggacgccaagctggcgacggcggtggtcgacatgtactgcaagtgcgggtgcgtcgacgaggcatggggcgtgttcgactcgctgccggcgagggggctcacgacgtggaactgcatgatcggcgggttcgcggtgcacgggaggtgcgacgacgcgctcgagctattccaccaaatggaggccgcaggcgtggcgcccgacgacgtcacgctgctgaacgtgctcacggcgtgcgcgcacgccggcgaggtcagcgaaggccgccgctacctcaaccacatcgtgtctcgccacggcatcgagcccaagggagagcactacggctgcatggtcgacctgttcgggagagcaggccagctagacgaagccaagaaggtgatcgacgaaatgccaatggatcccgacctcgccgtcctcggcgcgctcctcggcgcatgcaagatccacggcgacgtcgacctcggcgaggcgatcgggtggcgcgtcatagacctcgacccggacaacagcggccgctacgtgctcctcgcaaacctgctcgccggcgccggccggtgggacgaggtgggcaaggtccggcggctgatggacgagcggaacgtgagcaaggaggccgggcggtcggtgatcgaggtcgacggcgaggcctgcgagttccggtgcgggaacctgcgccacccacaggctcgggagatctacgccatggccgtggacatggtgagcaggatccgggccgaggggtacgtgccggacaccggcgaggcgctgcacgacgtcgccgaggaagacaaggaggcggcgctgctgtgccacagcgagaagctcgcgatcgccttcgggctgctgcgcgcgaggccgcgcgagacgctgcgaatcaccaagaacttgagagtttgtagggattgccacgaggcgaccaagtacgtgtctcgcgtgtttgggcgtgagatcgtggttagggacaggagccggttccatcatttcaaggatggcatgtgttcgtgtaaagattactggtaagaaaaatagacgtgatgatgcagagaaattcttt

SEQ ID NO: 21856 - DNA, 1929 bp, Oryza sativa
  ref <308>: DATABASE ACCESSION NUMBER: AK099242
  ref <309>: DATABASE ENTRY DATE: 2002-08-28
gagttcgccgacttttcgccgccgcgtcgcgctcccccgaggtccactcctctcctgccggagaagcgggcctaggcgaagagcagcgccatggcgaccgcttcggtgtcgtttaagtctagagaggatcaccggaagcagctcgagctcgaggaggcgaggaaggctgggctcgcgcccgccgaggtcgacgaggatggaaaggagatcaatccccatatcccccagtacatgtcctcagccccatggtatcttaacgctgataagccgagtttgaagcatcaacggaattggaaatcggacccgaactacaccaagtcatggtacgataggggtgctaagctttttcaggctaacaagtacaggaaaggagcttgtgagaactgtggagccatgactcatgacaagaagtcatgcatggaacgacctcgcagtgtgggagctaaatggactaacatcaatatagcaccagatgagaaagtggagtcatttgaactggattatgatggaaagcgtgatcgctggaacggttacgacccatcgacgtacacccgtgttattgcagattatgaagctagagaagaggctaggaaaaagtatctgaaagagcaacagctcaagaaacttgaggagaaggatggtgaggagggtgacgagaacgtggctagtgaggaggaggatgaagaagatggtttgaagatagatgaggctaaagttgatgagagtgctcaaatggattttgctaaggtagagaagcgtgtacgtacaacaggtggtggaagcactggaactgtgaggaatttgcgtattagggaagacactgcaaagtatcttctgaaccttgatgtgaactctgcatactatgatccaaaaacccgctccatgcgtgaagatccattgccagatgcagaccccaatgataaattctatgtgggtgataaccaaaatcgacttagcggacaagctctggagttcaagcaactcaacatacatgcgtgggaagcttttgataagggacaggatattcacatgcaagctgccccatctcaagctgaacttctattcaagagttttaagatcaaaaaggagaaattgaaatctgaaaacaaagataagattatggagaagtatgggaatgctgcatctgaagaaccaatccctcgggagcttcttcttggacaaagtgaaaaagagattgaatatgaccgaactggtcgaataatcaaaggacaggatgtagcccttcccaagagcaaatatgaagaggatgttttcattaataaccatacaaccgtatggggctcatggtggaaagatcatcagtggggctacaaatgctgcaagcagactatccgaaatagctactgcactggcttagctggaattgaggctgctgaagcatcggctgatttgatgaaggcaaatatggcccgcaaggaagctgcagaagatgagcctgtacgacatgaagaaaagcgactggccacctggggaactgatgtgcctaatgatattgttcttgacaagaagctgcttgatgaagccctaaagaaggagggtgcgaggaggaaagaggagatggatgaaaggaagaggaagtacaatgtgaaatggaatgatgaggtcaccgcggaagacatggaggcttaccgcatgaagagaattcaccatgatgatcctatgagggatttcctccattaggccttgtatgctccatagttgctcatatatgagcacaacactctgccttgcagtgtcacttgtgtaatgtattagctgtggctatgtcttcctctaactggagtgataatttagagctaagagctctctacttctcttccagatgttaccatcctcttgtccggatggttgtgtttgtattgctgatctttctataaatgatatggaaaaaaggagttgcatacttgc

SEQ ID NO: 21857 - DNA, 4303 bp, Oryza sativa
  ref <308>: DATABASE ACCESSION NUMBER: AK072085
  ref <309>: DATABASE ENTRY DATE: 2001-12-06
gcgttttccaccaccaccccccaccaccacgacgcggatggcatcttcgtcgtcttcgtcctagcgcgcggcggccgccacgcgaccctgtttgagagggggaaaggggggttccgctcggctaggcggaggaaggacgcagccgcccctgtcccgcggcgaatttggatgatcgaggcccgccgtcgagggtaaggagtgatggaggaagcggcggcggcggcggcggatttcgatggcggcttcggcggcgccggggaggacaacctgtccatgcccctcggcgacttcatggccttcctcgataacgaggactggaaggagcagcagcacgagggcaatcaaggtttagagatgccagtggacagcacaagttctgaaaatgcatttcaaaaccatgaagaaatttttgagaataaagaaaattggtcaaactactcgcatacagatccttcacatagtcagatggatgtaatggtggaacttaacaatggtggagaatcttttgatcactcagaggatacctcttatagattgcttagcaatgattttttggaaaattcaaggaatggtaatcctgagatgcatttaccaatggatgcattaaaccatgctaaaactgttgatgaagaaattgtccctccatatgaagattatacaaatggtttatactatgattcgggatgtgatatgttcgcagagcaatctggtttaagtgaagttaaatgtgagggcacaggtcccatgcttggtaattctgagcaggagggtaaccatttcacgtcagtgcctatgtttgaccatagtgctgtacacctgatattccttacaccgagttgaacatcggtgatgtgcctggaagcatgcagaatggaaatggcagttgcctaactgtacaaggagaatatctgcagggggagtatcaggagtatcctcagccagattatggatcgtttgatatggctaatgaaatagtgctgcatgatttgccacaaaacaatcagtcatatgagctggaacaattaccacagaatatatgtgaaagcagttcaatgcaagtgggctctccagatcaatattgtgatgatacatctctgtcggattattacatggatgatgtatcttcgatagagtcgatgtccagcgagcagaaccgatcagaagatatctgtttccggagtgagtctagcactgactcttctccggtgccctcaagcagaaactccaccactgaggatgctgataaatactttggagatgcaccaaaacatttgcagaattccatgtttcctgtcagtacccaacaccaacactcattcatgaactcaagtgatccaatgcatccaacttttcataaaaagtatgacattcctagaaatggcagctcttctattctgggtaactcatcaaggaattgcttcagtttagatagcaatcgtgattctgatttatgtattcttgagggtagtagaagtcttgctagtggacatgtgttgccaccccaaggattgcagcataactttcaacaatctgtgtgtgccaatcctaatcttcctcggtttggagggagatacaggccgcatgaggaaagaatgactttgcggcttgcattacaggatatttctcagccaaagtctgaggctaatccacctgatggagttttagcagttcctttattgaggcaccagaaaattgccttgtcatggatggtacaaaaggagagaaatggttcgagttgctctggcggaattcttgcagatgatcagggcctgggtaaaacagtgtcgactatatcactgattttgacagaaaggtcaccagttccatcttcagctgttaagcaagaaccatgcgaagctgtaacccttgacgatgacgatgaggatgacgatgctgagcctcatttgaagaaaccggcactagcacatctagcagatacatgtaaacctgaagcgacaagtagtaccattaagacagaaaatcctattgcaaatgttaaggctagaccagctgctgggactttggttgtttgccccacgagtgttctacgtcagtgggcagatgaactgaggaataaagtcaccagtaaagctaacttgacctttttagtatatcatggtagcaaccgcacaaaggatcctaatgatcttactaaatacgatgtcgtgttaaccacatattctatagtaagcatggaagtaccaaaacaatcaagtcctgatagtgatgatgaagagaaagggaagcctgacaggtatggtgctcctgttggctcctcaggcagcaaaaaacggaagacttcctcttctaagaagaacaaaagtggaagcacaccagagagtaaattgcctgagaaacctctcgcaaaagttgcatggtttagagttatccttgatgaagcacaaagtattaaaaattatcgaacccaggttgctagggcatgctggggtctgcgagccaaaagaagatggtgcttgtcagggacacctatacagaatgctgttgaggatctctatagctatttcagatttctcagatatgatccatatgctgaatacaaaaaattttgcttcatgataaaaacaccaatcagcaggaacccaattactgggtacaagaagcttcaggttgttctgaagacagtaatgctgaggaggacaaaagcaacgatgcttgatggaaaaccaataatctcattacccccaaagaccgtctctcttaagacagtggacttcactagtgaagagcgtgctttctataacactctcgaagcagaatcacgagagcagttcaaggagtatgcagctgctggtactgtcaagcaaaactacgtcaatatcctgctgatgcttttacggctcagacaggcatgtgatcaccctcacttagttcgaggtcatgagtctacttctagttggatgtcttcattggagatggcaaagaagctgcctgtagaaaggcagcaatcgttgctggtttgcttgcaatcgtgttctgcgatatgtgctctctgcaatgatgcgccagaagatgccgttgttactatatgtggtcatgttttctgcaaccagtgcatactggagcaacttaccggtgatgacagtgtatgtccagtgtccaattgccgagtccgactaaattcaacttccttattctcccgaggcacccttgaatgtgctctgagtagatcaacctgtgagtttctgtctgatgattcctgtgaagacatggtgcaagggaagcaacctagatttgattcgtcttatgcatcttccaaagtgagagctgccctggatattcttctctcgttgcctaaactggatttaacccatatgagtgatgacaaaaataaaattgtgcatcctgacaaaattaacgggaatagtactccctctgaatatgctggcaccaaaataactgagaaggccatcgttttctctcaatggactagaatgctggatttggtagaggttcatttgaaatcttctcatctatcttatcggaggcttgatggaacaatgtccgtcgcagctcgggatagagctgtaaaagacttcaacacaaatccagaggtttctgttatgattatgtctctcaaagctgcaagtcttggtctgaatatggtggcggcctgtcatgtacttttgcttgatctttggtggaatcctactacagaagaccaagctgttgacagagcgcatcgtattggccaaactcgacctgtcacagtgtcacggttaaccataaaagataccgttgaagatcgtattttggctctccaggagaaaaaacgggagatggtggcttctgcatttggggaagacaaatctggtgcccatcaaactagattgacggtggaagacttgaactatttgtttatggtttagcatttctcctgagattggacacaattttgctcgtgggatggtgtaacttgcatctataggtgaaatatctgtcaggagatagcatttctctaggcgtctagtgtttctagtttgtacaggtgctcagattttgtagttaaaggtggcattgtggtgcgattcattttttctccgtgcaagtggcaactcatcaggtaatttttcgatgagctgcagtggtgtcttttgatcatgaagatacaaaggagaacgtcattagctaacaccatatttgtacatagttttcaccagcaatcttaactcatcttgagcttcgcatttcagccgtatggttgtacatcataaaccatgtaaaagattaagctgaacttgtcttcgacaatttttttcagttgatcaaacatgatagtttatgg

SEQ ID NO: 21858 - DNA, 1485 bp, Oryza sativa
  ref <308>: DATABASE ACCESSION NUMBER: AK072086
  ref <309>: DATABASE ENTRY DATE: 2001-12-06
gagctgctttgctctgtgctcccttctcgggcctcggtttgctcagatccaccgcgtcgcgccgtcgatccgacgccgatgcggccgccggcgccggcgacgacggcaggcgcgggggggaaggtgacgccgaacctggcgatggacgcggaggggacgcggctgctcaacctcaccgtgctgcagcgcctcgaccccgccgtcgaggacatcctcatcaccgccgcccacgtcacgctctacgacttcaacatcgagctcaaccagtggagccggaaggacgtcgagggatcgctgttcgtggtgaagaggaacaagcagccgaggttccagttcatcgtcatgaacaggcgtaacaccgataatctcgtggaggatctattgagtgactttgaatttgaacttcagcctccgtatttgttataccgaaatgctgcacaagaagtaaacggtatttggttttataaccaacaagactgtgatgctgttgcaggtgtttttggaaggatattgaatgcttacgccaaagtgcctccaaagcccaaagtaccttccacaaaaagtgagtttgaggaattggaagctgttcctacatccgctgctatagatggcccccttgaaccttcttcgtcgtccactgttctagtttctaatgcccctgatgaatcattgactgattatttcagtggcgctgttaatgttgggaatgtatcaattacaccaatggttggaagaactcatcagcctatcgagtctgttgcatcctcacacgtaccattgatcatcccatctgctgctcctacacatcaaatgggtgttccttcaggggctgcgtcagctccaccactgcccgtcattgacactaacgttcattctagccactcaacaaatcttgtaactccagccttttttgcacctccctcatcgtcttctgcatcattggtggcaccagcttcatcctttatgcccacagcatcaccttttcatccaacttctgccgatgctcaccgtccagcatatggacatggtacaccccttcttcaaccccttccgccgccaacaccacctgcatcacttacccctgtacacaacgatgagcctgttatttcgagggataaagttaaagatgctctcctgaggcttgttcagaacgacgaattcatcaatttgctctatcaggagttacagaatgcacatgcgtagactgcttactcagcctttatggagtgtctggccttgacgagagttcacctgttctttcgtagttttgtgtgctttagttctcaaaactttatgtacagctttggcttctttttatatcggatgtccgcgaagagattgtgcagctttgtcttgatgcattattgatgtagagtttttatagcaatggctggtagtatttcttccaaatggttgtacttgtatagtatttttgtttcctgttggaaactcgaaatcggaagctggactatgtgtggcaacgtt

SEQ ID NO: 21859 - DNA, 2041 bp, Oryza sativa
  ref <308>: DATABASE ACCESSION NUMBER: AK072087
  ref <309>: DATABASE ENTRY DATE: 2001-12-06
ggttcatcatcaaggaaggaagggcaaggccgcaagggaagacacggatcggcggccatggcggcggccatcctccgcttcttcttcttcttcttcttcttcatcctgcccgcctccctcaccgccaccgcctccacctccacctcatcatgccctgatggttggcaaatcactcctgctctcgacaagtgtttcatctacatacctacacccctttcttgggacagatccgaggctctctgccgcaacaacttcaccgctcatttggctgccctatcatcacttcaagacctcaatcttgcaaagtctctctgtggaccttccccctctggatgctgggtcggaggtcatcgcaacaacactgcctcggcttttgcttggaaatggtccgatgattcatcttcttggaatgatactgccttccctgctgacccattgcgcgccaactgcagcactactgggtgtgctcttgctaccaccaatgatgcatgcactttggttaccaatacccatgccgcacttaccgcaaaaagatgcagcgactcacatggactcatctgtatgatcaatcatgaccgatgctaccatgatcactgccacaaggagtatttcatagtgctcgtcgttgtaagcggattcattctcttgaccactctagcagtagtagtttggctacttgtctataggcgaagcaagaggaggagaagatcgcgtgaaggttccagtacttcagctaccgcgttagttccaccgctatggaaagtgttcaccagtgaagaacttagatcaatcacaaagaacttcagtgagggcaaccggcttcctgggaatgcaaagactggtggaacctatagcggaattttgccagatggatccagagtagcaatcaagaggctgaagagatcaagcctacaaaggaaaaaagatttctactctgagattgggagagttgcaaagctgtatcatcctaatttagttgcagtaaaaggatgttgttacgatcatggtgaccgctttattgtttatgagtttgttgccaatgggccgttggatgtttggctacatcatgtccctagaggagggcggtgccttgattggccaatgaggatgagagttgctacaactcttgcacaagggatcgcatttttgcatgacaaggtgaagccgcaggtcgtgcaccgtgatatccgtgcaagcaacgtgctacttgacgaggaatttggttcccatctgatgggggttgggctgtccaagtttgtaccatgggaagtaatgcacgagaggactgtgaaggctgcaacctatgggtaccttgctcctgaattcatatacaggaatgaactgacaacaaagagcgatgtctacagctttggtgtgctccttctagagatcatcagtggccgtcggcctactcagtctgtcgagtctgttggatggcagactatatttgagtgggcaacacctctagtccagtcacaccggtacctagagctgttagacccactgattcaggagttgccagatgtaggtgtcatccagaaggttgttgacttggtctatgcctgcacccagcatgtcccttcggtgcgaccaaggatgtctcatgtggtccatcagctccagcaacttgagctaaagtcagcagcatcagaacaactgagcggcacaagcactagcgctacatctccaatgttaccattggaggttcggactcctcgctgaaatccactgctagaggaaaaccaattcagtagtttccgatgtcagtcagctggcagcacatctattgaagtgtctgcttaactagtactaggagaagtacttgaggggagaagttaggacccccataggccaaaccaaattaacctttgtgtagcaatgggctgtttgttgttaaaatggtcattgcccatgtgtacttgagttggcctctatgtagaagatatcagtttagtgagcacaaatttctgaatggttgtaatagtgaccttatctatatatctacatttgatagaaggtgtgataatatcttcctgtctct

SEQ ID NO: 21860 - DNA, 1849 bp, Oryza sativa
  ref <308>: DATABASE ACCESSION NUMBER: AK072088
  ref <309>: DATABASE ENTRY DATE: 2001-12-06
ttggagtccttgcatttagctatcaaaggaaatctcctttcgtggtcaagctttaggtggagtttgatgagttcggctgggcttcatttattcccaaagatttgagctcttgatgctgctttaatagttcagagattccagcgtccttcacttcttgcagctcagaatgggttcttcttggtggtggcatggaagggcggcggcggcggtggcgtgttgggtgtggctggcggcggcggcggcggtgggggtggaggcgataggggcgaactgggggacgcaggcgagccacccgctggcgccggacacggtggtgcagatgctcaaggacaacgggttcgacaaggtgaagctgttcgacgccggggaggacaccatgagcgccctgaggaagagcgggctggaggtgatggtcggcatccccaacgacatgctcgccgccatggccagcagcatggcggccgccaacaagtgggtcgaccagaacgtctccaactacctcaacgacggcgtcaagatcaggtatgttgctgttggtaacgagcctttcctggagacatacaatggaagctttctgcaaactacttttcctgccatcagaaacatacaaagtgcgcttgtgaaggctggcttgggtagtcaagttagagtgacatgccctctcaatgctgatgtttatcaatcatcgactagcaagccttctgatggggacttccgcacagatattcatgatctgatgctcaccatcgtaaaattcctgagcgatactggtggagctttcactgtcaacatctaccctttcataagcctctattctgattcaaacttccctgtcgactacgccttctttgatggtgccgcatcacccattgttgatggctctgcgacatacacaaacatgtttgatgcaaactatgacacacttatatgggctttgaagaagaatggctttggaaatctcccagtcattgttggggagattggatggccaactgacggggacatgaatgcaaatattcagatggcgcagcacttcaaccaaggcttcctaacacatattgccacagggcgaggaacgccgatgaggcctggaccagttgatgcttacttgttcagtctaatcgatgaggatgagaagagcatacagccaggtaattttgagcgtcactgggggatattcacctatgatggcttgccaaagtatcaactgaatcttgggcaatcacatggccttctcaaagcgaagaacgtgaagtaccttgagaggaagtggtgcgtgctgaagccttctataggccttactgatccaaggctttcagatagcatcagctatgcctgctccctggcagattgcaccagccttggttacaagacatcttgtgggggactggacaccagaagcaacatctcgtacgcgttcaacagctactaccagaagaacgatcaagacgatgtcgcctgtgggttctcgaacctcgcaacgatcactggccaagaccccagcaccggaacatgcagattcggtatcatgatcgaggttgactcggccttctcgtggaagctgcagcatgttagaagcagcaacctcttgatgcttctgctagtgcttctccagctttgcctgtcattctcatagatgcttgtttcacaagagatatggctgtagtaagagcatcagccatctggcaggaggataaggatatttgatgtctgctgtcagtatgttcattcatgtaggaaccttttctttttttgctcttttttccctctttatttttccctggtggatgccgcgaacccgctatcgcgatcatgcttggattcttgttagtgtagcctttgatctacc

SEQ ID NO: 21861 - DNA, 1320 bp, Oryza sativa
  ref <308>: DATABASE ACCESSION NUMBER: AK072089
  ref <309>: DATABASE ENTRY DATE: 2001-12-06
gagagaagtcagaaagggaggagagccgtcgccgccgtgggatgtcgccgtcgtcgtcgtcgtcgagcacggggccgatgggggtggcggtgtcgccggaggtggaagcggcgctggcgcgcggcggcgcggtcgtcgccctcgagtccaccatcatctgccacggtatgccctacccgaagaatctccagaccgccatggaggtggaggccgtcgtgagggagaacggggcggttcctgccaccatagccattctgaacggcgtgccacatgttggccttagcggcgagcaattgaagagcttggctgtaagtggaagacagtttcagaagacggctagaagggatattgcacatgttgtggcctctggtggtaatggtgcaacaacagtttctgccactatgtttttcgctcataaggttggcataccaattttcgtaactggagggattggaggtgttcatagaaatggtgaacagaccatggacatctcctcagacttaactgaacttggaaagactcctgtcactgttatttcagctggtgtgaaatctattttggacataccacggacacttgagtacttggaaactcaaggagtaacggttgctgcttacaaaaccaatgaatttcctgctttctttacagaagtcagcggatgtaaggtgccatgtcgcgttgattctcccgaagagtgtgccaagataatatatgcaaacaagaatttacatctaggatctgggattttgattgctgtgccgattcccaaggaacatgcagcttcaggaaatgctatagagtctgcaatacagaaagccctcaaggaagcagagtattgtccttactcccaacctcctgctctctcactttatcttttctgtgtatttgtgatactaacagaaatgatatctaatgactttctatgttgtttcagggataaaaatataataggcaacgcgatcactcccttcatgcttgacagagtgaaagtactaactggacgatcttcgctagaagccaatattgcgcttgtaaagaacaatgctcttgttggtgctaaaattgctgtggccctttctgatcttcaccagagagtaacaaacagatttcggaggtctgccttatagagtgcatgtacaaaggcaagcgaggtctgaaacatggggcatcctattcatcctcacaatgtatgcttgtacaactagttggaaacttgtagcttcatccttttctggcactatataaatgaaacctgaggtgcgagtgcatgatttgtagcgagatttgctactgtagacttaaattagtacattccactcc

SEQ ID NO: 21862 - DNA, 2154 bp, Oryza sativa
  ref <308>: DATABASE ACCESSION NUMBER: AK072090
  ref <309>: DATABASE ENTRY DATE: 2001-12-06
gatttttgacccctttttgttactctcttgaagttttgatttgatccgctcggaaatttgatcttcttttgtgttcggaactcggatttttgagggggttttggtcttggcggctgcttggggtgtgagatccctcaagctggcgaagcgaatcagccgtgtccatggagatgcacgcgagctctgtctcttcccatggcgaggcccggctcggcggcgagcgggggctcgtggaccgggaggagctggtgcgcgtcatcgcgcagtcgctctactcgctcggttaccggagggcggccgcggcgctggaggcggagtccggcatgccgctgtacccggcggagcacgaccgcctcctgttcgacgtaatgtctggccggtgggacgcgtgcgtggcggcgatccgcgccgtggcgggcctcggggaccgggagcgcgcggcggcggagttcttggtgtggagggggcacttcctggagcttctggggatcggcgacgctgggctgccgcgcgccagggaggtgctctggcgccggattgcgcccctcggcgttgacagggagtgtgtgcactggctggcacgcgcaatggtctcgtgcgagggggcggtcgcgccggatgccgtggtcgggtggaggattgggcttttcttggatctggttgatgctttcccgccatggttccatgtgccaagcggtcggctagagcttctggtggagaatgcagttgttaagcaggtttcgtcttgtgtatatcacaatttaccggacgaggtcactttgtttgaggatcataagtgccctgaagagcagattccttccaagtgttcgcagggatctatagcactagacaagtttcatgcttgggggcggggactatagtccgaagatggatatttgacacatccatgcctgtttgcagatattatgtggtcataacaatgaagtttggtttgtaaggttctcaaatgatggaaactatctggcatcatcttcaagtgattgcacggccatcatatggaaggtggaagaggatgatacattaaccaagaagcactgcctcgtgggtcacaaaaatccaatttcttttgttgcctggagcccaaatgacagaatgctgctcacttgtggtaatggagaatcagtaaaactgtggaacgttgctactggtgaatgcagtcttaaatttagcagctcagttggccatattatcaattcatgtgcatggttccctaattcggagaaaatagtatgtgccagctgtgagcctgaaagttctccaaagaggatcttcacttgtgacctagaaggtcaagaactggaatcatgggttggagatagaatacctaaagtcagtgatatagctgtgactcctgatagcaaacatcttatctgtgtatgttccaatgaaatttggattcgagaacttccaaaggggcgggaatggagaatacgtgagcagcagacgatttcgtcgctatctctctctggtgatggacaatcactgattgtcaacctcaacagccaggaaattcatttgtggagaatcagtgaaagttctactgcggcggataataaattcaagggacacaagcaaggaaagtttgtgattagatcttgctttggtggatcaaactctctgttcatagctagtggcagtgaggattcccaggtctacatttggaaaaggcacctggagacgccaataaaggtcttatacggtcattcacttactgtaaattgtgtgagctggaatcctgctaagccacatatgctggcttcggcaagtgatgaccgcacagttcggatttggctagcacacaaaggctcacatcgcacacggttgacggcttgatgtggaaagttttgtatgttttccttgtaaatatatagttgtacatcttgactgtagtagtgtagtgtgcacagagcagttgagattttttttccccgtagagcttttagctacttcagaggtaaactttgaacaggcagaggcccagaagtagcagtatacttcatatatatgcctgtctcggattaaagttttgctcgtctactctgtaaagaatcaaagatgcatcagaattcagaaccttgtatatttttgtgagttgctactcattggtattgatatgtctggatgactggatgg

SEQ ID NO: 21863 - DNA, 2069 bp, Oryza sativa
  ref <308>: DATABASE ACCESSION NUMBER: AK072091
  ref <309>: DATABASE ENTRY DATE: 2001-12-06
gaatccactccactccaccgcagcttctcccgcggcgaggcggctcatcccatctccacagccgcagttgttgcagcaaggaggcatggcggtggggggtgaagaagagaagcccttcaacttcctccagattctgtgtgagggcgtcatagctggtggcaccgcgggtgtggtggtggaaacagctctgtacccgattgatacgataaaaaccaggcttcaggctgctcggggaggaagtcaaattcaatggaaaggattgtattctggattagctggaaatattgctggtgttctcccggcttctgctgtatttgtgggaatatacgaaccgacaaaaagaaaactactggagacttttcctgaaaatttgagtgctgttgcccattttgtaagttaacatgcatttaacatgtttttgcactagttgattgcacgtagaatgttgatcaggctgtacatcgtgctgtttattttgtataatctgtttttttttgcggggaatattttgtataatctgttaagtctctagaacttctaattcgtcagttacagcattgaagtatcaaccatgctgtttgatgtcgttttaatgcttaatcttcagagcatgttgctttctatcactgccttttctaaatgagaatgctacagactgccggggctattggaggaattgcggcttctctcattcgcgtccccacagaggttgtcaaacaaggaatgcaaacaggtcaattcaggtctgcacctgatgctgttcgtctcattgttggtaaagaaggattcagaggtctttacgctgtatgtatcttctgacctcatatatggtggaacctgtatttagccgattcaactctaatttttgttatccctgtatatttcaggaaaaataattatttgaatctgtttaatatgcctttttaattgaattgttgttacaatggaaaaaaactcattgccttccttgtcatactgtttctttttgtttgtagggatatggatcatttttacttcgagatctgccttttgatgccattcaattctgtatatatgagcaacttcgaattggttacaaagttgtggtacccatcttagcctctgtcttgatgagaaccatattttacttctggttagcaatccttactaggcctcagacgacctcaatataaatgtaggattgaggattcacaccttcatacatgttgtctatggacgagtcttgtatcttgttaagtactaattgtgggcatcagcatcacgctgctttgccaatcatttttgtgctatttgcatcaaatactataacttgattagctgcccaaagtgagatactactattaattgataatccttgtgacattttctgactccaccatgaactgtaactgtaatttcaagaaatttatggatttactaccaccttttcacttgtctgttcaggccaagagggagctgaatgatccagagaatgcacttattggtgcttttgctggtgccattactggggctataacaacaccactcgatgtgatgaagacgcggttgatggttcagggatcagcgaaccagtactccggaattgtaagctgcgcccagacaatcctgagggaggaaggacctggggcattcttgaaggggatcgagccgcgggtgctgtggattggcatcggcgggtccatcttcttcggcgtgctggagaagaccaagtcgatgctcgccgagaggaggagccgcgagccaccagccgggaaggatgagtgacagattttaccctcggccatggatggatgcttcaagttttgtgtttgttttgatcgatttcacatgagaagtagtgcatctctcgaggaggaagacaatgccactttgcgtcccaatgattaaattcccattcgtttaatgaattaatattatgttcaagttttttttaaaatctgattatactacattatagcttctctctctccctgcagtttacccatgctgtatgacttgtagatgtaacagtcggtcgttgccgatcaaattgtacctttgtcaatccagatagtattgcagcagtattt

SEQ ID NO: 21864 - DNA, 2457 bp, Oryza sativa
  ref <308>: DATABASE ACCESSION NUMBER: AK072092
  ref <309>: DATABASE ENTRY DATE: 2001-12-06
ggatttagtctttttgcaaacatcagaaggatgtttctttaaaactattcttgcacccgaatggttgttggcggccgggctgctatttatacatgcatactagctagatcaccgaacacaaaaccacaagaacaaacttcttgaaattcaacatggattcgagatcagctttgctactacttgttctgctagtttccccctttttcaccaatgcatcgagcagactctacatcgtgtacatgggggagaagaagcatgatgatccgtctgttgtcacggcatcgcatcatgacacgcttacttctgttcttgggagtaaggatggcgccatgaagtctatagtgtacagttacaaacatgggttctctggatttgcagcgatgctcaccgaatcccaagctgaggaacttgcaagattacctgaagtcatcagcgtgaagcctaacacttaccatcaagcacaaacgactcgaagctgggattttctcggccttaactacaacgaacaatcaggtcttctaaagaaagcaaagaacggtgaagatgtcattgtcggtgtcatcgattcaggtatatggcccgaatcacgaagcttcgatgacaatggctacagtcccgtgccagcacgatggaagggcaagtgccagaccggcgcggcgttcaacgccaccacgggttgcaacaggaagatcatcggcgtacgatggtactcgggcggcattcccgacgagaacctgaagggcgagtacatgtcggcgagggacctcggcggccacggcacgcacgtcgcctcgacgatcgtcggcgggcaggtacggaacgtgagccacagacagggcggcgccctggctgccggcacggcgcgcggtggggcgccgcgcgcgcgggtcgcggtctacaaggtgtgctggggcctgcgcgcccagtgtggcggagccgcgatcctcgccgccatcgacgacgccatgaacgacggcgtggatgtgctgtccctgtcgataggaggcgcgggcgagcattacgagacgctccacgccgtggcgagagggatccccgtcgtgttcggtggcgggaacgacggccccacgccgcagatcgtgaggaacaccgtgccgtgggtcatcacggtggccgcctccacgatcgacagggccttccccacggtgatatcgctcgggaacaacaagaaatttgtggggcaatctctttactacaatgcaacagcaagcagcaccaaatttcaaatgcttgttgatggatcaagctgcgacacgcagacgttggcgtcgatcaacatcaccagcaaggtcgtgctgtgctcgccgccgtcgctgatgccacctcggctgtcgctgggcgacatcatcggccgtgtcatcaaggcaggcgccaatggcctcatcttcgtgcagtactccgtcagcaacgcccttgattttctgaatgcctgcagccgcgccagcgtgccatgtgtactggtggactacgagatcacacgcaggatcgagtcatacatgaccagcacaagcacgcccatggtgaaggtgtcgtcggccatgacggtggtcgggagtggggtgctctcaccaaggatcgctgcattctcgtcaagaggaccgagctccttgtttcccggaatactgaagcctgatattgctgcgccgggagtcagtatcctcgcagctgtgggtgattcgtacgagctcaagtctgggacgtccatggcgtgcccgcatgtatcagcagtggtggcgttgctcaagatggttcacccggactggtcgcctgccatgatcaagtccgccatcgtcactactgcttcggtgacagatcgttttggcatgccaatccaagctgaggcagtgccaaggaaagtggctgacccattcgacttcggtggtggccacatcgaaccgaataaagccattgaccctggcctagtatatgacattgatccaagccactacactaagttcttcaactgcacccttcctgaagctgaggatgactgcgagtcctacatggagcaaatctatcagctcaacctcccgtcaattgcagtgccaaacctaaaggactctgtcacggtttggcggactgtcaccaatgttggagaagcagaagcaacttaccatgcagcgcttgaggcaccggttggtatgactatgtcagtggaaccttcggtgatcacattcactaggggtggtagtagaagtgtaacatttaaggtgacattcacaacaacacagagagtacaaggtggctacacgtttgggagtttgacatggctagatggtaacacacactctgtgagaattccgattgcagttcgcaccataatccaggactttgttgctgatacttcataaacttttagctagagatagtaaatatcttcatgcaaagttgggttgtacatttttttacagaagtcaatgtgatccatgtcaatctggt

SEQ ID NO: 21865 - DNA, 4161 bp, Oryza sativa
  ref <308>: DATABASE ACCESSION NUMBER: AK072093
  ref <309>: DATABASE ENTRY DATE: 2001-12-06
gggtcgtcaccaccgtcacgccgtgccgtgcagaccatcctctctctcctccattaccatccgctccccccgactccgacgccgcgcaggtgcagcgcaagcatggcagagtaaggcggagacagcgtcgcaagcagaagcagctctgacactcgccgccagattccgctccccaaacaccgcactccaattccctcttcgtcgggtgcatcggccgcccaccaagccccgcccgccgaacaccatggccgccggctacggcgagcagccgctgccgctggtacaggaggccaccgcccgaatcttctccggtggcgcagacgcgtcccgcaccaccgtccgattggcccacttcctcctcccccgcgcgggcgcctcccacccgcccgctctcccgcccctgcctcccagcgatttcggcccgtcctcgacgacggcctcaaggtcgagttcaagggctgggcgccggaatcccccaagctctggaggcggtgggtcgccaagctccgcccgcgccacgagcccctgtggcgtaaggttgggatcctcgacgccgtcctcgccaccacgtgccgggtgcgccgcgacgagggcgcgctgctccagctcgccgccttctggtgcggcgagaccaacaccttcgtgttcccctggggtgaggccacggtgacgctcgaggacgtcgcggtgctcggcggcctgccgctgctgggcaggcccgtgcgcgcgccgccgcaggacgcgctccgcggcgacgtggacgcgctcgaggccgtacgccgcgctctctacctcagcaagaacaagaacagcaggcccgaccgtaccgcttgggcgagacatttcctcgagcgccctccggggaaggtcaaagtcggcggcggcggcggcgacgaagcgtgcgggcgcctcgagcacggcgcgttcctggccatgtggctgtctctcttcgtgctaccggcggctccgttcgatgtggtccggacggaggtgctcccactcgccgcccggctggcgcgcggccgcggcgtggcgctcgctcctgctgccctggctagcatatacagtgatctctccgcgctcaagcgctacatcaatttggagaaaagatatcaggccttcgtcgtgtgggcacccctgcaaatcgttcagctttggctctggaagcggttccctgagcttcgccctcctgagaccacgggcaccaatcaacctgacggccatggcatacccacggaatcccagtggcaaaatgctctcaaggtgcttgaccccgtttatgtccacgcagtgttcatgtcacccaagaagtttgaatggaggccctatgggagtagcagcttcgcgctgcggccagagatgggtagccatcgtgttcacggccaagatatagcagaaagtgcagaattgttatccttcatactatgtttacgtgcttgtgagcttgtgggcatgcgctgcattgagcattaccgtccgcatcgtgttgcaaggcagctcagctttgaccaggatattcctggaactcttccccgtgttaactcaaactgggtggctgcatgggaaacatacaaaatggagcctaagaaatttgtattcattgttcccaagtacaagcccgctgttacaattgattatgtgcaatggtggaagccttacttgttgggatgtgctgctgctgttgttaaagctaggaagatgaaagaacttccacttttacttagtccaagaaaaagaaagattgatgtgcctcctgatgttagtccaaaaagggtaggaaatggtgcaaaggaaaaggcagtggaattgtcgtttgaggcaccaataggctcagtaagcacaataaacgaattatcttgtgtatcagccaccaaaatagtacaaggcaaatcttttcagcaaggtaataaggaaccaccagaccttgtcgttgcacatgacagagagaatagaagctcgctacatagtgaagtactgcaaaatctccttgttgaggatgccacaaacactggcagcaatgaagccttatgtgcagtaactatagctgatatgcactcaacagaagtgtcgtttgatgttccagttgccttagtaagcattgtagatgaattaccttgtgtgtcagcctccatagaagaacaaggcaaaccttgccagcaagataaagaggaagcacacaacctttctgtcacacatgacagggagaatagaagctcgctacatagtgaagtactgcaaaatctcgttgttgaggatgccacaaacactggcagcaatgaagccttaggtgccataactgtagctgatatgcactcagcagaagtgtcgtttgatgttccagttgacttggtaagtattgtagatgaattaccttgtgtgtcagccaccaaagaagaacaaggcaatgattgccagcaagataaagaggaagcacgagacctttctgtcacacacgacaaagagaatagaagctcagtagtttatgtgcactcaacacctgttgtggctgcaaacactggcaacaacaaagcctttggaccttcacccataattgatgtgcagtcagcacctgaagacgttgtggtgatcagcgatgacgataatgaggatgaggtcggtgggatgcaccaaaaaccaccgcagttggaaacagcaccatcctccttagaagggcaaaatgcagaaagtcagataatcagtgcaagcagtaatcctcaggacagccgagtgatgaaagatgttagggtccaaagcaattgtgatcacgaaactgataatgttcgaagcaatattgttctcagaaaagaatcatttgaagtacttgctgttgatactgtccagcctggttttaatctcttggatacaccaacaggggaaacgcagacatgcgctgttacaggacagatagacaagggatacatggtggaaaaagaaattttggctggtgtggaaggtatcaaaaatgtaaatgaagacgtgtccccatcatttcaagaaataaactctcctgtggaagattgcatggtggccaatagaagaatgggctcaggaaacaactattctagtggtttggcacatgtgaatactcaattgatcaacagagtagtttgtactaggacactatactatcttagaccattttggttgtcaaaacatggtcagaacaaagatgcaagtgacaccactaccgatgaaggaactttccaaccaagacgggaagttgggacgccacaaatgattgaagaggcatttgcagctcgacaagcccaaaaagttgagttgcaaaaggtaattgatcgcctgaaggaagagattgtggcactagaggttccatgagaggacaggtgctcctcaataaattgagaattaggatcacagtggaagcacatccactagaagcccccaactgaccaacggcctcgaggcaccatggtggccacccattctgactccagccagcggccagcggaggcaatgagccgatgagggaggcagctaagcgaagaatgaatgtgttcagatgctgctcgatgcgaaaatggaggtatgatctatagattcagcagtgatttttttatgcccgacttatcatctgatcatggattagtgaattgcatcattggtacttcatgaaagaaattgtcgaggaagacttgggagtgtggtaggttgcagggaagaaccgcatgttggtgaatgagcttgaagcgttgaatgtgtattgtttttgcatccaacctgaaagatgcagatttttgcctctgataagtggaatgcatttagttgtttttttgtccattggatcgacatatatgaacattcagcagtaagaggtccttaagatggccacttgatgacatggaaaccctgttggtgcgatcaacgttttgacgagatctgttgctcttcggaaaagagaactttttgaattaatttgcttatccgaaagaagtgtgttcatggttaatatgcatacctttgagcacaaatgacttatgttaagggttgattaaccacttttgtacttttttttgggaggaatcatttatctacttgttacactggtaatacttgaccattaactgaaaacatgcaatctgctttatcatccacttctgaattttatatgtgaatggatgcagaactctgctttagctaacc

SEQ ID NO: 21866 - DNA, 4261 bp, Oryza sativa
  ref <308>: DATABASE ACCESSION NUMBER: AK072094
  ref <309>: DATABASE ENTRY DATE: 2001-12-06
gtttcgtttccaccaccaccccccaccaccacgacgcggatggcatcttcgtcgtcttcgtcctagcgcgcggcggccgccacgcgaccctgtttgagagggggaaaggggggttccgctcggctaggcggaggaaggacgcagccgcccctgtcccgcggcgaatttggatgatcgaggcccgccgtcgagggtaaggagtgatggaggaagcggcggcggcggcggcggatttcgatggcggcttcggcggcgccggggaggacaacctgtccatgcccctcggcgacttcatggccttcctcgataacgaggactggaaggagcagcagcacgagggcaatcaaggtttagagatgccagtggacagcacaagttctgaaaatgcatttcaaaaccatgaagatccttcacatagtcagatggatgtaatggtggaacttaacaatggtggagaatcttttgatcactcagaggatacctcttatagattgcttagcaatgattttttggaaaattcaaggaatggtaatcctgagatgcatttaccaatggatgcattaaaccatgctaaaactgttgatgaagaaattgtccctccatatgaagattatacaaatggtttatactatgattcgggatgtgatatgttcgcagagcaatctggtttaagtgaagttaaatgtgagggcacaggtcccatgcttggtaattctgagcaggagggtaaccatttcacgtcagtgcctatgtttgaccatagtgctgttatacctgatattccttacaccgagttgaacatcggtgatgtgcctggaagcatgcagaatggaaatggcagttgcctaactgtacaaggagaatatctgcagggggagtatcaggagtatcctcagccagattatggatcgtttgatatggctaatgaaatagtgctgcatgatttgccacaaaacaatcagtcatatgagctggaacaattaccacagaatatatgtgaaagcagttcaatgcaagtgggctctccagatcaatattgtgatgatacatctctgtcggattattacatggatgatgtatcttcgatagagtcgatgtccagcgagcagaaccgatcagaagatatctgtttccggagtgagtctagcactgactcttctccggtgccctcaagcagaaactccaccactgaggatgctgataaatactttggagatgcaccaaaacatttgcagaattccatgtttcctgtcagtacccaacaccaacactcattcatgaactcaagtgatccaatgcatccaacttttcataaaaagtatgacattcctagaaatggcagctcttctattctgggtaactcatcaaggaattgcttcagtttagatagcaatcgtgattctgatttatgtattcttgagggtagtagaagtcttgctagtggacatgtgttgccaccccaaggattgcagcataactttcaacaatctgtgtgtgccaatcctaatcttcctcggtttggagggagatacaggccgcatgaggaaagaatgactttgcggcttgcattacaggatatttctcagccaaagtctgaggctaatccacctgatggagttttagcagttcctttattgaggcaccagaaaattgccttgtcatggatggtacaaaaggagagaaatggttcgagttgctctggcggaattcttgcagatgatcagggcctgggtaaaacagtgtcgactatatcactgattttgacagaaaggtcaccagttccatcttcagctgttaagcaagaaccatgcgaagctgtaacccttgacgatgacgatgaggatgacgatgctgagcctcatttgaagaaaccggcactagcacatctagcagatacatgtaaacctgaagcgacaagtagtaccattaagacagaaaatcctattgcaaatgttaaggctagaccagctgctgggactttggttgtttgccccacgagtgttctacgtcagtgggcagatgaactgaggaataaagtcaccagtaaagctaacttgacctttttagtatatcatggtagcaaccgcacaaaggatcctaatgatcttactaaatacgatgtcgtgttaaccacatattctatagtaagcatggaagtaccaaaacaatcaagtcctgatagtgatgatgaagagaaagggaagcctgacaggtatggtgctcctgttggctcctcaggcagcaaaaaacggaagacttcctcttctaagaagaacaaaagtggaagcacaccagagagtaaattgcctgagaaacctctcgcaaaagttgcatggtttagagttatccttgatgaagcacaaagtattaaaaattatcgaacccaggttgctagggcatgctggggtctgcgagccaaaagaagatggtgcttgtcagggacacctatacagaatgctgttgaggatctctatagctatttcagatttctcagatatgatccatatgctgaatacaaaaaattttgcttcatgataaaaacaccaatcagcaggaacccaattactgggtacaagaagcttcaggttgttctgaagacagtaatgctgaggaggacaaaagcaacgatgcttgatggaaaaccaataatctcattacccccaaagaccgtctctcttaagacagtggacttcactagtgaagagcgtgctttctataacactctcgaagcagaatcacgagagcagttcaaggagtatgcagctgctggtactgtcaagcaaaactacgtcaatatcctgctgatgcttttacggctcagacaggcatgtgatcaccctcacttagttcgaggtcatgagtctacttctagttggatgtcttcattggagatggcaaagaagctgcctgtagaaaggcagcaatcgttgctggtttgcttgcaatcgtgttctgcgatatgtgctctctgcaatgatgcgccagaagatgccgttgttactatatgtggtcatgttttctgcaaccagtgcatactggagcaacttaccggtgatgacagtgtatgtccagtgtccaattgccgagtccgactaaattcaacttccttattctcccgaggcacccttgaatgtgctctgagtagatcaacctgtgagtttctgtctgatgattcctgtgaagacatggtgcaagggaagcaacctagatttgattcgtcttatgcatcttccaaagtgagagctgccctggatattcttctctcgttgcctaaactggatttaacccatatgagtgatgacaaaaataaaattgtgcatcctgacaaaattaacgggaatagtactccctctgaatatgctggcaccaaaataactgagaaggccatcgttttctctcaatggactagaatgctggatttggtagaggttcatttgaaatcttctcatctatcttatcggaggcttgatggaacaatgtccgtcgcagctcgggatagagctgtaaaagacttcaacacaaatccagaggtttctgttatgattatgtctctcaaagctgcaagtcttggtctgaatatggtggcggcctgtcatgtacttttgcttgatctttggtggaatcctactacagaagaccaagctgttgacagagcgcatcgtattggccaaactcgacctgtcacagtgtcacggttaaccataaaagataccgttgaagatcgtattttggctctccaggagaaaaaacgggagatggtggcttctgcatttggggaagacaaatctggtgcccatcaaactagattgacggtggaagacttgaactatttgtttatggtttagcatttctcctgagattggacacaattttgctcgtgggatggtgtaacttgcatctataggtgaaatatctgtcaggagatagcatttctctaggcgtctagtgtttctagtttgtacaggtgctcagattttgtagttaaaggtggcattgtggtgcgattcattttttctccgtgcaagtggcaactcatcaggtaatttttcgatgagctgcagtggtgtcttttgatcatgaagatacaaaggagaacgtcattagctaacaccatatttgtacatagttttcaccagcaatcttaactcatcttgagcttcgcatttcagccgtatggttgtacatcataaaccatgtaaaagattaagctgaacttgtcttcgacaatttttttcagttgatcaaacatgatagtttatgg

SEQ ID NO: 21867 - DNA, 2781 bp, Oryza sativa
  ref <308>: DATABASE ACCESSION NUMBER: AK072095
  ref <309>: DATABASE ENTRY DATE: 2001-12-06
gatttcttctcaactcgcctcagctgcatcctcatcttggtcagtgagcgagtgagtgaagtgcagagctatgcctgtgctgcggcggtgagctttgcagcgacctcctctctctctgctgctgccggcgacggcggccatgaagggcgtcgacgatgcattcctcggcgtcggcgacaagccgggactggacatttggtgcattatgggtagcaatctaattgcaattgaaaaatcattgcatggcaagttctacactgggaacacctacatcatactaagtaccgttgagcttaaaagcggagttcgccagcacaatgtgcactactgggtaggggaggaagccaaagaggaggattgtctgacggcctctgacaaggctattgagttggatgtagcactgggctcgaacacggtccaatatagggaaacacaaggcgaagaatccgacaagttcttgtcatacttcaaaccatgcatcatccccatacaaggtagcttgtcttcgcacatgagaatatatggagataaatcaaaggatacaacaatgtttaggtgcgaaggagagcatgtagcccgtgtaacagaagtaccgttttcacggtcctccctagatcacaaggcagtgtttgtcgtggacacggaatcaaagatcttccttttcagtggatgtaactctagcatgcaaacaagggctaaggctttagatgttgttaagcacctcaaagagaaccgacattgtggcagatgtgagattgcgactatagaggatgggaaacttgttggtgactctgatgctggtgatttctggaacttatttggaggctatgctcctattccccgtgatgtacaagacacggttatgacagaactgatgactacctcatccaagaaactattttggattaacaagagaaaccttgttcctgtggagacaaatctgttagaaagagaaatgctgaactcggacagaaattacattctggactgtggcaccgaagtattcctatggatgggtatgacaacactggtttctgagaggaggacatcagttactgccctagaagattatgtgcgttgtgaaggaaggcaatcgaatgcacgttcagttatattgacagaaggtcatgaaaccgttgaatttaagatgcattttcagcattggcccaagaatgctgtgccaaagttatacgaggcagggcgggagaaggtggcagcaattttcaagcatcagggctatgatgtcacagaaatcccagaggataaacctcgtcacttcatcagttgtaatggtagtctgaaggtttggttggtggacaatggttctgtaaccctgctttgcactgaggagcaggaacaactatacaatggggactgctatatcatacggtatagctacatcgaagacggaaaagactatcatttgttctttgcttggtctggactgaacagcataaatgaagatagagttgcagcagcgtcactaatgtcaggcatgattgattcagtaaaagggcatgcggttgtggcacaagtattcgagggcagagaacgagaaatgtttttcctagtattcaagtcattgatcatattcaaggggggcaggagtatggcatataagaacttcgtttctcagagaagcgatgcaaacggatggtaccagaaaaatggggttgctctattccgggttcaagggctgaaacatgattgcatacgagccattcaggttgatctggctgcaagttcacttaattcttcgcattgttacattttgcaagctggtggttctttctttacctggctaggaagcctttcttcaccaagtgaccacaatttacttgacaggatgatggataagttgtgtccactgaaacaatccttgttggtaagagaaggttctgaacctgatcgcttctgggaagcattaggcggaagatcagaatacttgagagaaaagcaagtcaaggattggcctgcagatccacatctgtatacttgtcatttcgaacaaggtctcttcaaggcaaaggaggtattcagcttctctcaggatgacctggtaactgaagagatattgatactggactgcgtcgaagaactccatatttgggttggacatcaatctggtgttttatccaaggagcaagctcttgatatcggcaagatgttccttcaggcaggcattcatcaggacggacgacggccaatcgacacgacaatgtatatcgtcactgaaggggatgagcctagatttttcacgagcttcttcaactgggattattccaagcaaacaatgcttggcaactcatttgagaggaagctggcaatcctgaaaggaatttcacaaaagctggagacaccggagagaagcctacgcaaatcatcatcgtcttcgctgccgagaaggtcgccggggacatcgtcgtcggagccgaccacgccggagcagcgagcggcggcgaggacgttcgcctcggcctctaccgggaagctactcagggagagatcaccggccgcgctgtcaccgtcgctgtcgacgccttcgccgtctccgagaagccgctcctccgcctcctcgtcgccggcgtcgtggaactcgacgccgtccacggtggcgcggcggctcttcccgccctcgctgcacgcgtcggcggaggcggttgccaccgggacccctcgccggcggtgagcttcagctaacgctcacctgcaactgcatatgcctgtaccattaagaatttgagattcagatgaaattcaaagaacatcggccatcttttt

SEQ ID NO: 21868 - DNA, 1830 bp, Oryza sativa
  ref <308>: DATABASE ACCESSION NUMBER: AK099243
  ref <309>: DATABASE ENTRY DATE: 2002-08-28
tgaggtattccttcgctcgcgatctctctcctccccctctcgaattttgatctcttcccgtagaattttcgcttcgtgtgtgtgtgtttccgttcgattggatcggtgctggtagtacttgctagcatgatcccccgcgtgatctgtggccgtttggtgggatcgttttccatctgaattctcagctaaaccctgctgttttcgtagcgatttttttttgctaggcgtgctttagtggtaggtttgtctgcacgaatcgggtgggtctctggtggttttgaagtgatctgtgtgcggttgatgtgattttacggagtatggttggatccgtcaaaaacctgagttctgtaggggttctgtggttctggtccatgtttgcttctcagaattttgcttataattttgatttttctcgtcttgatctattgttagattgactctgatgtacagttagctcgggaatactgaagctacgattgcggggcagtaattcaaaattgctctttgaaatgtgctacggtaccaaattcaaaaatcaaacttgagatcattggcttgcccacttgaaacaggaattggatggatttcccaacaatgcatcattttctgttttttgcttctgaatttatgcctttattctgcatcgtggattactctttaaattgtttgtatggatcctccaaagaacggttagttcatcaccgtttttgttctttgatcttgcagacttggcatttgtagagtttttagatttatagatagcaaagatgtcggcacaggcggagctttcccgtgaggagaatgtgtacatggccaagctcgctgagcaagccgagaggtacgaggagatggtcgaattcatggagaaggtggccaagacggttgactctgaggagctcaccgtggaggagcgcaacctcctgtctgttgcatacaagaatgtgattggagcccgtcgtgcgtcatggcgtattatctcctccattgagcagaaggaggaaagccgtggtaacgaggaccgtgtcacactcatcaaggactaccgtggcaagatcgagactgagctcaccaagatttgcgacggcattctcaagctgcttgaatcccaccttgtcccctcttccactgcccctgagtccaaggtcttctacctcaaaatgaagggtgactactacaggtaccttgccgaatttaagaccggggctgagaggaaggatgctgctgagaataccatggtggcatacaaggctgctcaggacattgctttggctgagctgcctcctactcatccaattaggcttgggctagctcttaacttctcagtgttctactatgagatcctcaactcgcctgatcgtgcttgcaacctcgcaaagcaggcttttgatgaggccatctcggagctggacaccctgagcgaggagtcctacaaggacagcactttgatcatgcaactcctccgtgataacctgaccctgtggacttcagacatctcggaggacaccgcggaagagatcagggaagctccgaagcgcgactccagcgaggggcagtaaagccggctttatgtgccctagaagcttgtagctagtgctttgctactgtgtaatgacacctatgtggctgtgattgttgtcgggaaatctggggctcccccgtatgtgaggttgctagcgatggttttgcagtctcgcctttaagctactcgtagcagagcaggtgggggtctgtggagccaggcctggttgggggtgggggagcctcttgaactgcttggtggcacttcctgtttttctgtttgcctttttattggtgtttattgttatggtc

SEQ ID NO: 21869 - DNA, 2115 bp, Oryza sativa
  ref <308>: DATABASE ACCESSION NUMBER: AK099244
  ref <309>: DATABASE ENTRY DATE: 2002-08-28
gagtatactctcactctgtctcctcccccgcgtcggtcgcttcgcttctactggaggagagcagaggtggtggttggtgagagaggatgcgcggcggcggcggcggcggcggcggcggcggcgaggaggccggccagaagctgaagagcatggacgtcgacaagctggagaacggcggcgacaagcccgccctcaagtaccacggctggagggccatgcccttcatcatagggaacgagacgttcgagaagctggggacgctggggacgtcggcgaacctgctggtgtacctgacgcaggtgttccacatgcggagcgtggacgcggcgacgctgctcaacggcctcaacggcaccaccagcctcgcccccatcatcggcgccttcctctccgacgcctacctcggccgctacctcgccctcgccatcgcctccgtcgcctccctcatcggcatgttcttgctgacgatgacggccgccgcggacgggctgcacccggcggagtgcggggtgggggagacgtgctcgaaggcgacgtcggggcagttcgcggtgctgttcatgtcgttcgcgttcctggtgctggggtcggcggggatccggccgtgcagcatgccgttcggcgccgaccagttcgacccccacacggagtccggcaagcgcggcatcaacagcttcttcaactggtactacttcaccttcacctccgccatgctcgtctccgccaccgtcatcatctacgtccagagcaacgtcagctggcccatcggcctcggcatccccaccgcgctcatgctcctcgcctgcgtcctcttcttcatgggcaccaggctctacgtccgcgtcacccccgagggctcccccttcaccagcatcgtccaggtgttcgccgccgcggcgaggaagcggtcgctcaagcagcccaaggaccccaagcaggacctgttcgacccgccgcacaccagcgccatcgtcaccaagctggcgcacacggaccagttccggtgcctcgacaaggcggccatcgtgtccggccccgacgacgtgcgcgccgggggcgccgcgccgtcgaacccgtggaggctgtgcagcgtgcagcaggtggaggaggtgaagtgcctcatccgcatcgtgcccgtctggtccacggggatcatctactacgtcgccgtcgtgcagcagtcgacctacgtggtgttgtccgcgctgcagtccgaccgacacctcggccggagcttccagatccccgcggcgtcgttcacggtgttcgccatgctggcgcagacgctgtggatccccatctacgaccgcctcctcgtgccgcgcctccgcagggtcacgggcaaggacgagggcctcaccctcctgcagcggcaggggatcgggatcgcgctgtcgacggtggcgatggtgatgtcggccgtggtggaggaccggaggcggcacatcgcgctgacgcagccgacgctggggacgaccatcaccgggggcgccatctcggccatgtccagcctgtggatggtgccgcagctcatggtgctggggctctcggaggcgttcaacctcatcagccagatcgagttctactacaaggagatcccggagcacatgcggagcgtggccggcgcgctcgccttctgcaacctggcgctggggaactacctcagtgggttcctcgtcaccatcgtgcaccggaccaccggcgccgggagcaactggctggcgcaggacctcaacaaggggaggctcgacctcttctactggatgatcgccggcatcggcatcttcaacatcatctacttcatgatctgcgccaagtggtacaggttcaagggggcagccgccaactgagatgcaagtgaagtgaagtttgttcgtttgggtggttaattaattatgtcaatggcagataattaattggtggagtgcttttagctgggtttttttttttctgcctcatcatttctctcttgtatttttgtatctgtggtgtcttgaattataaaatctataggattaagtgggtgaggaaagagaaggaaagaaacaaaagggttggtttcttgtaagtggttaaaattcaaagataaatgaatcttcaatcctagtaaatcgc

SEQ ID NO: 21870 - DNA, 1413 bp, Oryza sativa
  ref <308>: DATABASE ACCESSION NUMBER: AK072096
  ref <309>: DATABASE ENTRY DATE: 2001-12-06
gaacttaacccaaattaaaccctagccatccacctccgaccatcccccccccccccccccgcgtcccccgatgccgctctcctactcagccgccgccgccgccgcgccgtcccctctcgccgcgcgcagccgcggcctcctccgccgaccgccgcgctcttcccccgtcgtcgtgaggtgcaagaagattgatcaactgagggcagtcaatggaataccaccatacgctccagtgtctaacagatcgttgttaagtcctgtgacgctgccgattatccgggatgcgaatattaagaatgatacaaggttgcgtatcttctcagggactgccaacccttctctttcccaggaaatagcaagttacttgggcttagaacttgggaagattaacataaaaaggtttgctgatggcgaaatatatgttcagttacaagaaagcgtaaggggatgcgatgttttccttgtgcaaccaacgtgccctcctgcaaatgagaatcttatggaacttctgatcatgattgatgcctgtaggagagcatctgctaagaatattactgcagtcatcccttattttggttatgccagagctgacaggaagtctcagggccgtgaatctatagctgcaaaacttgtagcatgtttatggtcagcctgtgattcttgattacctcgccagcaagacaatatgttcagatgacctggtggtggtgtctccggatgttggaggtgttgccagggcacgtgcttttgccaaaaagctatcagatgcacctctagcaattgttgataaaagaaggcatggacacaatgttgccgaggtaatgaatcttattggagatgttagaggaaaagtggctgttatgatggatgatatgattgatacagctggaactattgccaaaggagctgagctgctgcatcaagaaggagcaagagaagtctatgcatgctgtacacatgctgtttttagcccgcccgccattgaaaggttatcaagtggtttgtttcaagaagtaatcatcacaaacactatacctctcaaggaggacaagagtttcccgcagctgactatcctttcagttgctaaccttttaggcgagacaatctggcgtgttcatgatgattgctcagttggtcatgagccatactctagcttggacattgactgaagctcaaggtgtatcacgcccaatccccaatttttggcttttctccacctttggtttcgtggaataagctgtgtaatctgatgctcctactagtgcaagaacttttgagtatttcaatgaaccatagtacataagatcgaaatttaggtagtttggtttgctagcatgctcagtgtaatgtacatattgtttccacgtgatccatttatttctttgcaaagatcaatgctgaatggttcaattt

SEQ ID NO: 21871 - DNA, 1259 bp, Oryza sativa
  ref <308>: DATABASE ACCESSION NUMBER: AK072097
  ref <309>: DATABASE ENTRY DATE: 2001-12-06
tggtcgtcgttcggcctaattcaacagttgcatttcgtaactttgaagaggagtcaaggcaatctgctgtttgggattctgagcagaatgctgcatctagttctcgtgataatctggcggcattgtatcgtccaccatttgctttgatgttcaatggacccttcgacaaggcaaagttagaggcttctgttctggacaagtggctcttgatcaatttgcaatcgactgaagagttcagctctcacatgcttaatcgggacacttgggctaatgaggctgtggctcagacaattcgatcgaactttattttctggcaggtttaccatgacaccagtgaggggaggaaggtatgcacctactacaatttggtctctgttcctgccattcttctgattgaccctatcactgggcaaaaaatgcgtgggtggaatggaatgattcacccggaccgtttgctggaggatttgatgccttacctggacaaaggtccaaaggagcaccatgcagctcaacctcaaaaacggccaagaaaagttgatcaggaaacttctatcggcaaacaaggtaaaacccctgtacccgtagtagccacagaggatgaagacgaagaactagcacgggcagtagcggcttctcttgaggagagtaaaggctctgacactagtgaggaaaagattgaacctgaggtagaaaatgagcctagcctgagtgctaagctgaactatcctcctctccctgaagaacccaaaggaagtcgggagcttttgtgcagagttgcaattcgcctacctgatggtaggaggatccagaggaatttccttcacacggatcctattaagctcctgtggtcattctgctatcctcaagtgggggacggggataagaaggctttccatttcgtacagcccattcctagggcatccacaaacctggagtacgagagtgataaaactttcaaagaagccgggttggccaactcgatgatcaaccttttgtgggactaaaagcctattttatcaactcatgttatttctttattggctccaagtcaagattatcgagtgattttctgtgagggttcataattgcttctcttatttttctttttccctcctggtgcttggagccaaatgacgaatctggtttctttggtgtggaaatgcccatattccttttgtagtggttcctagtatgtttatagaactcttgagtaggtttactccagttctcttttaatgcatataatattattatacctg

SEQ ID NO: 21872 - DNA, 3990 bp, Oryza sativa
  ref <308>: DATABASE ACCESSION NUMBER: AK072098
  ref <309>: DATABASE ENTRY DATE: 2001-12-06
gcttcccattccattccccaaaccaacccaacccaccaccaccaccaccggcgccgccgccgccgccgcctccccctcacccccattccttcctcgccgccggcgccatgcccggcgcggcggtccacgcggtggacccacggggcggcgcctccccgccccccgtcgccaaggcggaggcggcgacggctgcagcggcggcggcgggagggtgcgagccggcgcggaaggcgggggcggtgaccatggagcacgtgctgctggcgctgcacgagacggaggcggagagggaggcgcggatccgggagatgttcgccttcttcgacgtggacgggcgcgggcagctggactacgcgcagatcgaggccgggctcgccgcgctgcagatccccgccgagtgcaagtacgcgcgggagctgctccgcgcctgcgaccgcgaccgcgacggccgcgtcgggtacgacgacttcaggcggtacatggacgacaaggagctcgagctctaccgcatcttccaggccatcgacgtcgagcacaacggctgcatcctccccgaggagctctgggacgcgctcgtcaaggctggtatagagattgatgatgaggagcttgcacggtttgtcgagcatgtggacaaggacaacaatggaattattacttttgaagagtggagggactttcttttgctatatcctaatgaagtaaccattgagaatatttatcatcactgggaaagagtatgtcttgtagatataggtgaacaggctgttataccagaaggcataagtaagtcggtcaatgcaagtaaatatctgattgcaggagggattgcaggtgctgcatctcgtactgcaactgcacctcttgaccgccttaaagtgatcatgcaagtacagactacacgaactacagtcatgcattcaattaaggatatatggagccagggtggcatgttagcattttttagagggaatggattgaatgttgtgaaagttgctccagaaagcgcaataagattttatgcctatgaaatgctgaaagaatatattatgaagagcaaaggagaaaataagagcgaagttggtccttctgaacgtcttgtagctggtggtttggctggtgcagtagcacaaacagcaatttatcccgtagatttagtgaaaacacgactgcagacttattcatgtgtggatggtaaagtacctagtcttggtgcattgtcaagggatatattgatgcacgagggtcctcgagcattctatagaggtctggttccatctttgcttggtattgtcccttatgccggaattgatcttgctgtatatgagacattgaaagacgtatccaagacatatatcctgaaggatagtgatcctggtcctctagtacaactgggctgtgggactgtatcaggagccttgggggcaacatgtgtttaccctttacaggttatcaggacaagactgcaagctcaacgagccaattcagaatctgcatatagaggtatgtctgatgtattctggagaacgctacagcatgagggtgtttctggattctacaaaggaatcctaccaaatcttcttaaagtggtgcctgcagcaagtattacctacctagtgtatgaagcaatgaagaaaaatctctcccttgattgaattacggagctgtttggcaaatcggccatcatttattgacatggctgactgtagagataatgacgatacatgattttactggttaagtagctacttttttgaagtgcaagacggtgccttcaggacagaatttgaagctatggtggcatctctcttaattttcatttcccagaaatgaagcgataaccatcagatcattgagacatctttgctggcgtactggtacaattcctaactgtcatgttatatcacaacagttatacttgacatgcccttctgttctttataacaactcctttttgtacatacacaactactttatgctgctgcacatacttggaagtgaatagtgaacaacatagcttatattagcagccacagcgactagagctgatgatgtttcttaggagttagcttatgtaattatgcttaatcagcaagcttgaaaactgagcattttgtcctttttttcccttgatcctgtgacagagaaacccagtgggtactggaagctaaatgcctaaaatttgctgatcctggtgtacagtttaactgtgctcatatggatagttaatactctataatactttagtcttctagaagtggaacatactgtaagagacagctatcgtatgcataactttttttttgtatcatagctgaatacaccttggtatcatgaatagacttcaaaaaaagtgaaagacttgaaaaggactatgttaatactttagtttattatttagttaagctgcaggatattcagaggtatgagtatggacccagtataagttaaatgtgtgtgcatattaatggccaaagtaagatcgaatttgactgatactagatctggaatcaaatatgttaatggccaaagaacctgaaaggtacagacggaaatccattccatactgtttttgcagctaaatctgcttgctcgtcctcctcctccgatcttgtctattacattaatgcacacaagagagcgtctaaacattaggacatttaaatttcattatatgtgccaatcacggaatcacctgccatggaagtgactaaatatttttttttcctgttaataatatttgtatgtcctggaatatcaatgggatcagttctgtttggaagcatgatctctatatgactttataaggtgatgaaatgaaatgttgtttgctttgaatgaagaaacattattaacttgtgtagaatagttagcttgaaacgttatgagatttgtggtctattttgtctccttgaaaaccgtatgtataagtggtacttctgttctagatgccctggtacttcaaaataataggaataaaaacaacaatttaattatcttttctttgttatgagccttgattccagatttcaggacttgggagcattgccgtggcaaactagtactaagtatgcccagagtttaacgaatcttagtttgtactcattgtcccatacaattcatgcaactgataacaaatatgcttgttgaaatctgtcgaatatacagctggctcttttcatgtgtcaggttctaattgtattattggagccaacttcatagcattactgcaatattgtttgccaatagtttcaattccactccaaatgaactatgttacctactctctctgtccacaaatataaggggattttagctatgcacctgggagcacttgtccatgtatatagtcaaaataccttatatgtggacggagggcctgatccttggtgaattatgatactgttctaattcaagagttagtttatgaacatgataatttgttcagttatttaaacttgtaactcatgttctcacagatctggacaaattctcttctttatgactcatttcctttacttttgacatttcagtaaggcatcgtttgctccgagttagctggtcctcgtgaattcctgaaggcttattttgcccctgtcctggggtgagttttgttagtcaaactgtaaaacacaggaaaacactctttaacttaatttaccattccttgtgctcctgaaattaaagaggagcttgacctttactgacgacgaaattgccctgcagaaagggtgctggttatacatgcctgtattgccccttggctacatgccaaaaaagtcaatgcctactgtatgtaataatctgccagctttaccaatataacttccttatggttaccctgttaaatgaatacgcaaatgacccggtgagcagtgtaaagacggtaaaatgcccctcaaattgtatgtgtacatgtatatatatgtgcttagaagttagaagttgatccctttctggactgcttacatggcagtcttctcttgttcc

SEQ ID NO: 21873 - DNA, 2456 bp, Oryza sativa
  ref <308>: DATABASE ACCESSION NUMBER: AK072099
  ref <309>: DATABASE ENTRY DATE: 2001-12-06
ggtcttcctcggcgccgccccatctcagccggacaccgcggcggcggcggcggcggacaggctgttcgcgcagaaccggccgggacgcattgttccgtcggtcgcgcgatccaggccggaggagaggggaggaaggagggggtgggtgagtcaacctctctctctctctgatcggaggtggtagccctcctcctcgtcgccgggaggcggctgatgcggcgcccatggccacggcggtgctcacctacctgcagagcctgtggtcgctctccgctctcctgagggaggacgacctgcgggcgtccgcgcggctgctgcggggcgtccccgtgccggaggagacgaagcagttcgtgctcgcgctccgcgaccgcgagcccggctccggctcgcgcgggggcgtgatctacatcctcgcggcgcagaacctgtccgagcggtcggcctccgacgccgactccctgatcaggcgggtgcgccccgccgccgtggtcacgcagctcgcgcacacggcggccgacgacgtccgggccgaggaggagtgcctcgagggcggcggggccggcggcgtcccggcgtccccgttccaggtgatcaagaggtgcgtcacggagaagaggagcaaggatcagtacgtcaaggcggcggcgtgccaggtcttgcaggagattttcggggtcgggttctacggccatgtcttggccgcgaagagagccgcggaggagacgggctcgtgttttcttttgctcgagtctccgtatgagaggaattgcaatggcggcgcatcgggtggccaatctaccatggaagaaggctcaggtcagcaattggcgagtcgctgctcgctcgctcaaagttcaacggatgatggcacgggtggacagtcacagggtagctgcttgctcactcagagcaccagttcaatcgtaagctcgcatgtcaggaagatatgccttgtggatgacattgggggacaactcgtgaagtcgctagcgccgaccgttaatttgttgatgtcccaggctatctcttctgatggtgtttcagagtgcaaactggctgaatgcaagccatcggacagatacgaggctccaccttttgcacagactgtttatccgttgcttgctgatctttatgatatatttgtggacattccgtcaattggaaaagctatggcttctgctcaggaattgctcagacaagttcatgatgggaagccaatttccactgaaatgctgtctgatgtgtatgtatttaggatcgcaatagaagccctcaggataggtttaaacaacgcaggaagaagccacattgacaccagagataatcatggttcaaaaaaattggatttttcagaactcaactctgaggagaaatgccatattcttcttgtgcaagccctcagaagccaggttagggagtttggttctgtggtggctgtagtcgatgccagttgcttagctggaataaggagacactgggatacccctgttccttcagagattgcacaattagccagcagttgcttcaagcaatacggcaataaaaatgacagtgaggacaatgagctgccatcatcagttgacagcacagataaaaagagttgggtagctgagaaacctgtggtcgtagttggtgcaggaggaacagcgattctgggcttttcatctttatcaaaaactgtacaggcatctgcctttcttaagctggctccctataaaacaccggtggtcctgaagtatggcttaatacagctgcaaaggcatgcttccatcgtgttaagcaaggtcctatcgaatggggtttttagtgctagttcaaacgcatccgttttacaattcacagcttcatcggagaagattcgagcagttactcacactgtaatttcatcagcaaagagaactagcttgatggctatgcgaacttcgttctacgaaataatgcagaagaggcaaaaacaacctttcaggatcactccttgggcaacatttggttgcagcatggctgcatgcgctggtctcctgatgcatggagacgggattgagtgtgctgctgaggtcgcaccttctgttcccatgattgccactctgggacgtggtcttgagatcctgcgcctcacatcgcaggaagtgaggcaaacaaggggccaacatataaaggaagctttgggcgcgctgatgagcaacttaaagaaaacagcaaaataaagacataacaaaaaaataactgagactgtatagatttccatcatgcaattttgttgttagatagatttttttttgttacctctgtacagtgcattcttcttgcttttactgaggtaatcgaattcctacaatgtgttttggggcggttctacttctggagcatttcatccatatcagcccaccaaccttctgtacatacatgtatacaacatatgcctaattgacatctctaatgctttcttcgggatc

SEQ ID NO: 21874 - DNA, 1263 bp, Oryza sativa
  ref <308>: DATABASE ACCESSION NUMBER: AK099245
  ref <309>: DATABASE ENTRY DATE: 2002-08-28
gattcgagaaatccctcacaacccacaacattttcaaacaacgcaaagcagtagcagcagcgagaagcaagcaagaagcgatggggatggggatgaggagggagagggacgcggaggcggagctgaacctgccgccggggttcaggttccaccccacggacgacgagctggtggagcactacctgtgcaggaaggcggcggggcagcgcctgccggtgccgatcatcgccgaggtggatctctacaagttcgacccgtgggatctgcccgagcgcgcgctgttcggcgccagggagtggtacttcttcaccccgcgggatcgcaagtatcctaatgggtcacgccccaaccgcgccgccggcaacgggtactggaaggccaccggcgccgacaagcccgtcgcgccgcgggggcgcacgcttgggatcaagaaggcgctcgtgttctacgccggcaaggcgccgcgaggggtcaagactgattggatcatgcatgagtaccggctcgccgatgctggccgcgccgccgcgggcgccaagaagggatctctcaggttggatgattgggtgctgtgtcggctgtacaacaagaagaacgagtgggagaagatgcagcaggggaaggaggtgaaggaggaggcgtccgacatggttacgtcgcagtcgcactcgcacacccactcgtggggcgagacgcgcacgccggagtcggagatcgtggacaacgaccccttcccggagctggactcgttcccggcgttccagcctgcgccgccgccggcgacggcgatgatggtgcccaagaaagaatcgatggacgacgccaccgcggccgccgccgccgccgccaccatccccaggaacaacagcagcctgttcgtggacctgagctacgacgatatccagggcatgtacagcggcctcgacatgctgccgccgggcgacgacttctactcgtcgctcttcgcgtcgccgcgggtgaaggggacgacgccacgcgccggcgccggcatgggcatggtcccgttctgaggtgacggcgacgcgatcgaacaggtggtgatcgatgctgcaacgtgtgtaaatatacagcgccggctgggtcaagagatggctcgggtgacgcgcgcgcggcgtgtcctggcgttggcgccggggcattctttagtttttcatcttttcatcatctcagatggtagatacaaaacagtgtatgtatgtagctctgtttctctctatagaaccccaacaaattttgttgttg

SEQ ID NO: 21875 - DNA, 1317 bp, Oryza sativa
  ref <308>: DATABASE ACCESSION NUMBER: AK072100
  ref <309>: DATABASE ENTRY DATE: 2001-12-06
gggtcgcctccgcctccgccgccgcaacgctccccaccactctcctgctccgccgcctcctcctcctctccccgcgccgccaccctaccacccccgccccccgccgattccgctcctgctgctgctcctcttcctcctcctcccccgccgccgcgccggctcacccccacccgcccgccggagggagaagactgagaggcgagctgcgcagcagagccatgtcaagttccacgaattcgacggttttggcggaatcggtagcgactgggagctcagtggatgttgagcttctaccctttgtgaatgacaaacatggtggtgtgatcgttgagatgacggccccgatggatccccaattgttttcagcttccttgaaagcatcattgtcaaaatggagggaacagggaataagaggtgtctggataaaattgcccatcagccttgccaaccttattcaatatgcagtggaggaagggttctggtaccaccatgcagaggaaacttacttaatgcttgcatactggcttccagctacaacacatacattacctgtaaatgctactcaccgtgtgggtgttggagcatttgtaatgaatgacaaaagagaggtattggctgtccaagaaaagagtggtgtacttcgaggcctaggtgtatggaaatttccaactggagttgttgaaccaggagaagatataaacttaggagctgtaagagaagtaaaagaagagactgggattgatacagaatttgttgaagttcttgccttcaggcagagccacaaagctttttttgataaatcggatctgttttttgtttgcatattacggccactttcctttgatattaccaagcaagattcagaaatcgaggcagctcagtgggtgcctgtggaggaatttgctgctcaaccatttgtccagaaacatgagctagtgaagtacattcttgaagtgggtttggcgaaggttgacaaggactatgcaggattttcgccaatcctcataaaatccgcattcacggacaaaaatcgttcttttacatgaacaggagggacctggacaaggcctcagaatccagtagtacacagaaaaagactgaaaaacctttgttcatggaaaaactgtagctttcatactggatctttttttccatcactggtagcttctacacctgattttgaccgaatgttgccgctccaccagtcctgtaattcagaaaaaggagcagcagttcagaaatacagctgaatttgttgtacctatgaatttgtattgaatatttataggcttacaaataatgaaaaacatttgttgg

SEQ ID NO: 21876 - DNA, 2081 bp, Oryza sativa
  ref <308>: DATABASE ACCESSION NUMBER: AK072101
  ref <309>: DATABASE ENTRY DATE: 2001-12-06
gattccattcctccgcccaaagcctctcaagtctcaagcccttaccaaagaatccattccgctccgatcgatcgatcgatccccacttttcccatccaccaatccaaaccctagcttgcgctcaccatgtccacacccttcgacctcaactccgccgctgacccccaaaccctagcgccgcccaagcgtggccgcggccgccccaggaagaatcccccaccgccaccgccaccggctacggatccgaatcctcatcctccatcaggagcaggagcaggggcaggagcaggagcaggtgcatgccccttcgcccccggcgacctggtctggggcaagaagctctcccacccggcctggcccggcgaggtcatctccgccgcccccaccggcgcccagctcctcgtctccttcttcggcgacaaggccctcgcctggtgcgacgccgcccagctcaggccctacgagccctacttccccgtcgccgagctctacgatggcgaggccgacgacttcgacgccgccctcgatgcctccctcctcgagttcgagcgccgcgttgagcttgccctcaccgctcccggccgcatcgcccgccccttcctcccccgcgatttcatcgccctgctgcacgatttggccgcccaccgcatgggcttctccaaccgtgtccacgccgccgtcgctaaggcgcatctcagagccttcgacaagttcaggggcctacccgaccctcccgagtacaccctccacctcggcctacccaatgtctccgccgccgcagccactcccaacaactgcaactcctaccccccatccaggaggagggggaggaagaggaaggaggtggaggaggaaatcctcgatgactccgatgaggattgggacccacgcaagaagggtgccactgactccgattccgaagtcgatttcgaccgcaagagggtctccaagggcggcaggggcagcggtgcaccacgcgggaggccacgcgggaggcctaggaaaaacaatgctgggaggcctgcacacctcaaggacgaggacgaggtgatccaagaaacagtggagtatcaatatccaccagccgctgacatgtttctacagcttacatccgttgctgctgatccattcaacttcaagggctatgactctgtgcctgtcattcttagcttcttctcaaaatacaaggactcagaagtgccggccacatacgacgacaaggagctgctgcagacattgggtggcaagaaaggtagaaaaaatacggccagaagcttgtacccagctgcaaaagaagaaggtgacttagaggtggcggatggccataggggtcggaggaagtcagcagggagtatctactcagcaagaaaggcagaagactcatattggtgtgatattataatcagtgattttgatgatggagacacatcaagtgactatgagggccgcaaaatgaagcggctgtctcagaacaggagttttaataagaagatgaagcaggaggttgcacctcaagatgaggcctctgctgattcacctgctgtgaaacaggcagatggaccggcagctctgatcttacattttagtaatgcagaagccatcccttctgtggatgacatcaatagtatattccgtatgcacgggccaatcatggagggtgcgactgaaatcaacaagaaatcaaagatcgcaagagtagtgttttctaagagtgctgatgctgaacaggcatatagcagttcgggaaagtataatgcatttggtccagcccttctcaggtatgatctcaaatacctgccaatggttcctcaagttccttagatggtgcaggctaaactggatatgtcgccatttggagggaaatgcgtaatgaagactggagctaagggatcataagatgttcgcgttactgacttagagctaggaatgcccactggccaggccggacgacttgttcgctggtcgagtgagcaattttttaggttttatctggttaaatgcattccgaggactggttgtgtacttgagttcagaggtagtttatattattaaattatttagatggtagatgatctcggcgc

SEQ ID NO: 21877 - DNA, 1230 bp, Oryza sativa
  ref <308>: DATABASE ACCESSION NUMBER: AK072102
  ref <309>: DATABASE ENTRY DATE: 2001-12-06
ggttttgagccagttgagctgctgcagctttgggtgaggtggaggtaggaggcggcggccgctcccatccttccttcacctccatctatctccaagctcgatcttctgctgaatagagaggagatgggtgacgtggccaaggacctgacggccggcacggtgggcggggcggcgcagctggtcgtggggcaccccttcgacaccatcaaggtgaagctgcagagccagccgacgccgccgccggggcagccgcccaagttcgccggcgccatggacgccgtcaagcagacgctggcggccgaggggccgaggggcctgtacaaggggatgggggcgccgctcgccaccgtcgccgccttcaacgccctcctcttcaccgtcaggggccagatggaggccgtgctgcgctccgagcccggcgcgccgctcaccgtcagccagcaggtcgttgccggcgccggcgccggagtcgccgtctcgttcctggcatgtcccactgagctcatcaagtgcaggttgcaagcccagagcgcgttggcgtccgctgctcctgccgccgccgccgctgccgcctctcccgtcggcggaggcgcggccacggcgacggcgagcgtggcggcggtgaagtacggcgggccggtggacgtggcgaagcaggtgctgaggtcggagggcggcgtgggggggctgttcaaggggctggggccgacgctggcgcgggaggtgccggggaacgcgctcatgttcggcgtgtacgaggcgatcaagcagtacctcgccggcgggcaggacacgtcgtcgctggggcgggggtcgctggtggtggccgggggcctcgccggcgcctccttctgggggtcggtgtacccgacggacgtggtgaagagcgtcatccaggtggacgactacaagaaccccaagtactccggctccatggacgccttcaggaagatcctcgccgccgacggcgtcaagggcctctacaagggcttcggcccggccatggcgcgcagtgtccccgccaacgccgcctgcttcttggcctacgaggtcactcgctctgcactaggctgaactcatgtatcattacatcctcctccttcttgacccttaattttcttcttctgattctgattctgattcttgctgtcatccatctcatctgtggatgtaagaacagtgtaattctgtacacacaaatactatctttataaaaatttcctagatcac

SEQ ID NO: 21878 - DNA, 3072 bp, Oryza sativa
  ref <308>: DATABASE ACCESSION NUMBER: AK072103
  ref <309>: DATABASE ENTRY DATE: 2001-12-06
aaaaaaatctagtactagtgatgaaggcatgaagctactgtaatgccgcttctctagcagtttcctgacagcagaaaagcctaccaaaaaatgattgctcccacgctccttacgcaaagagccactgcgagtgcaatactcgtgttcctttttgtctccgtagcacaatccgcctcttctttccatcctgcaagcacgacgacagtgacacggcccgccgtcagcgggagttgcattccgagtgggcggaaggcgctcctgaccttcaaggatagcttttgggatcgtgctggccgcctttattcatggcggggcgaagactgctgccggtggaagggagtccgatgcgacaacacaactgggcatgtcgtcaggctcgacctccgcaacacagacgaagacgattggagcaatgggctgatcttgtcaaccagtgagatgagcccttctattgttgatttgcatcacttgaggtatcttgatctaagctacaatcacttcaattttacaagcatacctgattttctgggttcactcagcaacttgaggtatctcaacctctccgctgcaaatttttggggaactctgccttctcagcttggtaacctctcgaatctgcaataccttgatcttggcaattcccatagtctgagtgtttcagatctttcatggttaatgggtctcccttttttaagctatcttgatttatccacggtggacctcagttccgaaaggaattgggtccatgcggtgaacaagcttccttctcttcaagtccttgtcttatctagctgtgggcttaacaataccgtctctactctatctcattccaatctcacacatcttgaagtcctagatttaacattaatctgtttagctctcctctcgcacacaactggttttgggatctcactacacttaaaaagctctttctatatgattgtgcctggtccgggccaattcctgatgcattgcccttgagtccatagttctgcatggcaccgatttatcgggtaacataccaacaacaatgaaaaatctgtgtaatttacaagagctggatttatacgacattaatattaacagttccatatcagaactgatggagagattgccgaagtgttcatggaataagttgcgtaagatggacctgcattgtgcaaatttgacaggggaactaccaacttggataggacatctagcaagtctcagttatcttgatctttctgagaacatgattgttggctctgtacctgatggaacgggaaatctgacaaatctcaactatcttgacctctctcagaactcactggttggccatatacctgttgggattggggcatttggcaacttgactagcttgaaccttggccaaaatagcttcagtggtgtgctcgcagaataccattttgcaactctagaaagactggaatttttggacctttcaagcaactcgctgaaattagatttacatgaagcttggattcctccctttaaattaaagaagggatattttgagtcatgtgacttgggccctcagttcccttcatggctaagatggcaaactgatatagttgtccttgatatttcaaatacaagcataaaggatgacttgcctggctggttttggactgtttcatataatgcttatgaattgtacctgtcaagcaatcaactgggtggagctttaccagagaaattggaactgccatcaatgcaagcaatggatctctccgataattatttgtcagggaagttaccagcaaatctcactgttcccaatctaatgacactgcatcttcaccacaatcaaattggaggcactattccagcttgtttgtgtcaactgcggagtttgagagtaataaatctgtcatacaatcaactaacaggggaaatcccacaatgttcagtggatcaatttggtttctcattcttggttatagatatgaagaataacaatctatctggtgaattccctagcttccttcaaaatgctggttggttattatttcttgacctttcatataacaagttgtctggaaatgtcccaacatggattgcacagagaatgccttacctggaagttttgattctaagatcgaacatgttttgtggtaacctttctaaccaattaaacaagcttgatcaacttcattttctcgatgtagcacataacaacatatcaggaagtatatattcatctataagaagcttgacagccatgaaatattcacacacatcagggttggacaactacactggtgctagcatatccatgtccataaaagaccaggagcttaactatacctttcaatccacaaataatattatgttgattgacatgtcgtacaatagtttcactggacctattccaagagaattaactctactcaaggggcttcaaagtttgaatctatcaggcaatcaattaagtggaacaattccaaatgatattggcattttaaggagattggagtccctggacctatcctacaatgatttagttggtgaaatcccctcgattttatcagaccttacttttttgagctgcttaaacttgtcctacaacaatctatcaggaagaatcccctcaggacaacagctacaaacacttaataatctttatatgtacatcggcaatcctggactttgtggacttcctctttccaccaattgttccacgaacagaacaaacaaaattgtccagaatgaacatgatgacgcatcacatgatacaacatatttgtacatcagcacaagtgcagggtttgtggtggggctctggatagtgttctgcaccatcctgttcaagaaatcatggaggatcgcttattttcagttttttgatcagatatatgacaagatatatgtgcaagcagctgtcagtaaggctgttttgataagaaaattcctatgaagaactatggatgttttattccactgcatatcttttcatactcttcttttttttcttgtgatgtgcgcatcatttttttttaacagagtagtagttctaaagagagagatattgtaaccaagaagctctttaataatacctgtaccgttcat

SEQ ID NO: 21879 - DNA, 1470 bp, Oryza sativa
  ref <308>: DATABASE ACCESSION NUMBER: AK072104
  ref <309>: DATABASE ENTRY DATE: 2001-12-06
gccactcgccgccgccgccgccgccgctgttgccggtggcccgccagccatgtcgtgctcgcacctctccaccgcctggtcctcctccgccctggccacccgccgccgctccgctcctagctgcggcagcagcggccgcctgcaggtggtgcggtgctcgctgcgtgagctgcggagccgcatcgactcggtgcgcaacacgcagaagatcacggaggcgatgaagctggtggcggcggccaaggtgcggcgggcgcaggaggcggtggtgtcctcccgccccttctcggaggcgctggtggaggtgctctacaacatgaaccaggagatccagacggaggacatcgacctccccctcacccgcatccgccccgtcaagaaggtcgccctcgtcgtcctcaccggcgagcgcggcctctgcggcagcttcaacaacaacgtcctcaagaaggccgagacccgcatcgaggagctcaagcagctcggcctcgagtacaccgtcgtcagcgtcggcaagaagggcaacgcctacttcatccgccgccccttcatccccaccgagcggacgctggaggtgaacggcatccccaccgtgaaggactcccagtccatctgcgacctcgtctactcgctgttcgtgtccgaggcggtggacaaggtggagctcctctactccaagttcgtctccctcgtccgctccgaccccatcatccagacgctgctccccatgtcgcccaagggggagatctgcgacatcaacggcgtgtgcgtggacgccaccgaggacgagctgttccggctcaccaccaaggaagggaagctgaccgtggagcgggagaaggtgaagatcgagacgcagcccttctcacccgtggtgcagttcgagcaggaccccgtccagatcctcgacgcgctcctcccgctctacctcaacagccagatcctccgcgcgctccaggagtcgctcgccagcgagctcgccgccaggatgagcgccatgagcagcgccaccgacaacgccatcgagctccggaagaacctctccatggtctacaaccgccagcgccaggccaagatcaccggcgagatcctcgagatcgtcgccggcgccgacgccctcgcctaaatccaatcaactcatttcttcatcccatccacctcgcttgagctgctgaggttgctgctgttatatatactactctattcttttttacttcctttttctctcttgctattgtgtctgtaatttctgtgatagcacgaaaaaaaaaaaggaaaaaagatcgatccgactcgatcgatgtaattgttaatcgcgcgagatacacaagatttcaattcagcgatgccaaatgtacaagcagagtattctactactatcttgcaatctcctctacttgcctttctagattaggagggatatcgccgtatgcagtttcttccttttcttgtgtgattttggtgttgacg

SEQ ID NO: 21880 - DNA, 1193 bp, Oryza sativa
  ref <308>: DATABASE ACCESSION NUMBER: AK099246
  ref <309>: DATABASE ENTRY DATE: 2002-08-28
gccgcagttcgccgctgcttccactccgcctccacctccgccgccgccgctgctcctcctcctcgcgcttacagtttcctctacttccccctccttggtcttggtctgcctcctcctcgccatggacgtcaagccggtgaggactgtgaaggtcaccaatgtctccctgagtgcaactgtgcaagacattaaggagttcttttcattttcaggagacattgaacatgtggagatgcaaagtggcgatgagtggtctcaagttgcatatgtgactttcaaagatccccaaggagcagaaactgcacttcttctttcaggcgcaacgatagttgatctttctgtcatcatcgcacctgctccagaatatcaaccaccccctacttcatctgctcctccaatgtatagtgcaaccagtgtccctgtcagtgaagacaacaatgttgtccataaggctgaggatgttgtcagcaccatgcttgctaaggggttcaccctggggaaagatgccgttggcaaggcaaaagcttttgatgagaagcatgggttcacatccactgctggcgccaaggtggcctccattgacaggaagattggtcttagcgagaagttcactattggtacttccatagtgaacgagaaggtcaaggagatggatcagaagttccaggtgtcggacaagaccaagtctgcattcgctgctgctgaacagaaggtgagcactgctggatctgctatcatgaagaataggtatgtcttcaccggggcttcgtgggtcaccaacgcattcaacaaagttgccaaggctgccactgatgttggtacaatgacaaaggagaagatggcagctgaagaccagcataagggctcgggtccttctggagggcactcgtacacacccatccagtgatgactccacgctctctcatgtgccgcattgtgttgtattgatggatgtaaaacatagatatagaacagaaaaagtcccctcctggcataccacatacttctatcagtgaacttttcgcattgcaggaattttgtttccagtagaataggaaatatgatggtgatcacaatgtattccgctggtttataaggcgtatgttcaaactgtttctggttgtagtaacttgcatgaaccttggcaaaagttgtggaaagctcctttaataatgtcatgttgatgttggttc

SEQ ID NO: 21881 - DNA, 2837 bp, Oryza sativa
  ref <308>: DATABASE ACCESSION NUMBER: AK072105
  ref <309>: DATABASE ENTRY DATE: 2001-12-06
gagtagtagagtgagctcaagacaagaagcagtagcgagtccaaggcaaggcaaggcaggcgaaagcaaaacaagaaatggcgaagccgatatcgatcgaggtgtggaatccgagcggaaagtatcgcgtggtgagcaccaagtccatgcccggcacccgctggatccgcctcctcgccgacaacgactgccgcctcgagatctgcacggagacgaagaccatcctctctgtcgacgacatcctcgccctcattggcgatcgctgcgatggtgtcatcggccagctgacggaggagtggggagaggtgctgttctcggcgctgaagcgcgccggcggaacagccttcagcaacatggccgtcgggtacaacaacgtcgacgtggaggccgccaataggaacggcatcgccgtcggcaacacgcctggcgttctgacggagacgacggcggagctggccgcgtctctgtcgctggcggcggcgcggaggatcgtggaggcagatcagttcatgagggctggcctctacgacggatggctcccgcacctgttcgtggggaacttgctcaagggtcagactgtgggagtcatcggagctggtcgaatcggctcagcttacgcaagaatgatgatcgagggcttcaagatgaacttgatctactacgacctgtatcagtccacgcgccttgagaaattcgtcacagcttacgggcagttcctgaaagcaaacggagagcagcctgtgacatggaagagagccgccaccatggaggatgtcctcagggaggccgacgtgattagtctgcaccctgtgttggacaagaccacttaccatctgataaacccggaaaggctggccatcatgaagaaggaagcggttcttgtgaatgcaagtcgaggaccggtgattgatgaggtagcactggtggagcacctcaaggccaaccccatgttccgcgtcggtcttgatgtgtttgaggatgagccttacatgaagcccggcctcgctgacatgaagaatgccgtcgtcgtacctcacatcgcatctgcctccaagtggacgcgcgaaggaatggcaacacttgttgctctaaacgttcttggcaagatcaagggttatccggtttgggggaacccgaatctagtggagccatttctcaaggaggatgcaacgccgccagctgcttgccacagcattgttaatgccaaacaactcggcctgccatcgtcaaagctctaagaactggagctcggtccatcatattatatctgtcggttcaagatcatactccactacatgaagtctagatcgaggtgcatatgcttgctgttctagcggagcgggcaacaagctgtcagccagacttttgatatctaatttcacacacacacacacacacacacacacacatatatatatatatatataatatactagctagcttcaattccttgttattataccactagtacgactgtaattttgtgagtcttaaaacatgcgagctacatgtatgttattacacccgtactagctactactgtagattaattactgttacgaaatgaagataccctagctgcctgtttgggaaacgtacgattaatcatcaatgacaaagatttacagggctctagctagctagcactagcagcctgcggagagagagaggaattaattgatattagtaataactagcacatacatatgcatccttgcgtatagtaagtggagtaagtttataagggaagaaataattaagggaaaacctggcttagctgaagaagagcaagcaatactattatattatataatccaataaaagttgaaacaaaaaagagggagcaaattaaagcaaaagctagatatatataatataataatgatggacagagatatatagttagtcgaggaggagtttcttgacgtaattatcgtagacgaagtcggtgaggatgctgtaagctttctcggtggggtggtagctgtcccagaagagatagtcggagacgggggtgcagacggaggaggtgagggcgttgcagaggacggaaacctccaggaggccagtgccgcagcaacccatggtggagtcgctgaagccgtacgcccgtggacgcatcatcatgtccatcaggaagccgtagatgtccatgaaaacaagcttggtcttggtgctcttcttcttggcctgcatctcctccatcctcctcttcatcccggcgttgtacgccaccgcgatctggttgtgcccctccgagcagcgcctctccatgccccccgacatggtcctctgcgacggcacgcacccgatgggcggcatcccgatgatggccaccttcctcgccccggccttcaccagctcgtccacgaacgccgccgcgtggtgcaccagcagcgccgcgtacgaggcgtggtcgtagccgggcctcgcccgcatggtgaagtaggtgttggccacgtcgtcgctgccggcgcagatggcgaagatgcccctggtcatcatgtccgccacccgcgcgtccccggcggcgccgcgcacccgctccttgtactgctggaacagcagcagctggtcgggcatggagatgacggaggccaggcgaggcgtcagcgggtcgaagccggtgccccccgacgcgaagctgacgccggtgaggagctcctcagtcgacagctccggcgacaggtacggcgggagaagctccttcagaccaagacgggaagctgcatatgcattccgatcgatccgttgttagttgttgttgtgcatgcatgtactcatatgagaaatgagaattgacaagagaaagaaaagcatgttgctagttaccgatg

SEQ ID NO: 21882 - DNA, 1802 bp, Oryza sativa
  ref <308>: DATABASE ACCESSION NUMBER: AK072106
  ref <309>: DATABASE ENTRY DATE: 2001-12-06
gctgctctccacccacacagccgcccgccagcatctgcatctgcatctccctctgcgccagcgacggccggcgcgccccatcgccgcctccgccgtcgacttgccccatcaccgccaacgaggcgttctgccgcctggcgccgctcgtcacgtacgaggacatcctccgcatcgccaacggcgacacctcaccatcctatccggcaagcctgtcagcgagttcctcaccagtatgcattgcagccaatattttctcatggacaaggcgctgaagtgagagacgacagacgaagaggtgaaaaaaatggagtcatgttttgtaacgccccacgaggacacgccagagacgatagaagaagaggtgaaagagatggagtcttgttttgtaacgccccacgaggacacgccaaggcaagggctctggctctctcccctcgacatagtcatggtcagcagaggccatacccctactgtgtacttctaccaacgtgacactgccactgttgctgccgattttttcgaggtaggcaggcttaaggaggctatggcaaaggccctagtggccttctaccccttggcaggccgtctcagtgtagatggtgatggtaggcctgaaattgactgcaatgccgagggtgcgctctttgttgtggctcagtcaaaactcaccgttgatgccttcagcgaccttaagccatcaccagagttgaggaggttgtttgccccccgtattgagccagcatccatcatgcttggagtacaggtgactttcttgagttgtggtggtgtggcattagggacggtgttgcaccatgtcgccatcgatgcccttagcgcgttccatttcttccagacatggtcttctttctgccgagatggtgaagccgccatgttggagctgccctgccatgaacgcaccctcctccgcacacgctccccacctatcgtccacccggatgtgcactcaatgttcagtctaaagctcaacttctgtgagccatcagaccctatatccaccaagatattcgtcatctccaagaaccagctcgatgcccttaaacaaatatgtggtggattgagcacattttgtgccatgagcgcccttgtatggcagtgcatgtgcattgctcggcaactccctctagacgccgagacacgcgtcatcttcccagtcaacattcggcgccgtgtgaagccacctctcccagatcgctacttcggcaatgcacttgtcgacttgaaagtagcctccacagttagggacattgtcttggggacactggatgtaactgctgcccagataaagaacgcattgggacgccttgacgatgagatgctgcagtcggcgatagactacaatgagatggcagggatgcccaacaagcataccaagggaaacctgccagatacagaattacgaatggtctcttggctaggcatgccagtttatgatgcggattttgggtgggggaagccggagatgatgtctcgtgcggagtctgtgcgtggcggatttgtttatatgatggatggcattgacaacgatgggggtggcgtgcgtgtgctcatgtgtatggaggcacgaaagatggaggagttcgagcgactgttttatgccaagtttgcacaatgaagaaactacctagctagaacatgatgcatgttttctgttctattatcaataatggatgtttcatgtaataatataaccaaatacctccatatattttggtggcatggttgtttcagacatgacagggtgtggttgatttacgcggacaccacaaaaatgtggttgattt

SEQ ID NO: 21883 - DNA, 3093 bp, Oryza sativa
  ref <308>: DATABASE ACCESSION NUMBER: AK072107
  ref <309>: DATABASE ENTRY DATE: 2001-12-06
ggatcgcgagctcgcttccatgcttgccggaccaggcggcggcgctgctccagctgaagcgatcgttctcggcgaccaccgcgtccgccaccgcgttccggtcatggcgcgccggcaccgactgctgccgctgggcgggcgtccgctgcgacggcggccgcgtcactttcctcgatctaggcggccgacgcctgcagagcggcggccttgacgccgccgtcttcagcctcacgtcgctgaggtatctcaacctcggcggcaacgacttcaacgcgtcacagctcccggccaccggattcgagaggctcactgagctcacccatctcaacatctccccacccagcttcgcaggccagataccagcaggtattggaagcctcaccaacttggtttctcttgatctgtcatctagcatctacatcgtcaatcaaggagatgacgatgtcagtatcatgtcaaatttgttacccccctggggcttctcgagggtaaacttcgagaagttgattgcaaatcttggtaatctgagggagctctatcttggattggtgtacatgtccaacggaggcgaagggtggtgcaatgctctggctaattccactcctaagattcaggttctgagcctaccattatgccagatctctggtcacatttgccaatctctgtttagtttgcgatccctttctgttgttgacttgcaaggaaatgacctgtctggtgccatacctgaattcttcgctgatttgtcatcccttagtgttcttcagctttcaagaaataagtttgagggtttgtttccacaaaggatcttccagaacagaaaactgacagctattgatattagctacaactatgaagtttatggtgatttgcccaattttccacctaatagcagtttgatcaaattgcatgtcagtggcaccaagttctcaggttacataccaagctctatttctaatctcacggatctgaaggagctgagtctgagagcaaataatttccctacagaactgccgtcttctctaggaatgcttaaatccttgaacttatttgaggtttcggggctcggcctagtaggatcaatgccagcttggataacaaatctaacatctttgacagatctccaaatttctcattgtggtttgtctggatctttaccatcttccataggcaatctcaagaatctcagaagaatgtctttattcaagagcaacttcactggaaacataccattgcaaatctttaacttgacacaactgcatagcttgcatcttccactaaacaacttcgtggggacagtggaacttacctcattctggagactaccatacttatcacaccttgatctttcaaataataaattatctgtggtggacgggttagtcaatgattcagcagtgtcctctcccaaagtaaaattcttgagcctagcttcctgcaacatatcaaagtttcccaatgcattaagacatcaagataagataatcttccttgacctttcaaataaccaaatgaatggggcaatacctacatgggcatgggaaacttggaaagaatcgttcttcttggacctatcaaataacaaatttaccagtcttggacatgacacgttgctccccctgtacacaagatatatcaatctcagttataatatgtttgaaggacccatacctatacctaaagagagtacagactctcagttggattactcgaataatcggttttcttctatgccgtttgatctaattccatatcttgctggtacactatctctaaaggtctctatgaacaatgtctctggagaagtcccatcaacattttgtactgttaagagtctccaaatccttgacctttcctacaatatcttaaatggctcaattccttcctgtctgatggagaattcatcaacactaaaaatattaaatttgaggggaaatgaacttcgcggagagttgccacataatatgaaggaagactgtgcatttgaggcattggatgtcagctataattggattgaagggacactacctaaatcattagtaacttgcaaaaacttggtggtacttaatgttgcgaacaatcaaattggaggctcttttccatgttggatgcatcttcttcctaaactccaagtccttgtcctgaagtccaataagttctacgggccgttggggcctactcttgctaaagatgatgaatgtgaactacagtatctccgaattcttgatctagcttcaaacaacttctcgggagtattgccttatgaatggtttaggaaactaaaatccatgatgtcagtctccattaacgaaacattggtcatgaaagatggagatatgtacagcacatttaaccatataacatatctttttactgctagatttacatataaaggactggacatgatgtttcctaagatcttaaagacctttgtactaattgatgtctcaaataatagattccatggcagcattcctgaaactattgccacactaagcatgctcaatggtctcaacatgtcacataatgctcttacaggaccaattcccaaccagcttgctagtctgcatcaacttgagtctttggacctctcatcaaataagctttctggggagatccctcaaaaattagcatccttggacttcctatcaacattgaacctatccgataatatgctggagggaagaataccggagtcacctcatttcttgacactccccaatagttcatttatacgaaatgctggtttgtgtgggcctccattgtcgaaagaatgcagcaacaaatcaacatcaaatgtgatgccacacctttccgaagagaaatctgcagacattatactatttctctttgttggattgggttttggtgttgggtttgctattgcaattgtagtgaggaaaccttgcattggcaaataatcttcatcaaatccacccatttttatatttatatgttcaggagtttgccagtctgcttccccttgtaaatttagctgtcattatagttagcctgtatgatttatagtactatgtgcacgtacaacatttttttccatcatcatgcatcctataagattagtattgaaaattt

SEQ ID NO: 21884 - DNA, 2418 bp, Oryza sativa
  ref <308>: DATABASE ACCESSION NUMBER: AK072108
  ref <309>: DATABASE ENTRY DATE: 2001-12-06
ggaggagaaatcctggtgcggtgccggctgccgaggatatttttccccgtccattcccacctcgtcgtcgactcctcgtgagctcgcccgccgcctgcgcgtccccatccatcccggcgagcgagcaggtgcgccgtcgttcgtccagctgctgcttcggccgcatccatcctgctcttttcaggagaagtgttaatctgacgaacacgtgggggcttgagccgcaatgaaggagggttcccaggtgagcttgtttgttgcgctgtgtttctttttgtttggagtgctgatgtcgtagtacctcgtactgtaagaatctttcttgaaaaaaaaataaattcgatgcactgtcttttgtttaaagtgctgatgtcagtcacactgtgagagaacctttcatataaattaattcggaaatagatagcttgccaactcggaagattggattttacttcttagaatctatatgcaatgtacttagatgacttttggagtgtaaaatgctagaagatttaccatccaggctaatatggtaatttaatttttatgcaactcttagacaagagcaatatattttttccagtctcttttttttttgagaatttgtttgtactgaactgtaaaatgaaaatcatgtcccttgtaatcttctcccccttcgactttgaggaacaacaagtcggagcttgccaactattggctccaagaacagtgttggccatgcaactgatttctaatcagttttgaacatgatgaatctaccgcaatgatcgatttggcaaagatagcctccaggaacaacaagtcggagcttgccaactattggctccaagaacagtgttggccatgcaactgatttctaatcagttttgaacatgatgaatctaccgcaatgatcgatttggcaaagatagcctccagtagcctagtgccatgcactgtgaggtccccagtgtgaaatgtagcagctgcacaattctagtaaggagaacttggatggtgtagttgatggacttcaatgaagactggagaggtgtaagaatgtctatgaaaggcaaaataaagaacatctctagtaaccggcctgttagctctgtattagtcagtagagtcacttggtaaatataagagcaaccgttcaagataccaagtgctcatgaggatgttgagagcaaggcaaaggtgcatccattggtgcaaggtgatgatgaaatcaagggtgaacagccaaatactgatgcacctttaggggattctgattccttatccgctgcaagtaatgataataaaagggtttctcgtgaagatattgaacttgtccagaatttaatagaacgctgtctacagctatatatgaatagaggagaagttgttaggactctttctactcgtgcaagaattgaacctggtttcactactttagtatggcagaaactcgaagaagaaaattctgagttctttcgggcttactacataaggttgaaattgaaaaaacagattaacttgtttaaccacttattggagcaccaataccatcttatgaagtacccagtaccacagcaggttccgttgaccccaacacagaacggtattcgtcctatgcctgttgacaatttgcctatgggatatccagtactccaacaacctggaatacctgctcctgttcagcctcatgttaattcgatatcttgtggtccacctggttgccatgtggtaaatggaattcctgcaccaggtggttataatccgattcgcatgagctcaggaaatggcatgacagagaatgaagttcctggaactgcacatgctggagccatgtcatcagagatggctgtgagtccatcatctgcaatgtcaagcaatcatgtttctttcactcctgatatatcagggatggatgtggatgcatctactgtaaatgccacctttggagatgatttagggaatggaggacctctgcaaataggaccaaatggtggtgatagctcttccttggggcagcagatctgggatttcagtctttctgatttatcagcagatttgacaaatctgggagacctggcagcccttgaaaactattcaggcaacccattcctgccttcagactctgatatttttgaatccccggatgatgacatagttgagtattttgctgatgccatcaatgggccttctcagtcagacgaagagaaatagtcgtagattcaaagacaagagtctcgagaaactcaggtcaggctgctacttgtaatgttcttcgcaatgatgtatgcaatctaaacttatttgttggctttcttatttaaactgccttctttaggcagtaagcagccttccatcaagtagaactaaaattttgtgctgactaatcttattttttataataaacacttgaggtgacttttatctgttccaagt

SEQ ID NO: 21885 - DNA, 2611 bp, Oryza sativa
  ref <308>: DATABASE ACCESSION NUMBER: AK099247
  ref <309>: DATABASE ENTRY DATE: 2002-08-28
gatcctttgcatagcgtcgtactctccccctgcgaagaaagaaaaagctttttctttttcctcccggcaaaccctagatcggcgccgccgccgccgccaccggggtactctccccggccggccagcccccgtcgattcggctctctggaaggctggcacaccggatccgcgacgtcgggggatggtgttctgctctcgccgtgggggagagtgtccggcgccggccggtgcgctggagaagtggaaatcgatctcctcgccggccggcggcggcggcggcttttcttcgccggatgtatccggtgacggttatttgattcttgtctctgttttctcttttttttccttgtatgtaaaaacgatttattttctcaagatagagaggaaaagctctgtatgctgttcttccgatggatagcgaccgtgcgcttgttggagcggccaaaggcgccggcttttccgccagtatggtcttgtcgcatatgacatccgcctgcgattggtgatgcctcatgaggtcaactcttttttttttgtcgagagtatttgatttgaaggggactattttttcgagaggatttggacttgaagagaatgaggacgtgcgatgattgaagtttcgggacctgaatctcagtcgggatggtcattaggcgagagaattacaaagtgattataatcattatatggcgtgatttgtaggtccagagatccgtatttctgtggcttgagaagcatcatgctgttcggactttattggaagttgtcattatattttgttggcatatcactggcaatatacaagtgttattacagagtgaactaaaatggagatggtcattctattgttctgtatttatcatgcggattttgctcgcgcacaaggattttgaaagcatgttcatcttacaagttggagaatattttcctttcatgtccatattatttgccagcaccgtgcacagacaagtcgttgttaacaatggaggttgtccaatcatcacggaactccttttcatgtgatgctacgtggcaagaacacaaatagatatgcaatgttgggtaacataacaaagaacattatgtgagaagatttctctatggttcctagttggatgagctggaattatgtgagaagaatattgtggtcttcgggctgttcgctgctttctgctagagaagtttggaagtatctacagttattttgtggtaaaggagaattgttgggtggtgagttttatgcagcgaaggagatcgaacatgacatcatatgaggtttgctgggaaaggaaatttaaataaaaaacatatagtgattcttctcagaattggttcgagttgtatactttgctctcaatggaattatggcagaagcccactggctataaattgatgcaatcagaagctacttctagtgctacctatttaattagtgcggattggactataacagagagctgcaaattatcatacaaaataacacttgaagatggtgaagtagatgtgtactggttgaatactatgggccaagaattcttgtatgaacaattgatattccacaaagaggagttcgctacagtttgggtttatcaaagtactagttttatcaaaagtaagggcagtggcagggttgtcaccattgcagcaagtacctcatttaccaactctataccattgccactacagtattggaattatgggtctgtgtggaaattacagttctgttgtatggtctttctgatcagtgtcaaacaagcttgcggcgcctatggatatcttggatgaaaacttggaagaatctgatccagcaagatgaaagatgtggcctgttcattcaaaatatgttcagaggctgtgtaaatcaaatggatgaattgtgtcttagtgcacctgatctacaaatgccatgggatcctggtggtttatgtttactcaagtttctagctatctcttctcttggacaaatcacatttcaggcagtcaaattctcattgcaagacagttctctctttcacatgcgaagtgccaggatttgcttgagctgttcttttgagatgcaagttttctgttggcacgctgaaaacaaattggacattaatgaagcttttggaacgatgcaagaatactagagaaatcaaggtggaggtttgccatttctgaagtttacttgtcatcaacttatggacaagtcagtttcaaggagaggagattgtcaggaacccattgggctgcacatgggctgactcaattgctaatccatgccaagggccaaacaaacaaaggagagggatacaaaaggcagcagcaggagaacttcaagcaacgaacagatcaggcatcagcggcttcggccacggcggcggcttggttcggttgaacctcgtcgatctctatctctttcttactctctcgtgttcctcttcactgccatttctagaagcttcctctacttcttctcactcaatttctcttctattctctgagtttgtattgaattctattgttcttgagaacaattagtttggaggaagagggttgttaacaatggcagacaaaattaaacaattcgcacatgctcaagactgagatgcagaaaaatattgctaatatc

SEQ ID NO: 21886 - DNA, 2121 bp, Oryza sativa
  ref <308>: DATABASE ACCESSION NUMBER: AK099248
  ref <309>: DATABASE ENTRY DATE: 2002-08-28
ccccccccaacaactcggccaaattcaaagcaaagccgccattactgctcctcttccattccactggggacgtacgagctccgcgcatcccttccattccattactgaccttggctgctgcggctgcagtgcagagggggtttggtggtgcggttgatttgagcaataaattctctaggggggagggaggtatcggtcatggctgccgctgctgcaaggaggggctcatcgctgctctctcgctgcctgctgtccaggcccgccgccgccgcctcgcctgctgtcccctctgcgctccgcagggcagatgggacacaaggattgttgccgggaatccttcagaggttcagcactgcagcagtagcagaggagcccatatcacccccagtccaagtgaactacactcagctcctcattgatggaaaattcgttgattcagcatctggcaaaactttcccaactctggaccctcgtaccggggagctgattgcccatgtggctgaaggcgatgcggaggatattaaccgtgcggttcatgcggcccgcaaggctttcgatgaagggccatggccaaagatgactgcctatgagagatcccggattctgttgcggtttgctgacttgattgagaagcacaacgatgaaattgctgcattggagacatgggacaacggcaagccgtatgcgcaagctgccaacattgaagtgccaatggtggcacggctgatgcggtactatgctggttgggctgacaagatccatgggcttgtcgtgccggctgacggcccacaccatgtacaggtgctgcacgagcccattggtgtcgcaggtcagatcatcccatggaactttccgcttctgatgtttgcgtggaaagttggccctgctttggcttgtggaaacactgttgtgctcaagacggctgagcaaactcctctgtctgctctatttgcttctaagctgttgcatgaggctggactcccagacggtgttgttaacgtggtatctggttttggacctactgctggtgctgctcttgctagtcacatggatgtcgataagattgcattcactggatcgaccgatactggaaaagtcgtccttgagttggctgcaaggagcaaccttaagtcagtgacactggagctaggaggcaagtctcctttcatcatcatggatgatgctgatgttgaccatgctgttgagcttgcgcattttgcactgttctttaaccagggacaatgttgctgtgctgggtctcgtacatttgtgcatgagcgtatctatgatgagttcgtggagaaggccaaggctcgtgctctcaagcgtgtggttggtgatccattcaagaatggtgttgaacagggccctcagattgatgacgagcaattcaacaagatcttgcgctacatcaagtatggtgttgacagtggagccaaccttgtgactggtggcgacagattaggtgacaaaggttactacatccagccaacaattttctcggatgtacaggataacatgaggattgctcaagaagagatatttggccctgtgcagtccattctgaagttcaatgatctgaacgaggtcatcaagagggcaaatgcaagccagtacgggctggctgctggggtcttcaccaacaacctgaacacggccaacaccctgacccgcgcgctcagggtcgggaccgtgtgggtgaactgcttcgacgtcttcgacgccgcgatcccgttcggcggatacaagcagagcggcatcgggagggagaagggcatcgacagcctgaagaactacctgcaggtcaaggccgtcgtcacgccgatcaagaacgccgcgtggttgtaaacacatagatgtttggacatttcagaactggggaagaaataggtataatcttatggacggatgcgaaaatggcgataaattatggcgataagattatgatgatgatgatgaagaagaagaagaggaggaggaagaacagctgaaataagcttgtcctagcatggggctggcattgtctctaataaaccttgtggttggtgctcatgttactgatggagtatattgtagaagcagatttatgttcattatgaaatatatatcgcttgtttgggt

SEQ ID NO: 21887 - DNA, 3544 bp, Oryza sativa
  ref <308>: DATABASE ACCESSION NUMBER: AK072109
  ref <309>: DATABASE ENTRY DATE: 2001-12-06
gttttccagccgcctccccccgcttcgcctcccctcccctcccctcctctcgcgcgccgccgccggcgagcacgtcaccggaggcacggcgcagacgagctcctctcctctcctctcctctcctctcctccccgattcctccctgctcccgccccccgccctccgtctcggttctatacgaatcgaatcgaaggtaaactcatcctcccctctctctccctcttcctcccatatgagcagatgtgggagattcatcaggacatggatttggattggtttttttttagtactgaaacccccatttacccccagcaccaccacgtgacgccccctagttcagatgtgtcgccgtttgcgcctaagatggcagtggcagagtgcagcaaagagttgagagatgttagttcgccatatcgtcaattaggatgctccacggagctctcgtcttgatgttagtacaaatttagtcgaaagccattctaatgtggcggtgcccctgggctatttattgggagcaagggggatttgctccattttgttacctctgtacggtgtctttaccaggaatttttagccgaaaggaatcccgcgccgccgattttaagcgctttgaatagatttttggttatagcctcgaatcgctagtaatattccctgcgcatcttcgacttatgattcaccacctgcggaaacatgtgtaggtctgattttgtgttgcaagagagtgtggaaaggtaggtcggctaattcagtttgtttcagccgtcctgtgtattatattgtggtggttggttttattcggacctgatttccaatgactaccctggttaatatggttatgctgtatagcagtattttactacctatgtgtattcttaacacttcagaatgaataaaatcaatctatgaatgtgtaagccaaaacttaaattctacactacagctgtatagctgtagtagcaactgtggtattgctaaagaagtctgtatgttggatcggaaaatgtgaaaccagaataatacagtccagtagtccatatgttttctttctgccttttcttataaggagtaaggttatcagccagattgtaagtttatttctgtgaacatagaacttgaataggcatatgatctttcacaggattgggaatttaggatataccctaatgaactacaacctctaagcagcactgccttcttgtgtgactaattaagcaactattagtttgattcttactttcatatgatttatcttaaatggccatgactgttcaatatgtgtcttaccaggaattagtaggcagggattcatatgactgcctcatttgtttttttgttacctttgtttgctgttcaatatgtgtcttaccaggaattagtaggcagggattcatatgactgcctcatatgtttttttgttacctttgtttgctgttcaatatgtgtcttaccaggaattagtaggcagggattccattcagattttgagtgctttgaatagactggtgattagcttcaattctctagtaagattccctgagcatgcgcaacttatggttcgtcacccatggaaccatgtgtaggccgatttttgtcttggcgaaagtgtacaagtttcctaggtaggacagctaattgaatctgtttcagtcgttcctatcaattgtatcatggtggttttttttttaccttgaatccttgttcttatttcaaataaccgtgcgttgcttatatagttattttgtacagttactattttactacctatggtttgtgctgacatcggaatgaacaaaatcaatatatgaatgggtaagtcaaaacatagaaatcctacacggcacttgcttgatggggtattaccaaagaattctgtttatgaaaacagaatacagtccagttgtccatattttgctgcttttgcttataaagagcaaggttgccagccagattttccctgcgaattcggaaattgaatagaagtagaatctttcacaggattgggaatttaggatgtactcccatataatttaatcattttaacttccgtacctgtggaagcatgaagatcggtactctgactattgtgtcatcttttatttcttatgaagaactacctatctctaataatgcaacaggaatgtggaagagttctagatggaacaattatacatgggtaacaggggattaataggcatcactcttcgtctgttttctgtagttcatatataccttcactttgcgctgcatattaggctctactcatggtcttaggaatggtatttccgagcatattttgttacatggttcaacaatctcacttaataagttcaatggacgaatttgaatatacatgatgatggagatttgttttctaatggagtacatctgaatgtgatctttgacttttgttgtcttttcgtgtgactaataatcaactactacttcgatccctactttcatattatttatcttaaatggtcatttgactgtctttttcttcttcatattataccatcctaccttcttttgtatgattgggtggttctcgcatgttttgcttaacattggagaacttatgctcatttatgactgggtggtacatttatgctcatgcaacatttgtgtggcagaacttgttcagcatcactccttaattggcttgacatccaccgtaatgtgaacattcattatgatgatatcaaaggtcatgcatttgttaccttttttttttttttgctttttttccgaggattcttcttattactgaccattatctcctaatctagttgttatgtagtgtatttttaggaactggatatttcttccatggttaatgtccagaaccatgataatagatatttactagttacatttcttttcgtgtatagtgtaagaagaattgttcagcataaaaacttgtagccttttctgacatccttgcatttttttaattccttttgaataggttgtaaggatgaagaagggactgcatcctcagatgcagtggatttcatatgtgacacaaagcggcaggttgatcaatatcatgatgaccaaggtcaaccatactggcaaagtgtatcatatgagagcaaagcgtcaaatggctcaaagcctgggccagattgcaaagttcaaccgccgataccagcaggaatctgaggaaaacaaagaaaagtaggctgctgtcagcaaggagctacatatgctctaaggcagattagtgtggtgctatgtttatcgtccaggaacattgctcatggatctttgttttggatgtcatcctcttccatgtagccatctgatcattgtggtttatccctgtagtttcagttctaccattcacgaatttttctggagctatttttgttgctcaattctgcccgatatctctagagaatacagcatgctactttatgttttgttgattttagattgaagctccctgaattcctgtaagatggcatcgtttggcttgtcatgctacgtctcttttagcttatataaattatgtttattgttagtacataatatttctatt

SEQ ID NO: 21888 - DNA, 2587 bp, Oryza sativa
  misc_feature (371)..(371): "n"=any one base of a, t, c, or g
  ref <308>: DATABASE ACCESSION NUMBER: AK072110
  ref <309>: DATABASE ENTRY DATE: 2001-12-06
gttccgcctcttattttttcttttctctcccccaaatctgatcccctcccacacgcaacacgcgaggccgcgtctagggttagggttcccctccccttcggccatggacgagctcgcggcggcgtcggcggcggcgaggaggaggtgggtgcagtgggaggaggtcgtggtgtcgaacgaccgggggaggcgcctcgtgcactactacctccggggagcggccgcgggcggcggaggagggggagaggtgagggagcttgcggtggtggggcgggagcggagcccgcggcacatgtcgtacgtggtgcaggggcggttcctgcggtcgctggcggcggcgggggtgggggtgggggtgggggtggaggccnccgtgggggcggtggtggcagtgccgtcgccgtcacggtcgccgctgccggcttccgcggagggcggggcgccgaggaaatggaggtcgaggcgggaggtcgtggactggctgtcctccctcgtttccggatgtaattacggatcttcttcaatgtctaataggttcaatgaaaatccatatgatgacattgagttcactgatgttgctgcttcaaaggatgtttcacatacatcatcagtaaggaataactcaaaagagttcacatggttaggtcctgcatggctttgcgaaaagcgatggaagcactacagatctttctgccgtaaggggattactatttcggtgcataattttgtctacatcctgagtgaggaaaagaagaggctcatcgcccaagtggaggatctgtatgaagatactaattcaaccaacgttgtcatggtacgatggttcgacaaagttgatgaggttggtgtcgaattgccacctgatgttggtgacagagagattttcttttcccctggtctgcaagatctcagtgttgaatgcattgatggattggctgcagtcctgagtgctcaacacttcgagaagttccagagtagtccaaaacatagctattggcagccttatatttgtcgccgacagattgatgaagatggcgtcaaaccttttgatgtaacccaattgcaaggttattggagtcaagaagtgcttaggacaatgttcaatgcagcttcttctcttaaggtacgtttcaaggtcactaaaggtgcttctagttcagatggggcacaaaagaggaagcgtgatgcattcagtgaaaccgatccacagcagtgtgttccttccgctgcattcggttctgatagtctcaagaatgatttggaacataaaactcaaaagcagctatatcctggtagccgtgctgaagtcctatcacaggacagcggtataaggggctgctggtttagatgctttgtattaaagaggcgcggagacaaaatcaaggtgcgatatgaagatcttcaggatgctgatgagacaggaaatctggaggagtgggttttgctaacaaggattgctaaacctgatcagttgggtatacgcatccctgaaagaccaatggtgcggccatatcatgtacatagcaaggatccatgctctttcgatgctggttccattgttgatgcatggtggaatagtgggtggtgggaggggattgtattgcagcagggaaatgacagacgccttcaagtttattttcctggagaaaagcagattgctgatttttgtgaagatgatttgaggcattcacgtgagtgggctggtggcaaatggaattccttgggggaaagaaaagatatcacacacctgttgccccccacttcagttcatgaagagggaggtttgcttagcaaacctgtttcacaagaaggcaatccctcttcaaaattagaatctgacaagaggtgtgatgacaaatcattgggcaccaagatttcacatgatcagaagcatcagaagcgtgttctggctgatctcacagatgctctgaaattcgataacctgaaatggaggccaagaaagcggagcagaagatctggttccaaaaggcagtcagacactagcagtggcagtggcagcagcagccagggcgacatggaggagtccagcccctgcggaagttttgcagtgcttaattcagcgcccgatgaagaagtatgcaagagcagtggagaacctcttttcatgagggtttccaacctggtgatgtccagatgaagtcactccacgactgacatgttttagccttttctttccggatttcaacagccttggcgagatgtgagtttgatgcatccccaggttatttagtcacaactcacaactggtatcctgatcatcttgagagctctgaatgcttattcgctcggatgtccaggatgcaagcatggaggagcacactgttgtatttatgactgatctagatgagttttaccattttgtctcactttagggtcttgtagggtgttttaaccgtcttgttgtttagttggtgttacaaagatagctggctcattccacctcggcagtttccagagtcccttttttgtctttgtttcagcagtccaatatccaatttaatttgttcatcagctgttatagatgttcttatagtatactctctgaaatgataatatttacatcgtc

SEQ ID NO: 21889 - DNA, 4188 bp, Oryza sativa
  ref <308>: DATABASE ACCESSION NUMBER: AK072111
  ref <309>: DATABASE ENTRY DATE: 2001-12-06
gaggtgaggttctcgaaaatcctagctgcctgcaagttttctttctttgccactttctccagataacatttcgattattcctcaagacttagccactgctcgactctcctcctctctggaagctcaagactttgtgtgctcctctggcttctttttttttttttttgagaattctctggcttctctctttccaactacataccagccaagagatccagtaagttagttactcctagtacgcgtagaatggattggattcctttctttacagagcaagaattcaatctttgaggggagacgagacgatgcttctttacacggtgatacctttcttgaggtgctgtggaatcatcaatcatgttcatgtgtgctttcacaatccaaaacatgattttagctttctggctaactagccccacctccacacacctcacagagagaagaggttccaactcttcctaaaaattcagattgggacagaaaatcagaaatggaggcatggaccattagagtggtctacttcatagtgttctccttctttcttgtctctgcgagatttgggtcctgtgctccctgcagtgaagaagggagagctctcttgagatatagcgagagcgagcgagacaaatcaactgattctttgtcaaatcggggagaagggaaggtgattggcagagtgctcaacttattactcaaagagaaaatgttttccagtgaaactccatccgagttgaaagagcttggcacaatttcggagtctgtagctgatggtactggaggatttgaacattgcagaaaatgtttagcaaagtgagggttctttatttttgtggctatgaaacgtttatagtttcttgattggataactctacgagattttgcgtcatactacaatgagaaaaaaaagaacgactcgaaattttaaaacagttattaaattactggattaattaaaggataagtccacttcagtatttctctaaaagaaataaactatttcagcagataaactaattaaaggataattgccgagggagaagcccctgtggtgggcggagcttgagatcgcctcctccgaaaccgcctgaaattcagttaaggcctcaaattcagtgtgaaagcctgaaactgaaattcagtgtgtgttttcttttttcttgtatcatagtaggcaattaggaatactctgcaacatattttcatttttttttctttgcagaaatgagtttgcaggtttgtaaaggtgagaaaaaaaaggaaataaatagcatttaacccatatgtaatcttgtctttgtgttgtgtgtatttgaagtactatatactacctccattatatgtatgacactggctagtataaaattgaactagccaatatcttgtaaaaaaaaactagagggagtaacttattagtaccaataagcatgttagtgaagttatttaagtagataatgacacaatgtaaacgtaattttggattataatttagagcatgcatacgacaatgtaaggcatggtttttataataagatacctattgcttgtgttctctcatatatcaaggcaacgagaaagtgagcgtaactcaactggttatgttggaaccaaccacctggatttaaattctagatttgacatgagtatttgcatttacaactaattattatttcagtggtagacgatgtatcctagcatttaaggcaacgctacgaagatcaaccgaaatacgagcttagtaagttgttgtttttggatggctgcttttaatgaatagattgaatacgaagtatatgctggatcataagcactatactcctccaaactgcgacctactgtgtattctttattcttctcaatcagtagaggatctcttgcatatgttctttctttgctctttttcggtgagctactggaactctttgggcataatttgggacacttctttgtcctctgatcatatgctattgcagactaagtgcacttttcagaattgttgcttcatggaaatttttctattgggagcttggaatatttagaagcaaaggaatggctatatttttttagaataagtctccttccctagtttcttaatgaaagtgataaagatgtagtaattcttaactggattaggatgttgtaatctttttttatttctttaataaagtttatctaacaacggggggccttcccctgttgtgtttcttttaaaaaaaagttgttgccgttctattgtgctcaccaactcatgcggctagatatatatttcttaattgtgtttcttttcttctcatgtttgtggtaaacatttcccttcagtttaatataatgatactcaaatcttttgcatattggcaaaaaaaaaagtatcaaaggcattacctctataccatataaatcgtagcaatttttcacatattctatcatgcatttgttgttctttaaaaaaagaaacttgtgaaactcctgaattgcatcaatctctgcataaatttaattttaccccaaaaaaggaagttgatagtgttattcgttgcttgtgaaggcatccttgagtttgagtgagtagagtcgtcttcttcgtctcccaattcagttgagatccccttccgatcatccaatggccaccgcatcctctcccgcttccgtccaagattaccccgacctgcaagaggatgatgacgacgacttccaagacgacgacgacctcgatgacgaagacgaggaggacgatgatgaccaagaaccctccccgtccccgtccgacgaggctcgcctccagtccgtcctgcgccgcctcaccgcggaggaggtccggatccgggtgcacgatgtggagatccggggctgctgccgcacgcgccgcgccgcggtggaggcggcggtcggctcggacctgccgcgtgccgccaccgtcagagacctcgtgcgcgctgcagccgccgccgccgatcggatccgtcgcctcggcgccttcgacaccgtgtccatcaccctcgacgccgcgccgccagggatccccggtaacgctgccgtcatcgtccttgttgacgtcgccgaggctcgtggccgcgccgccggcgaactcggcatcttcgctaacaaagggactagatcatgttcggttcaaggttcagtgaagttgaagaacctatttggatattgtgagacatgggatgcatccggtgatcttggattagatcagacagtggagctaagtactggagtggcaataccaagaattggagcaatacctactccactggtagctcgaatatcatttctctctgaggactggttgaagtcctcactcagagaacacatgatgggtgtttctgttggtttgctctccaccatgaaccataacctcgcttacaatctgtcatggcgaactataacagaccgagcactgatgtcatccaattccataagggggcagttagggcatagccttttgtcctctattaaatatgcatacaaggttgaccagagagattcaagaattcgaccgacgcgaggatatgcttatctattttcttctcaagttggaggccttgcaccagagagcaaagatgcacgttacattagacaggaacttgatcttcgagtggctttaccgctgggtgtgttgaatggcgcccttaatgctggagtggctgctgggatcatccacccattggcaaggggatcgacgggctctatatcgccactttcagagcagttctacttgggtggcaataggtctcttatgtgccgcttgggtggaccatcatcactattaggtttcaagaaaagagggctggggacagacttgcaaagcagtaccccagagaattctgaaaatgttgcttccacttctcctgagctaagtgcacggggaggtgacattgcggtcacagcctttgctgatctgtcatttgatatacctctgaagccgctcagggagctgggaatccatggccatgcatttgtctcagctggaaatcttgccaaactaacagagcctgatctcaggaaattccctcttgctgagtttctacaaacattcaggagttctgcaggatttggtgtagttgtgccaacaagattatttcgcatagaggtttgtctttgacatccctctaaagtaactgatgaaattgaattattttgttactgaatgaattttttcccctcttgcccaggtgaatt

SEQ ID NO: 21890 - DNA, 2615 bp, Oryza sativa
  ref <308>: DATABASE ACCESSION NUMBER: AK072112
  ref <309>: DATABASE ENTRY DATE: 2001-12-06
ggtatttctctctctcgtctctccttcgagcctcccgcgccgcgccgcgttctccctcttcctccacgccgccggcgagcgccgcccgtgtccgccaccgccatggctgcgcgccgctgggcttggggacctccagcccgcgccttctccaccatcaccgcgaaggccaccgtgccgctcgcccacctggccgaactccccacgtcgctccagacctcccgctacaccgtcaccccgcccgtccagccatggccgcgccgcctcaccgcgcgcagcctcgcgcgcctcctgctccgcctcccgacgccgcacctcgccgtgctcgccttccgccacgcgctcttccacgccgccccgccgcttcccccctcgctccccgtcttcgccgccgtcctctcccgcctccccgccgccgaccccgccctcctcccccccgtcctctccgccctccgcgccgccaacctccccgccttctccgaccgccccttccttcccctgctccgctcgctcccgcccctcccttccctccgcctcttcctctccctcccctccttcaactcccacccctccgtccgctccttcaacgccctcctccactctctcgtctccgcccgccgcctccgtctcgccgccgcgctcttccgcgccgcgcccaccaagctctacatcacacccaacctcgtctcctgcaacatcctgctcaaggggcttgttggcatcggtgacctcgatgccgcactcaaggtactcgacgaaatgcctggcctgggaatcaccccggatgtcgtcacctacaccacggttctctctgcctactgtgggaagggggatattgaaggtgctcagaagctcttcgatgatataatcgctagtggacgtagaccagatgttacgatgtacaccgtgctcatcgacggttactgccagtgcgggaacctccaggatgcagccagaattatggatgagatggaggctgctagagtgcaaccaaatgaggtcacatattccgtggtgatagaagcatgctgcaaggaggaaaaacctattgaggcacgcgattttatgcgagagatgctgggggcaggatatgtgccagacacagcgctaggtgctaaggtggttgatgtgctatgccaggatggaaaatcagaggaggcgtatcaattgtggagatggatggagaagaagaacgtgccacctgataacatggtcacaatcacattgatctattggttgtgcaagaatggaatggtccgagaggcgaggaacctgtttgatgagcttgagaggggtttcaaaccaagcttgctgacgtacaactcacttatttcaggattatgtgaaaatgaagagctacaggaggctgggcgggtgtgggatgacatggttgaacgagggtatgaaccaaatgccatgacttatgaggccttgatcaagggattatgcaaaacagggaagccaaatgaaggggctacagtctttgaggaaatggtgtctagaggttgcaagccaagcagccttcttttccaagttttggttgatagtctttcggagccaagacatgaggataccattagaaaaattcttgaaactgcagctttatatggtcggtatttcctggatggtgattcttgggaaatttttgtcaggaaggtggtaaatgcaactgatacttcgaacaagcatctcgatttagtattagatatgtgatcatgtggtgctgagaaatgtaatcatcaaattcaatagcagtgtccttctacagagatatcaggatattgtggttctctgggcttgctattcctgggatgtgcagattggtatagggatacactggataaatcaaagaatgtgagctatattgacaccatcacaccggcaatagactgtccaattccagatgaaacttaccttccgtggaagaggagaacatgaacaattgttgcggtaagggatgcaaaaccaacgccatatgtgacagcaaagaaagtgctgaggtatagtggaccattcttctcgtaggcctttgtgtcgaaatggaaatgagaatcaacaatgcttgagatattgtacttttggccagttgaggtgaagagaccatcagaaaatatggggaagttttgtgccttgtagaaattgaaccagtaagcaatcggtgtgattatgtacatgatgaagaagaagccagcagcaacatttgcagtggcaaaccatgggctagcaagaggactcccgaggtaggaggagacggtggaccagtcgagaccgatcgcgccaatgccaaggccactgagacctgagccgagctgctgtgcaagcacagagtgggggaagacccagcagatccaggagagggaggtgagcatctggaacaggtagcctgggaagatgtagtatgcgaagctgcagatgaatgccacaaggaagaactggttgcgcgtcagcccacctttgctccttgcttccttctcgtgaagcgccctgatgagcaaaatacatttgcaaatgtgtaagttgcatttagtaccaagttctttggctttaaaaggtcatttgatccttgcaaacatttgtaccaagttctttggctttaaaaggtcatttgatccttgccg

SEQ ID NO: 21891 - DNA, 2713 bp, Oryza sativa
  ref <308>: DATABASE ACCESSION NUMBER: AK072113
  ref <309>: DATABASE ENTRY DATE: 2001-12-06
gacggatttttcttcacggtttctctctcctcccccacaaacaatcccacccctctctttcctctctcctacctccctcccatggcgttgccgtctccgcatatataggaggcctcctcctccctcccatcctctttctctcctccattgctgctcctctcctcgcaccaccacccgccgccgtcgatcgccggagtcgagagtgaacttggttggttggttggttgatctcgagtggtggagcacacggggatcatcgccgatttggctaaacttaaccccgctattgttaacggcaacctcgcggtcgcgagaggaggaggaggaggaggcggacatggaggccctgaggttcgtccgcggcatcagccccgccgcctccgcggctccgcagccgccaccgcctccggtggcgcagcggcaccaccagcagcagccgtcgcggggcgttctgcacgcgccgctgctccggctatggccgctcggtggcggcggcggcggcggaggaggaggaggaggaggaggaggaggggagagggtcggtgcgggcggtggtgcggttcgcggcgaggaggcgaggagccagcgcgcggcggaggcagaggcggacgagcggaagcaggggaactgggtgctgcagatgctgcgggtgcagccacagtgggcggaggcggcggacgccgaagccgcgggagtcaccggagccgctcgagaaggcggccaggaagcgctcacggcgggccgcgacggcgacgagtgctgcgcctcgtgcggtggaggtgacgacgaaggatgctgcggcgtcgaggaggacgacgagagcgacggcaaggtgttcgaccgcgcgaccttctcgaggctcctcaggaaagtgtcgctcggggaggccaaggagttctccaagatgtcctacctctgcaacatcgcctacatgatccccaagatcacgccaaaattgctgcggaggtacaatttgcggtttgtgacttcatcagtacaagagaaagccaaaactggtgttgatcagaagcaggagctgaagactgaggaaggtgaatcttcagatcaagaatctgaagttgtagagaaccctgagccagggagcaataagaagaaagaaagtgggttgggggtaaaccccttcggcgcataccatgtcatgtcgtctgctgcctcttatttacattcacgggctatgggcgtcgttccctttggttccaggaatgatggcaagaacgatccaaccatcatggccattgtaaacggtgagagtggtgaaggtttaaccatggatgaagcttcatttgtggccactacaaattcagttacctccatggttgctgccaaggaagaaacaagacaagctgttgcagatgatctgaactcttcaagatcttgtccttgcgaatggttcatttgtgatgatgatcaaggccagcacaagatactttgtggttcagggcctcgtagtcaatcgcttcttggcaggccaacctcctatttgaaccagttaaatttgagggactcgatgtgctcgttcataggggaatatatgaagcagccaagggaatgtatcaccaaatgttgccatatgtcaaatctcacttgacaagttctggtaaatctgcaacgttacgcttcactggtcattctcttggtggtagtctggctttgcttgtgaatctaatgctactgatgagaggagcagcacctgcttcgtcgttgttgcctgtaataacatttggtgcaccatgcatcatgtgtggcggtgaccacttgcttcgtaaacttggattgccaaggaatcatgttcagtcagtcacgatgcatcgagatattgttcctcgagtcttttcgtgcaactaccctgaccatgttgctaatattctgaaactagccaatgggaatttccgcagtcacccatgcctcacaaatcagaagctcttgtacgccccaatgggcgagatgttcatcctgcaacctgacaagaggctatccccgcaccacgacctcctcccgccggacagcggcatctaccacctgagcgactcgtcgtcgtcgtcgggcacctccctgcggcggctccggtccgccatgtccaccttcttcaactcgccgcacccgctcgagatcctcaaggacaagagcgcctacggccccaagggcgccgtgtaccgcgaccacgacgtgaactcctacctccgctccgtccgggccgtggtgcgcaaggaggtgcggcggcaccgggagacgcggcgggggcggtggcggcggctcctcctgtggtggccgctcggcgcgcacggcgcgctggccggcgccggcgtgctcctggacgccgccgtggagggcgggagggagacggcgaggcaggcgcgggcgcacgcccggctgctcgtcgtcctgctggtgccggcgaagctgctcgtgatcggagtcttcctggtcgtcagattgatgtgattcgcggacgtggttagatcccatccatccgttcattcattttgttggtttacacaccacactgctgcagtgctgctgtatgctactgcagcaatgattctttcttcccagagtggaatgccatacaagtgtcacacccagatgctgattttctgttttgacactaaaaaaagaaggacctcagatagatgaagatcaaatgtcaattaattagactctaaactatattagaaatttattaattggaccc

SEQ ID NO: 21892 - DNA, 2163 bp, Oryza sativa
  ref <308>: DATABASE ACCESSION NUMBER: AK072114
  ref <309>: DATABASE ENTRY DATE: 2001-12-06
ggctttcccccccgcgagccttctggaagaagcacgcatcgattgaccgcgaccgacctcgccgccggcgaccgtacggattccgcccctccccgccgcggcggcggcaccaccggggcgcgcgcgccgggatggcgctggagctgagcctggtgtccgcttcgccccctggtgggctggcggcgagcccgcccccgcccgccgccatcccggggaaggagcagcaggtggccggggtggggatcctgctgcagatctccatgctcgtgctctccttcgtgctcggccacgtcctccgccgccaccggttctactacctccccgaggccagcgcgtctctcctcatcggtctagttgtcggtgggcttgctaatatttcaaatacagagaccaacactaggatgtggttcaacttccatgacgaatttttcttcttgttcttattgcctccaataatattccaatcaggattcagtctatccccaaaaccattctttgcaaattttggggctattgtaacttttgccatccttgggacattcattgcttctgttgtaacaggagttctcgtctatcttggtgggttgacatttctaatgtacaaacttccatttgttgagtgcctcatgttcggtgctcttatatctgcaactgatcctgtcactgtgttatcaatattccaggagctgggcactgatgttaacttgtatgctcttgtgtttggagaatctgttctaaatgatgcgatggcgatttcgctttacaggacaatgtcattggtcagaagtcaagcagcagctggggagaacttctttatgatggttttccagttccttgagacctttgttggttcattgtcatcaggtgttggagttggatttatctctgctcttctgtttaagtatgctggactggatattgacaatcttcaaaacttggagtgctgcctttttgttctcttcccatacttctcgtatatgttagcagaaggacttgggttgtcaggaattgtttccatactattcacaggaatggttatgaagcactatacattttccaatctctcaaacaactctcagcgcttcgtttctgccttctttcacttgctgtcatctttagcagaaacatttgtgttcatttatatgggctttgatattgccatggaagaacatagctggtctcatgtgggcttcatattcttctcaattatatttataatcattgcaagggcagtaaatgtcttttcttgtgcatatttggttaacatgtcacggccagaacatcgacgcatacctctaaagcatcagaaagcactttggtttagtgggcttagagggggccatggcttttgcacttgctctccaatctgccaatgaacttcctggaggacatggaaaaacaatattcacaaccaccacagctattgttgttttaacggtacttcttatcggaggatcgacgggcaccatgctggaagctttggatgtaattggtgatgaaaacagatcaatagaaaattatgacgacaacaatggttacatccccccaacgtatgaggaaggttcatcatctggaggaggattaagaatgaaactgaaggaattccacaaaagcacgacatcgttcactgcccttgacaggaactatctgactccatttttcaccagtcaaactgatgaggatgatgatgtcttcggtgaacaaccccaaaaccagagacgcggattctatgaccaatagcttggatgagttgccacctgacagccacatacacgatacttagcatggtagcatgtgatgagattggaagcgatcgtaagtatacaacttctcatagttgaatagcatatgaaagagcataccgtaggatagatatcataacacaacttgattcgtcggcgatgacgaaagcatgctgcttcatgtatatattttaggcctcgattagtacgtggtggagctgtaatgagacaaaaatgattgtaagggaaaaaaaactgagcccaagcccatgtcatgagttagaatgattgcaataacccagagctgatcattggcagcttactgtcaagttggaaaagcatgttaaccaaatcaccagctgtgtcattggctggtcttgaagttactgatcatcattggggcttaaatcattcatgtttg

SEQ ID NO: 21893 - DNA, 2167 bp, Oryza sativa
  ref <308>: DATABASE ACCESSION NUMBER: AK099249
  ref <309>: DATABASE ENTRY DATE: 2002-08-28
gatccacgcaaatatttcttcctataacaggacaagagcagatcgatcgtttcctttttatttctgaggagaagaggatcgatcgtttcgttcgatcgtttggtttttgaattttgaggagaagagaagagaagaggatcggaagagatggccggcggcggcgtggaggacacgtacggcgaggacagggccaccgaggatcagctcatcaccccatggtccttctccgtcgccagcgggtacacgctgctgagagacccgcggcacaacaagggtttggccttctcggaggcggagcgcgacgcgcactacctccgcggcctcctcccgccatccatcgtctcgcaggagctccaggagaagaagctcatgcacaacctccgcaactacaccgtccccctccagcgctacatcgccatgatggacctccaggagaggaatgagaggctgttctacaagctcctgatcgacaacgtggaggagctgctgccggtggtgtacacgccgacggtcggggaggcctgccagaagtacggcagcatctacaggcggccacagggcctgtacatcagcctcaaggacaaggggaagatccttgaggtgctcaagaactggccggagaggagcatccaggtgatcgtcgtcaccgacggcgagcgcattcttggccttggagatcttggttgtcagggaatgggtattcctgtcggcaaactgtctctgtacactgcccttggaggagttcgcccatcagcttgccttccaatcacaattgatgttggtaccaacaatgagtcactgctcaacgacgaattctacattggactcaagcaacgccgtgctaccggagaggaataccacgagcttcttgaggagtttatgaccgcagttaagcaaaactacggcgagaaagtgctcgttcagtttgaagactttgccaaccacaatgcttttgacttgcttgcaaagtacagcaagagccaccttgtcttcaacgacgacattcagggaacagcatcagtggtcctcgcaggtctgattgcggcgctcaaggtggtcggtggaactcttgcagatcacacttacctgttccttggcgccggtgaggctggaactggcatcgcagagctcattgccctcgagatgtcaaagcagacggagattccgatcaatgattgccggaagaaggtgtggctggtggactcgagggggctgatcgtggagtcgaggaaggagtcgctgcagcacttcaagcagccattcgcgcacgagcacgagccggtgaagacgctgctggaggccgtgcagtccatcaagccgaccgtgctcatcggcacttccggcgtcggcaagacattcacccaggaggtcgtcgaggccatggccgccttcaacgagaaacctgtcatcttcgcgctctccaacccgacgtcgcactcggaatgcaccgcggaggaggcatacacctggaccaagggaagtgcggtgttcgcgagcgggagcccgttcgacgcggtggagtacgaggggaagacgtacgtgccggggcaatcgaacaacgcctacatcttcccggggttcgggctgggcgtggtgatctcgggcgccatccgcgtccacgacgacatgctgctggcggcgtcggaggcgctggcggagcaggtgagcgaggacaacttcgccagggggctcatcttcccgcccttcaccaacatccgcaagatctccgcacacatcgccgccaaggtcgccgccaaggcgtacgagctcggcctcgccagccgcctcccgcgccccgacgacctcgtcaagtacgccgagagctgcatgtacaccccggcctaccgctgctaccgctgatcgagcacgagcccaccgaggaggaagacgatcgatcgaattaagcaataaaatttttattcaaatcttggcgcgagcgttagctgccattagaggggttttcatttttaattttttttgtgtacccatacatatacgtatacgtgtactgcatacatactagagcacctgatggtgcttgtcgtcgtcgattcttttgaccgatttgaagtttggtagggtgtaatagcacttacttttgagttttccacattgagttgattcggtgtaataggagtcaaatttgagtttcttatgatggttgttc

SEQ ID NO: 21894 - DNA, 3150 bp, Oryza sativa
  ref <308>: DATABASE ACCESSION NUMBER: AK072115
  ref <309>: DATABASE ENTRY DATE: 2001-12-06
gttagattcattccccttctctcccactgcgagcggtgccgcacaacccctccgcgagcgacggcggtggcgcccttccccaccgcgagtagcggtggtgccctcccccactgcgagcgacagcggccacggtgccctccctcagcatgagcagtggcgatggcggcgacggcatcctcccgcagcttccatgggtggatcaggcggcgtcggtggcttcccgcgggcggatccgatgggcacagtggtgtcggcggcttccgcgggcagatcaggcgacaatgaagattaagataagatttgtgcatttattattattattcttgtttttctttttttttttattgtccaattggattttgtatctacgtttgaatttgtgttttatccatcatacgtgatgtgttactcgcgcgtgtgggaacggaggccatcgttcgattggactcatcagacaaaaaaatgatgtgaagaacgggaaattaatttttgaagtagttataagatatgttggtttaattccagtgttgataggttagtcacagtttattagtagagtcattagcggctagagtaccaaaagtaattagtgttttcttgattagtcttttccttgtatgtttcgagtccgaaccaagtcacagtccggtttattttatatgtgtcgtcagtagagaggcacagacgaaaattgagtacagaatcatcttcaaataatagtagagattaaaaccgattcaaatacggatgacgtagcaaaattctggcgagaacaagttgatactgctaaagttggcagatctgttcaagagaaatttcaaggtatttgcaaattacaagaaaggtggtgttagagatctggctgatgagattgctgctgcaggaccaaatttcttattttaattgaataatagtagtagcatgtcttaatgtatactaaataaaagggattttttatgttactcgaggatgtatctcaagctaccactcattttagtgtaaatttttgatacctcatgatacttctccagtgtaaagtaccaaaacgtatcgtaaattaacactaaaatatggcatctctcggtacctagtcttgtacggtaaaactaaataaaatgcccattttgaggatggtgacatatatatattataaaaggtttcagagtaatgtatatgagaagttgtgtttatgacttattagctcacgataatacctgtgaacattttgtgtctagccaatacaaagcattatattctcttttttaaaactatatatccctagatttttgtaccatcaacaaactttggagaaaggagcgtacaaaaaggtagagctaaaaacagtacgatggacagttagcatttgaaatgttgaacgcctttgttaatctagacacactaaaacgataataatatttacaccaccaaaaatcaatgattaaaaaatattttcctaatatatttatcttgggttgaattactacctttttctataaacttggtcgaatttgaaacagtttgccttttatcaaagtcaaaacgacttatggtctaaaacgaaaacggagggagtaatagttagggtctttaaaaaacaattctttcagcggcaagacacaaactaatggttacgaggtaactctaaagataatacaaagatagacatgcatcgcaggtaaaaagggttattgaaactaagagtaagacacttatgacaacattgatataatcaattagtacgagagatggtattacatgtgacaaaaaaattcaccaagggccattacatggtggaaaggagcaccacgtaataaaggtacttactatgggtacaacacacaataaaccataaaagtggtggtgcagttaacttaaaatgttggcagagcacaccggtcagcttgtcattcattttatgatctcttttttttccctcttgcaaggtataaaagtagaaatattccctcatgaaattcagtttagttttatttcctcatgagaattcagtttagttttatttctctagtgtgagggttatttctgaaaatttgaatgttgcgcctagcttttcctttcttcggttggtaatataccatcattttcatgccatgtcactggcaatcacatcaagcaatttttatcggaacacaaaagaactactccctccgttctaaaagataagtattttttggactctgacacggtctccgagatattattttgaccaataatatctataaaagtaagatgtttcaaataaaaaaaatttacatattatgatagtttctttaatgataaatctagtaacatcaattttacattattgatcttttttatttttttgctattaatagtcaaaattaaaaatgtttaatttgcaactatgctaaaaatgctaacattttgggacggagggagtactaattatagggtacatgtatttcatattattccatactattatattattttagcaataattcttttcttgacttcagctatatctgttcattcaatgaaaaaagcgtgtagcatgagatcctgcaaatgttttcagatgatttcactttattatgttaaaaactgaattgtagtactgttcgtttctgcaggcttgaatatcatctgttaccacactattcattcctctgcagtttgtaccatatgcaagtgtttgttcatatctttatggctactttgccctgcagcttcctcgataggttttctggatcctacaataatacttcactattgaagatgttactatatataccggatgcatggtggttgagtttggtttttaaggcactaacacggaagttcacggatccagaagctttctacttactcagaaacattacaggattatatcaccaaactgcagccacaacattcaatattcatgaaggtgtgatagccctagcctaccttatcaagggagttcaagtagtcaacagctctctccctgttgatcagaaagggatgcttacttgccccaccacagatcatctgttgtttcatccttgacaacacgcttgtccctaggtgatcgaccggtctttgctcctgatagcgtcgctaacgccccactggatgtgatgaatgaccctttctcatatttgattgcatgctcataaagttctacacagc

SEQ ID NO: 21895 - DNA, 2431 bp, Oryza sativa
  ref <308>: DATABASE ACCESSION NUMBER: AK072116
  ref <309>: DATABASE ENTRY DATE: 2001-12-06
ggcttttctctcgccttttatttcttcttcttcttcccttctccgtcgccgaccacctcgcctccgcctcgccgccgccgccgcctccgctccaaaccctagaccaatccacccccacgccgggtggaggccctcgtagaagcggcggcatccacgcacacaccacgccggcgagccccggctctcgacgcggcggttcccggtgacggagattccgagccgcgttcgtgggactggagagcgggggggggggggggaagtggtaatggacgacgtcgacagcgtcgtcgggagcggggacaaggccggcgaggcgccgggcgacgacgggagctccacgccgctccccgagacggtccaagttgccaattcacctacttacaaacttgatagaaagctgggaaagggaggatttgggcaagtatatgttggtcggcgtatttcctctcctggtgttaccgacaggacacctggagcaaatgctttggaggtggcaataaaatttgaacatcgaaccagcaaaggctgcaattatggagctccctatgagtggcaagtttacaacactctaagcggcattcatggtgtaccaagagtacattataaagggaggcagggggattactatatcatgattatggacatgttgggtccaagcctgtgggatgtttggaataataattcccactcaatgtctgttgaaatggttgcttgtattgctatagaagcaatctccatattggagaagatgcattcgaaagggtatgttcatggtgatgtaaaacctgagaattttttgcttggaaccccaggaaccctggaagagaaaaaactttttcttgttgaccttggattagctactaggtggaaagacactggttcgggggagcatgttgagtatgatcagaggcctgatatctttaggggaactgttcgctatgctagtgtgcatgctcacttaggaagaactggaagcagaagagatgatcttgaatcccttgcctatacacttgtttttcttttacggggtcgccttccttggcaaggataccagggagagaataaaggtttccttgtttgcaagaaaaaaatggcgacctctccagaatctttgtgctgcttctgtccacaacctttccggcaatttattgagtatgtagtgaacttaaagtttgatgaagaaccaaactatgcaaagtgcatttctctttttgatggcattgttggtccaaacccagacataaggccaatcaacactgatggtgctcagaagcttatatatcaggttggtcaaaaaagaggtcgcctaacgatggacgaagatgatgatgagcagccaaaaaagaagattagaatgggcatgcctgcaactcaatggattagtgtttataatgccagacggcctatgaagcaaaggtatcactacaatgttgcagatggtcggttagcacagcatattacaaaaggaaatgaagatgggttgtttattagttcagtggcttcttgttcaaatctgtgggctttaataatggatgctggcactggatttacttctcaagtatatgagctttctcaacattttcttcacaaggaatggataatggatcagtgggagagaaacttctatatcacttcattagcaggtgcaaacaatggcagttctctggtggtcatgtcaagagggacgcaatatgcccaacaatcctacaaagtaagcgactcatttcccttcaagtggataaacaagaagtggaaggagggtttctatgtcactgctatggccactgcaggaagccggtgggcagtggtcatgtcccggaatgctggctttacagatcaggttgtggagcttgacttcctgtatccaagtgagggaatacatcggcgttgggacaatggttttcgcataactgcaacagcagctacatgggaccaggcggcatttatcttgagcattcccagaagaaagcctgctgatgaaacacaggaaaccctgaggacatctgctttccccagccagcatgtgaaggagaaatggtcgaagaatctttacctagcttccatttgctatggaagaacggtgtcatgaggtccacattctgtttggctgcttctttgtagagtttattcatatcaaccgctggagatatgatttagaatgcgaattttgaagggcaatgatatttttaattgcttacctatagttaactgaattgatagatggccaagcctcctgcgtgtgttctgtataggtgccccagcctggaagttgcataatgtatactgtgctgtcctgttgttgtacccccttgtccatagattgctaaagtcgccatgttgtaagttagcgagttgtaccatgtttagaagtcgtgcatatagtttaaatttatatttaacctggaggtaggcgacaaaattgtacaaagct

SEQ ID NO: 21896 - DNA, 2721 bp, Oryza sativa
  ref <308>: DATABASE ACCESSION NUMBER: AK072117
  ref <309>: DATABASE ENTRY DATE: 2001-12-06
gtcggctctacctacctctcccgattccccaatctgcggtgtggtgtggtgcggtgcgagccggacgcaggcgtcgcctcgcctcgtcgcgcgcgcggctgtagagagagaagcctcgtagacaccctagcctcctccaccggccttgccctcctcgcgcgcacggcctcgtccaccggccttggcctcctcgcgcgcacggcgggcggggcgtgcaggtttgggggagtagcgacggcgacgcgcccgacctccgtccacctgcctccatatcggttcgggctgcagcatgtatgaggaagacaacattcagggagaattgttactcgttcaggcagaacttgatgacatccaagggcaaattagtgcactgattgatcgtcaagaggagctgtatgagcgtgaatcacagctgaaagctatgctcgaagtatctaaagcatccaacaacacaatcaataataccccttcagttggtccaaaagattggtctgggagcttcttatgggactctcgggctgatgatgttcgttttaatgtatttgggatttcttcataccggcagaatcaaagagaggtaagataatcaatgccatcatgagtggaagagatgtactggtcataatggctgctggtggagggaagagcctctgctatcaactacctgctgtacttcatgatggaattacattggttgttagtcctttgctttcccttatccaggaccaggtcatgggactagcagctttaggtatacaagcatacatgctggcttcaactaccaataaggaagtcgagaagttcgtctacaaggcgcttgataaaggtgaaggagaactgaagatattgtatgtgacacctgaaaagatatccaaaagtaaaaggttcatgtctaagcttgagaaatgccaccatgcagggcgtctttctctcattgcaatagatgaggcacactgctgtagtcaatggggccatgattttcgcccagactacaagaatcttggcattttaaaggtccagtttcccagtgttcctatgatagctttaactgcaactgcgacaaataaagtgcaaattgatttgatagagatgcttcatatccctagatgtgtcaagtttgtcagcacaattaacaggcccaaccttttctataaagtatttgagaaatcaccagttggaaaggtcgtcattgatgagattgcaaactttataagtgaatcgtacccgaataatgaatctgggattgtttactgcttttctaggaaggaatgtgaacaggtcgcaaaagaactgtctgaaaggggtattttagcagattattatcatgcagatatggatgttatttctcgtgagaaagttcatatgcgctggagcaaaagcaaattgcaggtcattgttggaacagtggcgtttggaatgggaatcaacaagccagatgtcaggtttgtgattcaccacagccttagtaaatctatggaaacatactaccaggaaagtggaagggcagggagagatggactaccttcagaatgtattctgtattatcgacctggtgatgttccacgccaaagttcaatggtcttctatgaaaactgtggcctgcaaaatctttatgacatagtacgatattgtcagtctaagaggagctgtcgtcgtggtgctttcttccggcattttggagaggctgcacaagattgcaatggaatgtgtgacaactgcacttctagtcttgagctcaaggagatagacgctacccgtatgatgattttacatcagcttggaaattttactgttgcactgaattacatacttgatacttgcatgttctttagtttatatttttacaaaatggtatttttgggagacatatttcttggaaagatttcgtttatgtatatttacacttcgattgtttctatgacttattgtacagaccatactaaaattattgtttcgcttctacatgatatccaacttaatgaccaaagagctacattgttgcagctggttgataagttcaaggcaaagtggaaagatttaggttgttcaaatgagtccattgatcttaagaaagaaggcattgaacagttggtagttcaacttatactcgatcgggttttgaaagaagaatttcagcatacagcatatgcaaccaatgcatatgttgccttgggaccactgtggaagccagcactacaagggaacagaccggtcaagcttagcgttgcttttcactctcaggataaaggtagtggatccaaacggactaagcgcaaccagatgagtaatttggaagctaagcttgatgacctgcggagagagctctcttccagtaatggaggcgtattcccacatgctgttctttctgcccagcaaatttccctcctgaaccgccaaaaaccaaccactgttgctgagcttgaaaagcttataggaaaggttaagacaggtaagtacgggagcgcgatcattgagctcatgctgttacatattgattcagaagtagccggaggaaaggcctgtgcatcgaagaggcaaaagaaagataaggaggatgttatttgtgttgagagtagcgaggaggaggatgtttaagcgttatcatggtttttcttttgaaggctaacgaggcaaatttattgttgaaccttgagtgaaccttgagttgtgttgggatttaaacgagttctgaaatatatgtagttgaggaattacagtgtc

SEQ ID NO: 21897 - DNA, 3369 bp, Oryza sativa
  ref <308>: DATABASE ACCESSION NUMBER: AK072118
  ref <309>: DATABASE ENTRY DATE: 2001-12-06
gatgtcttgagactggcaactcggaggcgaaggcggcggcggactcaatcctgttggattggagtataattccactaaagttgcctatctatcgtgtgttcttgtgttcttgtgatttgtttccctttttcctgcttaaatcagtgttgaatcttgtaagatcctgtcagccggctgcatcaaccccccacatcccggcctcccactagaccaccaccctcatcccgcggcggcctccatcgtcgactccgcttcccccgtgcgcagcccacatccacgccgacagtccgtcgcctacgccacgtctcgcaactggatccgctcctctccgtcgatctccaccacggtccctttcgcgccgcaccggaagctgcccgccagtcctctgatcgtcgctggatgctgtcggcgggtgatgcagtactcacccgtctcccctccatcagccgcaccggaagctgcccgccagtcctccgatcgtcgctggatgctgtcggcgggtgatgcagtactcacccgtctcccctccatcactgagggacattcccatcaacaaaaggtacacttggcggcatcactaatttaactccaatcgcttatatacaaagctgccgagaattgagtttaatttatgcggaagagtgctagggagcggtatgctgctcttagtgctgacgacaaggaagctaggcttcaaaagatgcgagagtactaccagcgaaaaaagagtattgatcctgtacctacccatggtatttaaattattatctcacaaacggcgtagatctgaagtgaaatcttgccactggacacaagctcactcttcttcaggacgtcaggttccttcatcacccgggtactctttcctactgtgaaaataagaccagtttcttctgtttgtcctgtttttacttgattaatttctgcgatatcaattttttaacatgcgatagaaatatcgttgatctatgttgtgtctgtcaatttattgatctgtgatgctgcatttacatgtggtgcacactcatcactacaacgacttctcctatggtattaacatactgtctctctgtttggtcatgatcctggtagttgttttactggctaggtgctcacattagacataaaattttggatttgattatatatatacttcctcatggtaagtgtctcatgttaagttctgatgatcagcgtaattgctgatgggaattcatggtgataaaccacacctgaattctataaatgtgagagaagacctccactcaatgaaatttagtcaatatgcgagcagaaaatacactaatccctgattcagtcatggagtaaattgcatcatctatgctcacacggttagtttctttacctgtatattatcttccttaccaatgcagtcatcttactgctatcaatgcatcttggcagaatcatttccttcaattaagctgaatgagtatagaaaaggaaggttgttaatattattgcatatcgctgtaaactatccactgcacatttgattatctggaatgcagtacgagagaacactttgccggtttgccttgccccgtcaatttccgtatccatttaacgttgtagagaataggctgcagtacttacgaactctaatttagatcacattaatacataaccacacatttttttagctgacactgattccgtgagcattacttcataatttacattgcataaagtttattctctctactacatgtgtttcttttaactgatgttggtcacctctattatatttaactcgggttcatggaaaagtacttctgaggactgaggccaatataacccttccttcatctatgagccttcgaaggcatcatttggcagtaaaatgggaagacggtcatttatgtatttgttatttaacgttatatataatgggtctgttgtactcatgctatgccctttcggggcagttcatcctttggtctgtagcaatgctcttcctatcagaaagattatctatacaaagtattgtatggtcactaaattattgtatgggagcttattatctgttttatcgtattagaggcatggaatcattaaattgttatataggagcttattttctgtttcatcttattagagacgtgaaaatattatgggcttattctctgttttatcttattattgacgtgggttccacgtgcacacttacataatttatgcaccagaatctgtagtagattgttcagctcattcaaactgaatcagtaactgcttaaattagaaccaaatgcattctctatgggatgactgaaacgactgattggtgcaggaactaggattaagttacagtcaaaatcagtaatacttttgagagccgatgatttctgcatactttaattaaggccactatcaccgtttaaaccatataaagtaaataggacgccatttgctcttgaattgtcatgttttaagcatgtattgctctgaaaaaagaatacttcaacctttcagcacaatatatttttaactgaatactttacgccttcattatttgtgtcctctaagattgtgaaattcagtttgttgctgttcatttatgaatattccagttattttgccagatgaaaagcagcttaaggttttgaacccaagcaagtttgttttaaatgttctgacggtacacatcatttgaggtacctaatgttgtccttttaagctttatttgaggttccttttaagcttttaacccgtgcaagcttttaatgttcagtagtcctttcatttggtcaataaccccattaaaagctttatttaagataccatgcccatataaaactttgcatgcaccttgggcatgagaacaactaaatggatttgttttcattattttatctatgtttgggcattttatcgtgtttgagacgagtatgtgtcgggctaccattgaccagaaagatagactgatatagaaatcattctttgttgtctctcttagtttgtaattagaattatctgattgttgaactcgaatttccttgatgaaaattatatttgttcagagatgctcattctagctctgtatgcagatttggtgattgaagaaatgcatcgtaacattttggcatggtttgaaaatatcgcaaattcatgcttcgtcagttaattctaagtacccatgttctgtagcctctccttttctcatttttcacacaatccttttgatctgcatacgtactatttttctttgtgtgctacggaatgtgattaaaccatgttgttcatataaagaagcatagaattgacgtgggtgcacatgtccatatttctctttgctgaatctaacgatctacatgttttacttcttaatatatagcataataacttggc

SEQ ID NO: 21898 - DNA, 2221 bp, Oryza sativa
  ref <308>: DATABASE ACCESSION NUMBER: AK072119
  ref <309>: DATABASE ENTRY DATE: 2001-12-06
gatcggaacagctctctctagctagcacatcagtgtgagagcttcaggcaaagctgctgccgagagtgagcagcaagctggacagtcagtcagctagctatagctagtaatggcggtgaccgagagcttgccgttgccggccatggagaacggcgagggtaagggaggcggcgagtacacgcaggacgggtcggtggatctccggggaaaccccgtgctccgttccaagagaggcggctggaccgcctgctccttcatcgtagtgtacgagttgttcgagaggatggcgtactacgggatagcgtcgaacctggtgatatacctgacggacaagctccaccaggggacggtggaggcgtccaacaacgtcacgaactggtccggcgccgtcttcatcatgcccttgctcggagcctacgccgccgacgcctacctcggccgctactggaccttcgtcgccggctccgccatatacttcttggggatgtgtttgctgacgctggccgtgaccattccgtcgctgaagccaccgccgtgcgccggcggcgtgtgcccgccggcgtcggccctgcagctgggcgtctacttcggcggcctgtacatcatcgcgttcggcaatggcggcaccaagcccaacatctcgaccatcggcaccgaccagttcgacgagttcgacccccgggagaagatgcacaagatgtccttcttcaactggtggatgttcaccatcttcgtcggcatcctcttctcctccaccgtcctcgtctacctccaggacaatgtcagctggtccgtcggctatggcatccccacgctgggcctcctcgtctccatctccatcttcctcgccggcacgccgctgtaccgccacaaggtgccgcagggcagccccgttcacccgcatgggcaaggtcgtcgccgccgccgtctggaagtggcgcgtggccgtgccggcggacgccaaggagctgcacgagctggagctcgaggagtacacgaggaagcgcaagttcaggatggactccaccaacgccatgaggttcctaaacaaggccgccgtgaaggaggacggctcgccggcggcgaggtggagcctgtgcacggtgacccgggtggaggagacgaagcagatcgtcaaggtgatccctctgctggcgaccatgttcgtgccgtgcacgctcatcgcgcagacgaacaccctattcgtgaagcagggcaggacgatggaccgccacatcgggcgccacttccagatccctccggccagcctcggcgcgttcgtcaccctgagcatgctcgtcgccgtcgtggtgtacgaccggctgttcgtcccggccatccggaagtacaccaagaacccgaggggcatcacgctgctgaagcggatgggcgtcgggctgctgctgcaggtggtggcgatggcgacggcgtcgctgatggagagccggcggctggggtacgcgcggcggcacgggctggacgccgccgccgcggaggttcccgtgccgctcaccatcttcgagctgctgccgcagtacgtgctgatgggggtggcggacgcgttcctggtggtgggcaagatcgagttcttctacgaccaggcgccggagagcatgaagagcctcggcacggccatgtcgctgacggcgtacggcgtcggcaacgtgctcagcagcttcctcctctcgctcgtgtcgcgcgtcacgcgggagcggggcgacgcctgggtcaccaacaacctcaacgcctcgcacctcgactactactacggcttcctcactgtcctcggcgccatcaacgccgtcgtcttcgtcgcgctcagcagcaggtacaggtacaaggtcgagtcgacggagacgatcgacatcgccgtggacgtgaagggtgacacagccaaaaagattcagaactgattatactctgtaaaaaaaaaaatcagctcaactatgaacaatgcaactcgcatgcagtacagttagattggtccggactataaacttttcaggttaattctgtcatgcagtcatcctgatgaaaaaatatacccaagaatattaatcttgaaaggggaaaggtagtaatattcttcatctgcatgaaatttgttaacctttctagaaaggagaaaaatatatctccagtcagtatcatttcttggggaaaaggtgtaaatcggtatcaaatatatttataacatgatagtacgtatatgttggagatt

SEQ ID NO: 21899 - DNA, 2780 bp, Oryza sativa
  ref <308>: DATABASE ACCESSION NUMBER: AK072120
  ref <309>: DATABASE ENTRY DATE: 2001-12-06
cgggttggacttgcccactctctctccacccccccaacccacctcgtcgctgcgccgcgcggcctcgacgtggccgccaccgccgccgccgccgccaccgacgcagcgggggccccagatctggacgctctgaggcgtcgcagccgagccgccgcccgtctcggggacctgccgcgctgctgtcctggtaggtaggcccgcgccacggtgactcgtcgtcggccccaacgaaaggcggcggcgaccgcccccctccctccgttcgctgctggtctgaaagcattgttgtattggaagcgggggtgagggatgtcgtcgtcttcgtcatccgtagtatatgaggggtggatggtcaggtatggtcgccgcaaaattgggcggtcattcatccacatgcgctacttcgtgctggagacccggctgctgtcctactacaaacgcaagccccagcacaagatgcccaagctccccattaagtcccttcacatcgacggcaactgcagggttgaggaccggggcctcaagatgcaccatggccatatgctttatgttttgtgcgtttacaacaaaagggagaagcaccagcgcatcacgatggctgcattcaatatccaggaggctttaatttggaaggaaaaaattgagatggtcattgatcagcaacaaggagtggtggcgtctgatggtaatctagcccacagctcatcgcaacaaaaagtgagcttagaaaatggaaggaaatcttctttctctgatcatgaaagtctgtacagccatgaagaggaggaagaagaagaggacaatcaacgatcattaatgcgaagaacgacgattggaaatggtcctccagaatcgttatatgattggacccgtgaaaatgatttgggaatatcaaatcagggaagtcctgatcatgttttctctagaagacattggcgccttgtcagatgccaaaatggcctccgcatttttgaggaactccaagatgttgattaccttgcaagaagctgtagcagagccatgaaggctgttggtgttgttgaggcatcctgtgaggctatatttcaacttgtgatgagcatggataccacccgttatgagtgggactgcagcttccagctggattggttctcaatgtttgtttggcctcgtgatctttgttatgtacgatattggcgacgtaatgatgatgggagctatgttgtgctatttcaatccagagagcacccaaactgtggtccacaaccaggatttgtgagggcacaaatagagagtggtggttttaatatttctcctctgaaatcccgtaatggaagaatccgaactcaagtacagcatctcatgcagatagatttaaagggttggggagttggttacttaccttcttttcagcagcattgtcttcttcatatgctaaacagtgttgccgggctcagggaatggttttcacaaagtgatgaaaatctaatacttcctaggattcctgttatggccaatatggctccgcctgtttcttctaagaaagggagaacaacacaagataatactatgcaaaccggccttcaaatggaccaaagtagacaatctacaatgcttgatgaggaatctgatgaagatggagatcaaatacctgaatctgagcaagagacatcaactcatggccatgatgcacctgttaaactgccagtgctggatgaggaggattcagatcagattgatgtttctggattttctggaaatttacgccgggatgatcgcgacaacactcgtgattgctggagaatgtctgatggaaataacttcagagtgcgaagcaagacttttatatatgataaaagcaagattcctgctggaaagcctcttatgaagcttgttgctgttgactggtttaaagatgtgaaacgaatggatcatgttgctagaagaaaaggctgtgcagtacaagttgctgctgagaagggcctttttgcattggcagtaaatctacaagttcctggcacaactaactatagtatggtattctattttgttacgaagaaactgataccgaactccttattgcaacgcttcgttgatggtgatgatgaattccgcaatagtaggtttaagttgattccatctgtccccaagggctcatggattgtccgtcaaagtgttggcagcacaccttgtctgctgggaaaagcagttgacattacctatatccgtggtccaaattatttagaaatagatgtggacatcggttcatctacggttgcaaatggagtcttggggctagtgtgtggtgtgatcacgacactagttgttgacatggcttttcttgtccagggaaatacatatgaggagctcccagaacgactgatcggtgcagttcgtgtttcgcacattgaactgaaatccgcaatagttcctgtccttggggattaacaaacttactactgctgcctactgcactgatgatcgcaacgttgggcaccatctacttgactcctgacagcatacaacaatacaacacatgtgtacagagatagaggaaccaactaccggcgctcatgtcatgtcaaacaatgtggcctattctgacttgaagtgaacaaaatgatgaatgtttcaatgtatgtaattatgctttgtgctcaatcattctggtaggtattagtacaattgcgtggcaaaaagaaagaaaggagattaaaaactagaaattaggagactggagagtgaggcccaggttagggtcagctcagcttgaataaaaatagccatgtttacttgagttt

SEQ ID NO: 21900 - DNA, 3145 bp, Oryza sativa
  ref <308>: DATABASE ACCESSION NUMBER: AK072121
  ref <309>: DATABASE ENTRY DATE: 2001-12-06
gggacgcttttcgccttgttggtgcactgtccccttcgtctcggagggaagctcgtattggacgcgccgcgagcaggtgacgtcagcggcagcggcggcggcggcggcgggcggcggcggagccgaggaggagcgaccatggctcacctgctgctgcacggcacgctcgaggccaccatcctcgaggccgaccacctctccaaccccacccgcgccaccggcgccgcccccgggatcttccgcaagttcgtggaagggttcgaggactcgctggggctcgggaagggggcgacgcggctgtacgcgacgatcgacctcggccgggcgcgggtggggcggacgcgggtcgtcgacgacgagccggtgaacccgcggtggtacgaggtgttccacatctactgcgcccacttcgccgccgacgtggtgttctccgtcaaggcggcgcagcccatcggcgccacgctcatcggccgcgcctacctccccgtcagggagctcctgtccggcgaggccatcgagcgccgcctcgacatcctcgacgccggcaggaggaggatctcgcacgggccgacgatacacgtgcggctgcagttccgcgacgtcgccggcgaccgccatgggtggggcaggggcgtctccggcgcgcggtaccccggcgtgccgtacaccttcttctcgcagcgccccgggtgcagggtcaccctgtaccaggacgcgcacgtgcccgacgcgttcgcgcccaggatcccgctcgccggcggcgggtactaccggcaggggcggtgctgggaggacgtgttcgacgccatcagcaacgccaagcacctcatatacctcaccggctggtccgtgtacaccgagatcacgctcatccgtgacggcacccggcagcgccccggcggcgacgccaccctcggcgagctcctcaagcgcaaggccagcgagggcgtgcgcgtgctgttgctggtctgggacgaccgcacctccgtcgagtcgctcggcatgaagtgggggttcatgtcgacgcacgacgccgagacggcggactacttccgcggcaccgacgtgcgctgcgtcctctgcccgcggaaccccgacgccggccggagcgccatcatgggcgcgcagatcgcctacatgatcacccaccaccagaagaccgtcatcgtcgaccacgacatgccagtgccgcgtggcggtggcagccgccgcatcgtcagcttcgtcggcggcctcgacctctgcgacggccgctacgacacgcagttccactccctcttccggacgctcgacacggcgcaccacagcgacttccaccagcccaacctcgacggcgcggccgtcaccaagggcgggccgagggagccatggcacgacatccactccaagatcgaaggccccgcggcttgggatgtgctctacaacttcgagcagcggtggaggaagcaaggcggtgacaaggacctcctcctagacctcaaagccatggccgacctcattattccgccgtctccggtgatgttccccgatgacggtgaggcctggagtgttcagttgttccggtccatcgatggcggcgcctgctttggcttccctagcactccagaggctgctgcaagatcaggccttgtcagtggcaagaacaacaccattgacaggagcatccaagatgcatacatccacgcaattcgccgcgccaagaacttcatctacatcgagaatcagtacttccttggcagctcatttgcatggaaagccgatggcatcagaccagaagacattgaggcgttgcatctgattcccagagagatttctctgaagattgtgaacaagattgaagctggtgagcgttttgcagtctatgttgtgctgccaatgtggcctgaaggacctcctgctagtggatcagtgcaggcaatactggattggcagaggaggacaatggagatgatgtactatgatattgccgttgcacttgaggcgaagaggatcaatgctgacccgagggattaccttaccttcttctgcttagggaacagggaagtaaagttgaatggtgagtatgaacctgcaggtcgccctttggatggcacagactatgctaaggcacagaaggcacgccggttcatgatctatgttcactccaagatgatgatagttgacgacgagtacatcattgttggatctgccaacatcaaccagaggtccatggatgggggcagagactccgagatcgccatgggtgcattccagccatgccacctgaacaccaagggcctggttgcaagaggacaaatccacggtttccggatgtcgttgtggtttgagcaccttggcatgctgcatgacaacttcctgaacccagagagcctggagtgtgttcagagggtgaacaagatggctgacaagtactgggacctctacgcgagcgatgagcttaacgatgaccttcctgggcacctgctgacctacccggtacgtgttacgaaggaaggcacggtgacagagctcccaggagcgaaattcttccctgacactcaggctccagtgatcggcacgaaggggaacctgcctccctttctcaccacatagagtagcaagattcagattgtgctgcataattggaaaccttgcactgttgggtggtgcttctagatatgtaatttccagcccaataatagggtgtcacgcctatttctagtcaaaatttggttgatcagttgatgctattcttttgcacgaatcatgattttcctcatgggagtactgaaataataggcatgttttgttggagatttgacctgaatatacatactactgaagtcttggacaacttggtgttgtggcacattgtgtcaaaagcttggtacgtactttagtagagtaggttttacctgtgggattcaagacagctttgagtggtggttgtcagctacacatggtcaatgtgcctgtctggagaaattttttctgcatgaactgtatatctcctttccaatctttgaattggacaagacagagcagacttgtaatcttgagtcaaaccatgctgctttctccaagttttaatacatggacaaggatttctatacttgacagtaacaacgtcacattctgggaaaaggtagtaggagcagtaagtttc

SEQ ID NO: 21901 - DNA, 3036 bp, Oryza sativa
  ref <308>: DATABASE ACCESSION NUMBER: AK072122
  ref <309>: DATABASE ENTRY DATE: 2001-12-06
gtttggggagagaaattcgttcaaccctatgaatgctttgattgaaatcaagtgctctgaagctagtcattccttgcaagctggagatgatacagcaatgaatcttcttgccagtgttgctggagaaatatctaaatctgagttgatttcttcatctgcttcacctagaaattcaccaggaaatgaagagggctgtgaaggagataacattgggaagctaaaagtacaaagtgatatgggcttgtcacggcatgcagggccaacaaatgatgctgagaaaatcatctctgataagggtgagaaaattggtgcaggtttggtcgcaaaggaggaacaacacctaggggatgcaaaggacaataaggtcacatcttctgggctaccctctccacctggaatagatgttaaggctgttgaatctcctgctaagactgaaaatcatgaagtgaggactacagataaaggtggtgatggtgacaagtcggtcacaaaacagccagttgatatcaagattgacgcaaaattgaatatatatccatctactacaagtgaattacgtggtggagataaacaatctcatggtttgttaaagtcaacagatcagaagaatcgccagtgtctaccagataattcagaagccattgaccgatctggtgacagtgctgctgttaaattggatgtggagccttcattttcatcttcgaccgtggaggtgaataaggctgatggtttgctggttggtaacgcagtgctgagagaggatgaaaagaaggaacaaccttcttccacttcagctgatgctacaaaactagctgtaccagcaggtgtaccatttggtccagaaaatgggattagttctaaagaattaaaagacaattccagtgaatcaagtagtcatgcaagacctggaactactgtctcacaggatactgaacgtagtgcaaggcgcagctcaaagaagtcgagtgatgatgcaagtgggaacgaggaccttgtctcatcagatgatggttcttcttttgctgccaagatcaggccaagtgctacagccaagcttgattttgacttgaatgaaggaatacctggagacgacgtgcatcagtctgaggcagaaacctctcctgctgtgtgttcttctgcaattaatttaccttgtctttctccatttatatcacctatgtcaagtgggctacctgctccgataaaagtagctgctacagctaaaggtccctttgttcctcctgagaacctactaagatttcagcctgagactggctggaaaggttcagcagccacaagtgcatttcgtcctgcagaaccaaggaaaatttttgagatgactctcagcgcacctggcattccagtttctgatgctgcagataaacaccgcccagcacttgacattgacttaaatgtagcagatgagcaatttcttgaggaagatatctctcagagttctgttcagacaactggttcggaatctggcaacactagaagaagcaatggtcctgtacgaagtgttggtattgaacttgatttgaacagagctgatgaagttgcagagaaccattttgtgtcgaacactccccacagggtcgaagtcccattgttatcgtcaagaccgttacctgcaattttctctagtgctgatacaaatggctcaagggattttgatctcaataatggaccaactctagatgaaactggcacggaacatgcagcaaggagtctatcatctaaaaataccagcagtataccattcatacctcaagttgctggcggtagaatgaacagtgccgagatgagtaatatctctccatggtttgcttctgcacacccttatgctcctgtagctgcacagccatttttaccatctagaggagaacagcctcacccagttgagacagctgctggaagtggaacccagaggatcattacatccttggcagatggtgtccagcgtggaagtgatccctgccgtgctccagttatttctacttcaccaaccatggtttttcatcctcctgcgtatcaatatgcaggattcccttttactcctggtgtgcaccttcaagcaccggggttttcaattggctcgacatcttatgccaattcagcacctgcaggagttccatattttcctagcattgctccaacactgttagggccagcaggtgcattacctgctcaacatactaggcaatatgcaataaaccttcctgaaggaagcagcactgttggacacgacagtaatcggaaatggggaaggcagggccttgatcttaattctggccctggaagtgtagatgcagaaataaaggacgaacgagtatctttaccagttagacaaaatttaatcacgccaccacatgcctttggggaagagcatacaagaatgtaccaaatgccaagtgttggaataaagaggaaggaaccagaaggcagttgggatgcagaacgttcttcatacaagcaattatcatggcaatgagcttttaactgttatcatttctcatttcacagtgacttcagcttccagtgagcttgtatgtacttgtattccgtctccaacaacctgcttgtttctcacttgcagctccttttcttttgaaattaaggtacggtgcttttatttgcagaggcaactgcatgtggaacttgggctctggtgtgttgcacccttgctggaatatacagttcatacatgaccctgtgatgatgtgaattgtgagaggaatgatactttgctgtaaatgttcatcatatttcatactttcctggaaacatttttccttggcttcagcagttgcactgctagattttcgtagctgtcaggcatatgcttctaatttgctccgatatgactggagatggaatggtatagccgtataggtcctgagccacaacaaacatctgaagccgttgtaattagtccagcttgtttgtttaaagtttcttatgacaaaccattttcacattgttgggcaaatctgcagccttacatatggttttagatgtgacatgtatttttcgtgc

SEQ ID NO: 21902 - DNA, 3453 bp, Oryza sativa
  ref <308>: DATABASE ACCESSION NUMBER: AK072123
  ref <309>: DATABASE ENTRY DATE: 2001-12-06
gagccagcagccagcagccagcaaagaaagaagccaagaagcgccaaaggaggaagaagactcctctctcttctcctcccttggctgcaattgcaatactgcaatacagcaaatccatatccagagaagcggttgaattccaggagccgtgtttgcgcagagaacgcatgctgcttctggaatcgtttcctgcctacttttcttctcctcccgtttggctgggcgccgctgctctctccgcctcagctcctcctcctcctcctcgtcgctctcttccctgtcgcggctgttgcgttttgccagttagagcccgactgcgtcggagccgtggcggggattgttgttgccggtgccaaaaatctgatcttggctaaggttttggggtggaaagattgggttttctttggctgggattttcatggttataggaacctgtggcagacaggatttggagttctgagtttgaagtacttttgatgtgattcttggcgcttcggagatccatttttgtgggtttgttgcgaggctctgaagtttttcgctatcaaaggtgtggaagcagtttatttttccagtacagaaggactgttagtactgtggagatttcgttgggagctcaagtgtttgtctgattagctaaagctccaatcgttttgttgattgaagaattgaaggtggaggtgttcttgtggacactgagtccgaattttgtgtgtgagatcacctgaatttgttggaggccgaatgcttattgctaggataaatctacattttggtttctgcaaagactgaagtggacttgcttgctggggagtgtgcttggtacgaggatttgaggaggagctgtagctgaggtgaaaagagatcgatggcgtcgctgtcagagagcgaggggacaaatagggggagcatgtgggagctggatcagaaccttgatcagcccatggatgaggaggcaagcaggctgaagaatatgtacagagaaaagaagttttcgtcgcttttgctactgcggcttgcatttcagagcctgggggtggtctttggtgacttgggtacatcaccattgtatgtgttctataatgcctttcctcatggagtagacgatgaagaggatgttattggtgctctttccttgatcatttacacccttaccctcattcctcttctgaagtatgtttttgttgtcttgcgggcaaatgacaatggtcaaggtggcacatttgctctttattccctgctatgccgtcatgcaaagattagcactatacccaaccaacacaagactgatgaggacctgacgacatatagtcggcaaacatacgaggagaattcagtaggagcaaaaattaaaagatggctagaagcgcatgcatataaaagaaattgtcttcttattgttgttctcattggtacttgtacagctattggagatggaatccttacccctgctatatcagttctttctgcatcaggtggaataaaagttcaaaatccgaatatgagtactgatgttgttgtaattgtttccgtgatcatcttaattggattatttagcatgcaacactatggtacagacaaagttggatggctctttgcacctatagtgctcctctggttcattctaattggaagtgtcggagcactgaacatacacaaatataaaggctctgtgctaaaagcatacaatccagtctatatataccggtatttccagcgacgaaattctgatagctgggcctctcttggaggaatcatgctaagcatcacaggaactgaagcactatttgctgatctatgccattttcctgtatttgccattcagattgcattcaccttgattgtattcccatgccttctactggcatacacagggcaggctgcttatatcattgcccacaaggaccatgttgctgatgctttttatcgctccattccagattccatatactggccagcatttgtcatagcaactgcagcagcaatagttgcaagccaggccaccatatctgcgacttactcgataataaagcaagctcttgcactaggctgctttccccgtgtaaagatagtgcacacctcgaagaaattccttgggcagatctacatccctgacatcaattgggtccttctaattctttgcattgctgtgactgctggattcaagaaccaaagtcagataggaaatgcatatggaactgcggtggttatagttatgctagtcacaacatttctgatggtaccaataatgttgctggtgtggaagagtcactggattctagttgtcacctttattgtgctttcgttgatggtggaaatcccctacttctcggcctgcttattgaagattgatcaaggtggttgggtcccacttgtcattgccacagccttcttcatcatcatgtatgtgtggcatttttgcacagtgaagcggtatgaatttgagatgcacagcaaggtctcaatggcctggatccttggcctcggtccgagcctcggtctggtcagggttccaggtataggctttgtgtacactgaactggcaagcggtgtcccgcacatcttctcccacttcatcaccaacctccctgcaatccactcggttgtcgtcttcgtctgtgtgaagtaccttccagtgtacaccgtcccgatggatgagcggttcctcgtgaggaggatcgggccaaagaacttccacattttccgctgtgttgcgaggtacgggtacaaagacctccacaagaaagatgaggactttgagaagatgctcttcaactgcctcttgtccttcctgcgactcgagagcatgatggagggctattccgattctgatgacttcagtgtgccggagcagaggacggagggatccatcagcaatgcatttctggctgagaaaaccaacaacaacacaatgtgctccaatggtgacctgagctactcatcacaggactccattgtgccagtgcagtcacctctgagggggaacagcctactgaggtattcaagccaggccagccacactgtcagtgatgaactggagttcctgaaccggtgtaaggatgccggtgtcgtccacatcctcgggaacaccatcgtcctcgcgaggagggattcggggatcatcaagaagatcgcggtaaattacatgtatgccttcatgaggaagatctgcagggagaacagtgtgatcttcaatgttccccatgagagcttgcttaatgttggccaaatatattatatatgaaacgcattttccggcttaatttgtgtaggagtagggctccatggaagagggagggaggcagctgtacatgttttttagggagaagcaactgtaaattattaataaacagtcatttttcatggggggtgtaattagtgagttgtaaatgcatatgacaaatgaatggatcagatcgaagcatgagagagatctgaaggctactattttct

SEQ ID NO: 21903 - DNA, 2325 bp, Oryza sativa
  ref <308>: DATABASE ACCESSION NUMBER: AK072124
  ref <309>: DATABASE ENTRY DATE: 2001-12-06
gagattccaccacccaagcctcctctcccaatccgatctgccgttccctcttcgaatcggctcccccttctcgccgattaccgacgaatccgaggccctcctcctccttcgaatccatggatccgcgcgccaggtaccctcccggcatcggcaacggccgcggcgggaaccccaactactacaaccgcggcccgccgctgcagcagcagcacaaccaccaccagcagcagcagacgtcggcgccgcaccaccagcagtacgtgcagcgccagccgcagcagcatcaccaccacaaccaccaccagcagcatcagcaacagcagcagcagtggctgcggcggaatcagatcgcccgcgaggccgcgggaaccgacaggaatagcgagccgaaggctgtggcgcaatccccagccgtcgacggcatcgattcgagttcacaagactggaaggcccaattgaagcttccacctcaagatacacgatacaggacagaggatgttacagccaccaaaggaaatgagtttgaagactattttctcaagcgtgaacttctgatgggaatatatgagaaaggatttgaaagaccctctccgatccaagaagaaagcattcctattgcattaactggtagtgatattctagccagagcaaaaaatggaactggcaagactgctgcattttgtatccctgcactagaaaagattgatcaagagaaaaacgctattcaagttgttatattggttcccacaagggagctggctttgcaaacgtcacaagtttgtaaagagcttgggaaacatctgaagatccaggtcatggtcaccactggaggaaccagcctgaaagatgatatcattcgtctctatcaacctgtccatttacttgttggaacgcctgggcgtattttggaccttacaaagaaaggtatctgcattttgaaggactgctctatgcttatcatggatgaggcagacaagcttctctctcctgagttccagccttccgtggaacagctgattcgttaccttccagcgagccggcaaattttgatgttctcggcaacgttccctgtgactgtgaaggagttcaaggacaaatacctgcctaaaccttatgttattaaccttatggatgaacttacactgaagggaattacacagttttatgcttttgtagaagaaaggcagaaagttcattgccttaacactctcttttccaagcttcaaatcaaccaatcaataatcttctgcaactctgtaaatcgtgttgagcttctggcaaagaagatcacggagcttggttactcttgcttctacatccatgcaaagatgctgcaagaccatcgtaatagagttttccatgatttccgtaatggggcatgcaggaacctggtttgtacagatcttttcacaaggggaattgacattcaagctgttaatgttgttatcaattttgatttccccaaaaccgctgaaacatacctccacagggttggtagatctgggagatttggccatcttggcctggctgtgaatttgatcacctatgaggatcggtttaacttgtataggattgagcaagagcttgggactgagataaaaccaattcctcctcagattgaccaagctatatattgccaataatttgacagagttccagcgtgtattcactttctctaagggtaataagaagacaattcttgtaaataccagctcatcaggttttatcatggatctcctgtggcatatgggaacattcatttttggagttttatttgagatgagacagactactcttccgatggacaccttgtgcttatatcattttggctaactaaattcaaacgccctcactgaggcacacagtagtgtatattgctaggtgcctgttcatgtgcctgtcctggcctcttagctcttatgataatctctccccttctctagatttcgttatcggctatttctcacaggacattttaaccctgttagtggttaactggttgtgggctgtgccatgtcagtgcacacattccagttgacgtgccatcgggtgtggacaagttcatccaacttgtgctctgaactgtcaatgaacagtaagcagcacaacaagcgtcttcagatattagcgaataaatctgtcgcaagccgcgtttctgcatccgtgccatgcagctcttctcttgcatgaggcttgtgccattatgtttagattctgcctcttataattgagtctaatggttctacaaactgagtttacctgtcctgagaactgggtaaaacatgtggtgaggcacatgcaacttgataaataaattttttactt

SEQ ID NO: 21904 - DNA, 3673 bp, Oryza sativa
  ref <308>: DATABASE ACCESSION NUMBER: AK072125
  ref <309>: DATABASE ENTRY DATE: 2001-12-06
tcctcctcgccgtgctcctcacaccgcaccacaccacgtctcctcctccattgctgcgccgcgccggcgacgacgcgacgacggtcacgacgcgctgagaggtttgttggtggtggcggcgagatgttggagaagaaggcgacgaggagtactagggtggatggggtgagcggcgaggcggtgatcgaggagttcgagcgggtgacgcgcgacgcggccaatgtgcagcgggagacgctgcggcggatcctcgccgagaacggcggcgtcgagtacctccgggggctgggcctcgccggcgccaccgacccggccaccttccgcgcgcgcgtcccgctcgccacccacgccgacctcgagccctacattgaccgcatcgccgacggcgacgcctcccccgtcctcaccgccaagcccgccacctccatctccctcagctccggcacgacgcaggggaagcgcaagtacctgctattcaacgaggagctcgtcaagtccacgatgcagatataccggatctcctacgcgttccggaacagggagtttccggtggagaacgggaaggcgctgcagttcatctacagcagcagggagacgaggacgaagggggggcttacggcgacgacggcgacgacgaacgtgtaccggagcgaggagttcaaggcgacgatgagggacatccagtcgcagtgctgcagccccgacgaggtgatcttcggcccggacttcgcgcagtcgctctactgccacctcctcgccggcctcctcgccgccggcgacgtgcagatcgtgtccgccaccttcgcccacagcgtcgtcctcgcgttccagacgttcgagcgcgcctgggaggacctctgcgccgacatccgccgcggcgaggtgtcgccgtcgcgggtcacctcgccggccgtccgccgcgccatggcggcgctcctcgccgcgcccaacccgggcctcgccgacgaggtcgcccgcaagtgcgccgccctgagcaactggtacggcgtcatcccggcgctgtggcccaacgccaggtacgtgtacggcatcatgacggggtccatggagcactacgtcaagaagctccgccactacgccggcggcctgccgctcgtcgccgccgagtacggcgcctccgaggggtgggtcggcgccaacgtcgagcccgggacgccgccggagcgcgccaccttcaccgtgctccacgacatcgcctacttcgagttcatccccctcaagcccgtcgccggcgacggcggctacgccgaggcggagcccgtcggcctcacggaggtcgccgccggcgagctctacgaggtcgtcatgaccaccttcgcaggtaacacacgttcgtcctcatcatgcatgacgttggttgcttattactacttgcagtccaaaaaatggatgaatatctgtcgcttttgcatatctgttcatgaaaccagtcgaaatttggtcacttgcacatttgcagctactggccatataatgtttgcccaaaaataattgtccttctttttatgacactacaaacattagcatttttgggaccacatgtgtaccgaacatgtttgggaaaatcctagggtggcaatttgtttttttggtaaatattgcaacagatatgcataaaacgaggactaagaatggttttattaattatccgagtaaatataagcaacaatggagcagttccatttgctttgcagtataaattaaaaaggcaaaaaaaataaatcagtgacagatcaaagttgttctgtacaaatgctagaaacaactaaaagttgtatacaatttcttcagataaacagctttacattctgtagacagagacatgcttcaccacatcatttagtgtaatataattagcttatgacagtttacctgcacctgttgcatgcccgttgctttcttatccgtaactggagaggcaggtttgcaaacacacagtcattagcagcctctgctttgtcctgacagcaatgcatatcggtggtcacagtgacagcacagagaactttcgcctcattgctttttttcccctttgttgacttgttttttcccctttgttgacttgagctctgacagtctgattgtccaaaggtggggcattgacttcatttggccttccaaacccttgggctaaatggtcactctggtcttgaaaacttggatctttttttattttttgttgtcaaagaattgtattgtagatgtgcctttctgtttggtagatttaaaggaccatgaccaatgggaaaacttcaggagatctgaagttgccattgccttttctgtttggttgtctgtagattagttttagacttttagtctttggttcggaagatgattaggtcatcaaacaactattaaagataagattttgaccctggctcaggcactggttggttgaggacttttgagttgcttggagacaagggtatgaacataccttggagatgtagggatttggatgaattaattaattaacccaagtggcccttcacttgcataattttctcaaacatattatgtgtgtgcacacctgactgaagatcaatgaaaactagccaatggaatggacaaaacattgaaaaaaagaagctaatttgctatgataggttaattcttttatacatgtagatcaataattgctgtgttgctttcacaaggtaacttgtactgaacacttatctgaaacttacagagttactcctacaccatcagccttagttccgactctgttgaatgcttcaaatcaagtccaaggacgactcattcaattcatcctgataaaacaaaacatcttaattattcatatgactttgagaactaatagtacttgtacgactcctaccacctcttctagtagctttaatttacaaatgggagcaatgatgatagttgtagaccatggatcaggtgtgaaactgacagaccaaaattaaacaatcccttcgaaacagaaaaagacctcctaatgacgatctgtcctatgacctttggtacgtttgctcttgtctcttatcagcagctcggaatccgtactcaactctccccagccttaaccgtagttaaccttgaccattagccaagtctcatgcattcacatccaaatgcaacagctgcaactatcaaacgaacgaatgaacaaacaaacaaacactaacactggccaggccatctctttctggtagtacattccagtatctgaatattcaggcttaattttcttacctcttcaccaacaaggtaattgatcagctcagcgttttcaccccattaatttttcattattcaaattgatagcttattagctagggtttgtcgtcgcgtttagactcatgacttccatggatggctgtatgggcgccacaaacgaaagaggagacgacgacgaagaattcttctgtggtcatgtcaggtaatcggataagaatcggtgacaggctacccggcacagcccaagtgggaagcaggtacatatgcaagaacatgtacaagctcagctcagctacctagctagagcagagatgggggccaatctattatgtctagtatacttttcttcttccttggcatgattgatttaattatgtttatatatatgcatgctaccctacgtaccatcttaatcatatgatgtttgaagcttagctacctt

SEQ ID NO: 21905 - DNA, 3092 bp, Oryza sativa
  ref <308>: DATABASE ACCESSION NUMBER: AK072126
  ref <309>: DATABASE ENTRY DATE: 2001-12-06
gaccgcaccgcaccgctccgctgctgctgctgctgctgctcatcatctctccgaagcttctcatctcctctccactcctcctcctcctcctccccctcgccacctcccacgcgctgccacgccggcgacacgaccactgcctccccccgcgcgggcgcgccaagcgccgggatcccgctgctgcgttccagttcgcggccggggcgtagtaaccacagcagtgcaatacaccttaaaatggggtctacacgatcaaagaatgaagatgacaaggccattgtcttatgccacgaaagaaaacgatatgttagagaagcacttgatggaagatgtgcattcgcagctgctcacttcgcttatattcaatcactgagacacacaggatttgctctgagaaaatttttggagcctgaagtgccaacagattcttcgctgtacacatcgacatctgcaacaccagaacctcctactattcggcagaaatcgaggaacttatctccatctatttcacatcaggccagtgactctttctccccagttccatcccctttatcttccggacggttccgtatcaatcatatgaaatctggggggaaccctgtcatgaccattgaggagaaggtgcctgttcctgtaacagcaactctacaaacatcatcccttgttcctaaagctgtacatgacctggatgatagttccacatttgaagcacctccagggacaccaccgtgggactactttggcctttttaaccctgttgagaaccaattttcatttcatgacgagaaggagcctggtcatgactttgaaaacgctgatatcaggcgtcttcgggaaaaggagggaattccagagctcgaagaggaaggggagaagactcctgtgcatcctgacaatgttaggcgcttccgtgatgagaaaacttcagatctcaaagatgcagaaaaatctcctatcaatggaagggaggatgattttgcagagtcagaagatgatttcgataatccatcatctgaacctttagtgagggtgttccagaaccgcaatgatatgcctgttgaaaatactgtgatgaatcagacacctgaacatgtggcttcagaaaagttagcttcagagaatagcgtttctttttctcgaaaacaggagaatagtgattctttttctcgaaaacaggagaatagtgattctttttctcgaaaacaggagaatagtgattcattttctcgaaaacaggagaatagtgattctcaaattgacaggccaaacaatgacaaggaggtgctagacattagcatgtttgaaagtgatgatgaaagccctgtggcaagccctgtaaaagaagtgagatcttccattgctgctcttcctatgaatgggaaatcaaaagaaccttttcatgacgttagaaatggtgcgaaggatttgcattcatgcatgaaagagattgaaatcttgtttattagggcatcagattctggaaaagaagtaccaaggatgcttgaagcagataaagtcaatttccggcctttactgcctgaagaaaaagcacatggatcaaaagcatcaggcttctttgcgacattctttgcttgctgcggtggggaggaaattcctattcctcagcctcctcctgaggctgaagtgaagtaccttacctggcacagatcagtttcttcactctcttcatcatctagaattcctcttggggtgacttcaaaagatgatgctgatggtctcactggaaatatctttagtggtgtatacatgaattctggcagtcacgcttcaacactagatagattatatgcatgggagagaaagctttatgatgaagttaaggctagcggtgcaatttgtaggcaatatgacgaaaaatgtaggcaattgagacaccaggaatcaaaagctgaaagccaaatgagtatcgatagaacccgtgctactgtgaaggatttgcactccagaattatagtggccattcagagaattgacatgatctctaagaacattgaggatctaagggacaaagagcttcaaccacagttggaggaattaattgggagtttaactcgcatgtggtctacaatgcttgagtgtcacaaacatcaacgtgagattattaagtccagcagtggcaacacgaaggtcttaattcggtcggagtcacaatttcaagcagctctactcctccaggttgagctaaacactttatattcaaccttcctgaaatggatagcataccacagatcgtacttgcatagcctaaattcatggctacttaagtgtgtgaaaccactgaggggcaagaagagctccaggaggaagaaggaagcagatactcccataactaaatttgctgttgcacccatgtttaaaacctgtgaaagctggataaagttattggatgatttaccaaccaaggacttggaagatgctatcaaaggcctcgtggcagatataaaccactctgtgcctcgccaagaaaagcggcgtggtacttcaaagttgacttcctcattatcccgttccagtagtaccaagacgatttcctcattttctcggaatggagagttaaatggtgaaatgtcagagatccacagaaattcccatactacggatttacagtcaagtttggagacattcctagaggggtttgcagagttttcagatgtttcactgaagaagtatatggaactcgcggttgacattaacaaagcaaaggaacaatatgagaatgtgaagttaaagaacatgggaaagtgaataagttcgacaaagtcagaccaaaggaactaatttctggaaggaagaatgggctacaataactcaaagccatttagaagtggataagtggatcacccatgtgtatattagcctgtttaaacaataggtataaattactgttacttttctttttgggttcagtttgcaagataggtttaggtgggagaggaatacttgtagatttctggccaatgccatgccgcagaagtgtaaatctgaggtttaggtaaaattaaactgatggtgggggatacaatatgtgtatttatcctgggtatatcattatatgagttttcccttttctt

SEQ ID NO: 21906 - DNA, 3207 bp, Oryza sativa
  ref <308>: DATABASE ACCESSION NUMBER: AK072127
  ref <309>: DATABASE ENTRY DATE: 2001-12-06
gattgacgaaccggaggaaccaaaacgaccacgcgtgagaactgagaaggctcgcagcacacacgaccatgatgctccaccacgaagcaagtgtgcaacaagcgcgagaggaagaagaagagcttgatcaccatggcgatccgatgatcacctcccctctcttgcgaccatcgacgtcgggcagctcgccggagaatggagaggaggagaactcaccggtggagctggtggcgctgacggtgccagtgagcgacgagccggagacgccggtgctgacgttcaggatgtgggtgctggggacggcgtcgtgcgcggtgctctccttccttaaccagttcttctggtaccgcaaggagccgctcaccatcaccgccatctccgcgcagatcgccgtcgtgccgctcggccgcctcatggcggcgacgctgccggagcacgccttcttccgtggccggccgtgggagttcacgcttaatccggggccgttcaatgtcaaggagcacgtgctcatcaccatcttcgccaactccggcgccggcaccgtctatgccatccacgtcatcaccggcgtccgtgtcttctacgggaaaaccctctccttcttcatctccctccttgtcgtcctcacaacacagtaccatcagatgctggggttcggctgggcgggaatattccggcgttatcttgttgagccggcgtctatgtggtggccatccaacctagtgcaggtctctctgttcaggtacactgcttgaaaaccagagtagatagtatgacaaaaaatcttctcaccagagttgaattcttgcaaaattttgatccactcatacctccacaccggcaatgcaagagtctgaaccaccacatatgttccacttggaagttggaaccgctgcagtgctgcaccgaactacaacaaaaatggaagaagaaaagtgacatagttaggagctgagggacctcttatatattttctctattattttttcaagaagcttccctagctaagaatgacaggacaaacacaaaccaaattctgtttgagtatagtaagaaatccaagatttaaacatatgtaaaactaaaactaaaatggagttgtgcatatacacattcttagctctgaaacgacaaagaagtttgcatttgcattccgtaagaaaataacttacatatttcttatactagcgcacttcatgagaaggaagcacggagaaaaggtggcttgacgcggaaccagttcttcctggtggcattcgtctgcagctttgcatactacatcttcccaggctacctattccagatgctcacctccctctcctggatctgctgggtcttccccagttctgtccttgcccaacagcttggttcaggtctccgaggcctcggcgttggtgcaatcggtctcgactggtcatctatctcctcctaccttgggagccctcttgctagcccatggtttgccactgtaaatgttggtgttggcttcttcatcgtcatgtacataatcacaccaattgcatactggtttaatttctacaaggcacaaaatttccccatattttctgatggcctcttcacctcgactgggcaaaaatacaatgtatccagcattgttgactcccatttccattttgacaccaaggcctatgagaagaatgggccactatacctcagtacttcccttcttgtcacatacggtgttggttttgcaacccttgctgcaacaattgttcatgctctcctcttccatggaaggtatttttttttcttagattcgccactccactgtctacaatattaaaataatgtggttaagaaccatgatacttgtctccagtgaaatttggctattaagtaaatcagcttttcaagaaaaaaggatggacatacacacgaaacttatgaggagatataaacaggtccctgagtggtggttcatatgcatccttattgctaacatcggaacgaccatatttgcttgtgaatactacaatgaggaactccaattgccctggtggggtgttttgtttgcatgctccattgcctttttcttcaccctcccaatagggataatcaaagcaacaacaaatcaggtatgtggatttaacacattgtgcatattatgtcatacagatctaaccagttcagcctttttcattatatacagactccaggcctgaatgtcatcacggagtacattattgggtatctgtaccctggacgacccgttgcaaatatgtgcttcaaggtatatggttacatcagcatgaaacaagctttggcatttcttgaagattttaagctgggtcactacatgaagattccaccgaggacaatgtttatggctcaggtggtgggaacttcaattgcagcatttgtgtatattggcacagcatggtggctaatggagacaatccccaacatctgcaacactgagctcctcccgtcagatagcccttggacctgcccaggtgaccatgtattctatgatgcatcagtcacatggggacttattagcccgcgcaggatatttggggacttaggcacttattcagctctaaattggttctttttgtgtggagctattgcccctctacttgtctggtttgcacacaagacattcccaggccagaactggatcttactcatcaagacgcctgtactaattggtgccaccttccagatgcctcctgctactgccgtcaactacacgacttggatacttgttgggttcttgtcaggttatgtggtctatagatatcgacgtgattggtgggagagacacaattatctgctttcaggtgcactggatgctggtttggctttcatggcggtcttaatttacttgtgcttaggcttggaggacatcagtctgaactggtggggaaatgacttggatgggtgtcctttggcttcttgtcccactgctaaaggtatagttgtcaagggatgtgcagtctatacttgaggatctcctattgcttcttgtcccactgctacagtgttacccagacctccatgggtgcaagccaatatgattagatctaatttgacccttgtcatctataaacatcagtagaaccagctttgattcatagctggaaattagcaatgtagtttcagggttagtggtcataacttgtatcctatcagtattctcgaaaaaacttgtatcctaccaaacaagttaaattttgatctctg

SEQ ID NO: 21907 - DNA, 2286 bp, Oryza sativa
  ref <308>: DATABASE ACCESSION NUMBER: AK072128
  ref <309>: DATABASE ENTRY DATE: 2001-12-06
ggctctctcgtcttcttcctctcttcttctccagccacaggcgccatatagtagcatatgctcctaagctagcttgttataccagttacgtcgtcgtcgtcgtcatcatgtgctatagctagctccaaacaaaacttggagaatttggagcgtacgtgtactagctagtatagattgcagcagcctagctagcccagcagcaagaagacgaggagatagctgcagtctcgtttttggcttttcgaatttattataaccccggtcgtgcaaatcgaagaggattggaagtcagctggtagactagctagcgtccaagatacacatactactatcgaagagtgtgacttaattggattggattaattccatgcctatcttcttcttcagccacaatttaacagaacaagacaattagtctatcagtggtttgagctgattaactatcatcagagatagagatggcagccgcctcgtctgcacactacttcggtctcggcgagccgcagatgcagcagcagcagcagcagcctcccctgcagaacaacgcggctgctccggtcgcggccacgccgccgcccaagaagaagaggaatcagcccgggaatccaaatcctgatgcggaggtggtggcgctgtcgccgcacacgctgctggcgacgaacaggttcgtgtgcgaggtgtgcaacaaggggttccagagggagcagaacctgcagctgcaccggcgagggcacaacctgccatggaagctgaagcagaagaaccccaaggagacgcggcggcgggtgtacctgtgcccggagccgtcctgcgtccaccacgacccgtcgcgagccctcggcgacctcaccggcatcaagaagcactactcccgcaagcacggcgagaagaagtggaagtgcgacaagtgcaacaagcgctacgccgtccagtccgactggaaggctcactccaagacctgcggcacccgcgagtaccgctgcgactgcggcaccctcttctccaggagggacagcttcatcacccaccgcgccttctgcgacgcgctggcgcaggagagcggcaggattatgccacccatgggcgccgccctgtacgccgccgccggcgccggcatggccatcggcggcctcaccggcatggccgcctcccaccagctccaaccgttccaggaccactcctccgccatcaccaccgccgccaacgccgccgcgcagttcgaccacctcatggccacgtcgtccgccgcggccggctcccctgcgttccgcgccgcgcagccgacgtcgtcgtcctcctcgccgttctacctcggcggcggcggcgacgacggacaggcccacacctcgctgctccacggcaagccggcgttccacggcctaatgcagctgccggagcagcaggggagcaatggcggcggcctccttaacctgagctacttctccggcgggaacggcggccaccaccaccaccaccaggagggacgactcgtcttcccggatcagttcaacggcgtcgccgccgggaacggcgcccgcgccggcagcggcgagcacggcaacagcggtaacaacgccgactcggggagcatcttctccgggaacatgatgggcggcggcggcggcttctcgtccttgtacagctcgtccgaccagaccgtcccgccgccgcagatgtcggcgacggcgcttctccagaaggccgcacagatgggcgcgacgacgagcagcggcggcgccggcagcgtgaactcgctactcagaggtctcggaagcggcggcggcggcggcgctctgaacggtaagcccgccggagcagccgggttcatcatgtccggggagagctcgtcgaggagcactgcttctcagacggcggagaacgagagccagctccgggagctgatgatgaacacgctctcggcgaccgggggcggcaccggcgccggaacggtgttcgtcggcggcggcttccccggcgtggacgacggcaagctgagcacgagggacttcctcggcgtgagcggcggcgcgccggggcttcaactgcggcacggcggcgccgccgggatgggcatggccggctcactggaccaagagatgaagtaattaattaattattatattaattaaccaccagattattagggttcatcgatgcatcatgcaagcatggaactagctaatcaatcgatcgatcgatgagatgatcaagttaatggtggattaatgtggtgttttgattatttaatttaggtggatcaactggtgataatgcatgttaattgcc

SEQ ID NO: 21908 - DNA, 3071 bp, Oryza sativa
  ref <308>: DATABASE ACCESSION NUMBER: AK072129
  ref <309>: DATABASE ENTRY DATE: 2001-12-06
gacctcctatccgccgccgccttcttcttcctcctcccacccgcgcaagctatccgccgccgcatcgcgtcgtcgacgaggagatggtggggccaggcctgtacccggagatcggcaagaaggccagggatctgctgtacagggactaccagaccgaccacaagttcaccctcaccacctacaccagcaatggcgtcgtaagtgctctcgagttttttttgttgttgacttgttgtatgtaagaggctttcttgatttatttgtgtgatttactgcccctacctgctgttgttaatgtgtgatgtgtgatctttgcgatggattagtttatttatagtccatagttagtggattgtaggaggtatatgaatgccgggagatttgccaggtctcgcttgtgccttggtttgtttcgcttgtttaggaggattagcaatgtacctgttgcttagtgagacgcgggatttgtaagctaaaagattgttcgagagattatctcttggatagtggtaaaatgatttaggagtaatctatatcctaggtaggtcttttttgttattgataatgataggtagggagttgggttaaaacaacagtatgcttggcaactgattggtggtttgattgttttgaaagagggttgaacatgaacttgttggttgcagaacattagtttaattagtcttctttatttaagaaagcaagtctattactgaagcagggaggactcttgtttggtacattatgcaattattatactttgcccttggtatgcttacggtttttaaagaaaactaaaagttatgggagaaatcccttcatgcaagtgcttgtaagtggaatagttgaagtgtgctcctgctaagagaagcattgatgaaagtgaattttgtgcataataaacacaaaactgtcttgtattgttggaataacctaaactactaaaggctgtactaatcaattacatgttcgtaatgatagcttgtaaaggtggtgactggttggggtgtatatttgagggttatcttagtgttgcttttcctgtatgattgtaaattttgatacaatcatgcctgttgtggcagctatgatgttatttgtttagctctttgacttgttattccttgatgcaggcaatcactgctaccagtacaaagaaggctgatctgatttttggtgagatccaatcacagataaagaacaagaacatcactgtagatgtgaaagcaaactcagactcaaatgtatgactctttctctcacgcacacacatcgtgtgcacacgcttgcgcacacatacacacagataaacgtgcacacaactaatttacattttgtgattgccttctacattgcaatggtctgaaatccttgttctatatgaaatacacagacacacccaaataaacttgcacacaacttatttagattttgtggttgcctgctacattgcaatggtttgaatccttgttctatatgaaatgattttacgttgccatctgacgaattcgtaccgaatatgctactagttttgattgcattgagcaatatgttctgtgattagctgttatgccatgctctcccttttttgtattgactgcttctatctttggccaggttgttactactgtaaccgttgatgagctaacaccaggattgaagtccatcttgagctttgctgttccggatcaaagatctggaaagtttgagcttcaatactcgcatgattatgctggtgttagtgcaagtattggtttgactgccagtcctgtagtcaatctctccagtgtttttggaaccaaggctcttgctgttggtgctgatgtctcacttgataccgccacggggaacttgaccaaatataatgctggattgagcttcagtaatgatgatcttatcgcgtcattgaacctgtaagtgtcttgggcttacagtgaattgttaccttcatcatcttctaacttcataactctttaagttattgtgaaatccacatttgtacatcctattgaccattccatctgtcccgctagaagcaatgtgtctgttcttgccatctgaacaacttatagcccaaatagagtttatatatatatatttttatcaggtttcatgatctacctctttcaataatggtaggaaacatgagataaaatagagtaaacttatcaatgttaatatcttattgtagttgacatgtttccttgttctcgttaactacagagagcaagataatgtttacaagccatgtttgtgatctccattcaaaagccgctactattttagttgaccatatacgatcaagatactttgcacaatacacaccttatcaacattgaaaactgacgtttggtgttacattcttttattaaaatcaaacaaatatgttgaatctagaaataagtatcttggcttgcatctcatatcaactaatcatcaatctctattatcctcatctttagatagatataactgatcccatatgtaggacttgctagttgattgtattgtttaccaaaaatccaaaatccataattgatttgaaactgtcttgcaggaacaacaagggagatagtctcactgcatcttattaccacattgtgaaccattcggccacagctgttggagctgagctgacccacagcttctcgagcaacgagaactccctcaccttcggtacccagcacactctcgacccgcttaccgtcgtgaaggcccgcttcaacaattccggcaaggccagcgcgctgctccagcacgagtggaggccaaagtctgtgtggaccatctcagcagaagttgacaccaaggccattgacaagagctcaaaggtcggcattgcggtggccctcaagccttgatttttctcagggtgtacttacatttcaaagatgaaattgagatgagttgaaaaacatcttggcgcatgcgcatcttttggttgttgcagtctattagattccaagaactgccatgtttaatttgaggattttttttttctgttatcggtgttagcacttgttcaatgagcaacccttgcaccccaataattcaagctcggcaaaattatg

SEQ ID NO: 21909 - DNA, 2964 bp, Oryza sativa
  ref <308>: DATABASE ACCESSION NUMBER: AK072130
  ref <309>: DATABASE ENTRY DATE: 2001-12-06
gatcctctaatccatccctttttctctccattctcttctctaatcctcctcttctcctcgctgcaacgcgacaaatcgaacagatcaacccaaattttgatcatcttaaaattctaaattgatctaagcagtggcatccattgctactcctcttcccactccaccctcttctcgtcttcgtcttcttccccgacacgtcacctcgccgccgatggagtcccacgacggcggcggcggcggcggcggcgatggggactcgctcttcgaggggatggtcctcttcaccccgtccctctccgtcgatcccgatcccgcgccgcccgtcgccgaggcccccgaccccaagccgcccacccctcgcgacgatgccgccgtcgccggagctgacggggcggcctcccagcagcagccgccgccgcctctggatgaggacctgttctccgatctcaccctcctgtccccgcagtcccccgtcgacctgagcggcgcccaccaaggtcaagatcaggaccactccgccgccgcgcccccctcgccggtgccggctccggctgcacccgtcgccgttctggcccggcaggcgtcctcctcggcctcctcgtcgctccgcaagaagaagagggccgtgcgcatcgggtatggccgctcgcctcaacccgcgcctccttcccctcctgccgttgcaattgctgctacgaccgccaccgcagctgctaccgctagtgtaatccatggcagcgtcctccccgatgcttcgatgcatcatcaatccgctccgaccatcccagtccaccacctcgaacaccttgataatggcgttgagcaggctgcagcggtagcggtggtggatccggatgagaattctcttcatgtgaaagaagaggatggtgaattggaggaggatggaggtgctggggctgaagcaatggggattgaggagagattggctcttcttagatcccaaatctccggcaagctcgagtctatccagcagagagccactgctgtggctgccaagaggaggcagttggctggtaggcggcgaaaggttgcggaggacgtgggctctgcggcatccaggcacaaggatttggagagggagcttgaagaggcgtgcgaggccgaggactttgagagggccgagaagatcagcgactcccttgcggcattggagaaggacaaggatcggttgttgacagcgctgcgtgatgcggagctcaattatgattcggtggatttggaattgcaggatgtgctggattcccgcattgccgcagaggaggaagctgcttcactcctggagcattttgcaaaggatgctactgatcacactgattcagcaagcaaggaggcagaagaaatatcattgaaagaaatagaagggtggcgagaatcaatggaattgctagaaacaaagaaactagagacggaagtagaaagtgaattggttttggcagcacgttcaggattggaagattcgatagaacatctggttgaagatgacaaaagagaaaaggacatgctgagtaagaaaggggatacccttgcagaggagttaactgagctcctgaaattggtaaggttgaaagaagcagagatagctgaaaacaatgctcagatccaggaggttcaagaaaggatcactgccgttgtctccagattttatggatcccagacagatattgatctaaagctcaaaacccttcaggaagcacaaactaaaatggactcagaggctcaagcacttgccctaaaaaagaatgaaattgatagtttcatctccttatcagaacagaaagactcaaaattacgggaaattatcaatgattgttcctctgaagcaaaagcttgccagcagtcagtagatatcagaaggaagcttgcatcgtcaattttgaagtcaagggaggacagaattgggttgttaaaaatggaggaggaaattttgcaagatatccaagtgctcaggcaacaaacatcagatgcaagaatcagtcttcaggagatatcttaaggaaggctgtcattcagcaagatatagctacatttaagcagaaattgagctttattgacaaaaggggccctgaactagaggctgaaaagagagttgctgccgctgcaaggaatttcaaggaagctggaaggatagctgctgaggctaaagcgctttactctgaaaaggaagaacttcatgctaaacttgagaaagctgctactgatctggaggtaatcgaaaaggatatcacagctaccactgacaaaatacaggaatgcgaagggcttattatactcaaagaaaaagaatcagccatgacaagttacaaaagactcaggttggatgctgctgctgctagagcagaattgactgctgcaactgaaacagacgatagcgaagaggttgaggttctgcggaaagaagctgaagctgcagaatctaaagcaatggaactaaaaacatgctatgaccttgaactggacgacaacgaaatcatgtttcagcctgtagtccctatagtattcataaccaattcaacagggcagcacttgctagaaattgcgtcttctttcggtctatccccctagaagcaaacttcgacagtacttgcatgccaccatgcttgttacagtttgtagagttttgccagcgacagctgcctattgaagggaacatctgtgctgcaatcaaagcttatctccagatatacatgtcttcctcattgttcctccttacctcctagcatttgggatctactctaaatcgaggagaggttcctaggggacagccaagtgtataacatccattttgcgtactcaaactcttcagggagtttgtctccccctcatttttgtgtacattaagactgtaattctttgttgttgtggtaattttggttgagctacagtaaatgccattcatccgaatgtaatcagtataagttatccatgaaataaactctcttctgc

SEQ ID NO: 21910 - DNA, 2870 bp, Oryza sativa
  ref <308>: DATABASE ACCESSION NUMBER: AK072131
  ref <309>: DATABASE ENTRY DATE: 2001-12-06
gattttgaatgtgacctactctcccctcaccccttcatcaattcggctcagaggctgctcctcctcagtcctgagtctcctgtcctcatctccattttgttttctcctcctcctcctctctctctctctctctctctctctctctctctgtctctctggtggagtgcagtgcagagattcaagaagttcaagatcgaacaggcctgctggtatgaaccctgttcatgttttttgcttgctctgtgtaatctctctgggctctggccatctggtgctggagagattggagatttgctgcataatcattggttcattactaccagttgtttgttgaagctccattaattggggattcagtggttcttgttttggtatttcctcttaccatttcttagggtggttttggttgatgtattttcccacaaattcattccatgcgtggagttcttgatggctaatccatagtggtttcaggctttcagctgctattcttctttttgttttttctcctcccccaaattgtctgctgtatggaacagagagcagttcattatgttttctggatgctcttgtatgcctttttttaatcaaactgtcagcttctgttctctgtccatgcttcttctgggctttgacctgaaagattgtggtttagaacattaaatctgcaccccaaaaaccatatattgtccgacatgcagaagtggaaatgtgagctcttgtttaatgctgctcatttgttgcctcttttcaagaaaatgaaaatttgttacaattgcgtggtctagttcttgttttcttccatccctgtattagataaggagtttggtaggcactgtcacatgattttgtgccgcaattgattttattcattagattagtaacctaaggaatccaagaacattagggtacattaataaaatgcaaagaaacagggacagaagagagtaggttctttactttgcccagttggcatcccctgaagtgatgcttgatgcttccttccattttgattatctcttgctgctgttggtggtaaatcattattattagtactaccttttttatttttcggaagaagaaaaagaggaacaagccaatgtggcctacataatatgtggtctagaaagttggcatcagtagtgtgttgatgcaatttgaggaaattaaggcagaaaggaagggacaggaaaaggggctgaaaggtttgcttgagcatagtgcatctccacaccttaaaattgctggtcaaattgtccttaaaatcgtttatatcacgcagacggcatatcgttctcgacattgccttccttaactcctgtgttaattcgaccacaactttagaacagcttgttgagatttcttaatcccagtgttgtatgtcaacattgcattgattgtagtattattatgagaagattagatactgtaacccctccagagagtgacatccattgccttctgttactggatttctgccaattcttagttagatttatggataaaaagtttttaaccaagtagacttaacaggaccaaaggttgaatttgttcacctaagaaaaatgtacaatttgttgaacaaacagcacaattcttgaatgaggagatttttagtagtcaggtttgttgtttggatatcatagtttttgaatgaggagaacatattggttggatttactgcgtggacatcacaattattgaatttggagaacaaattggttagatttgttgtgtggatatcatacttcttgaattagaagaccaaactagttgtttctttgaacaaattggttagaattattttttttttaaaaaaatcatttttcccttcatgaattaggaacagacagattgatgcccatgttaccatggtggtgtctgactcattgcagtcttatctttttacactctctagttttcccaagctgcaatcatggtggccaagtgcatgccatgatgcacctctcatataccaccatctctgcatgctcaagaacatcatgattttttgttcttcttgtcaccaactttttttttgtttttccccctaacttcttttcacccttgcaacgcacttctcactcgtagctttagttttcctcttgtcagtagcatatgtttgtttagttgtgataaattatcttttttttccagatcatgccttgtgctgcggccgagctcgccaatggcgaggcggcggcagcagcagcatgcgcggtgaaggtcggcacgaccggcaccatcggctcgctgatgacgagggagctggaggccatcaaggccgcgccgccgcacgccacagccgcggcgacgacgccgcggcggctgaggcggcagagcagcccggtgtcggtgccatgcggagccagcccgaggaagatcgccgcgctgaggaagagctcgtccagcctctccaccaccagcagcggcggcggcagcgggcggcgcactgaccgcgtgagcgccgaggagtcgtcggcgtgcaagacggcggcgtgcaggaggagctctagtaccacgccggccagctccccgatgctcgcggcggacgtcgaccggagcggcggcggcggcaaggcgaagaaggcggcggcgagggggcgccgcggcgtcggcggcgtggaggtggtggacgtgaggtgcgggaacccgatgagcagccggctgaggaggctgggattctccaagctgtcggagacgttcgcgtgagcagaatcagatcgtcttcagtcctgacggcgagctgtgtcgcgaattgcaattcggaattgcattatgtttgctatagtaattatattgttgttattaaaattttcttttgctggtttctctcgtgtatgggtatgaccaaattaagttaatttatg

SEQ ID NO: 21911 - DNA, 2812 bp, Oryza sativa
  ref <308>: DATABASE ACCESSION NUMBER: AK072132
  ref <309>: DATABASE ENTRY DATE: 2001-12-06
ggtccagttccacgaaaacccaaacggccaaacccctgtgtttgccgtgacgatgccctccctccccaactccggcgacgagggcggcgccccgcctccgactccgccgccgccgggggcgcgccgcgtggtggtcgcccaccgcctccccctccgcgcggatcccaatccgggcgcgccgcacgggttcgacttctccctcgacccgcacgcgctcccgctccagctctcccatggcgtcccccgccccgtcgtcttcgtcggcgtgctcccctccgccgtcgccgaggccgtccaggcgtccgacgagctcgcggccgatctcctcgcgcggttctcatgctacctggtgttcctccccgccaagctccacgccgacttctacgacggcttctgcaagcactacatgtggccgcatctccactatctcctcccgctcgcgccctcctacggcaggggcggcggcctccccttcaacggcgacctctaccgcgccttcctcaccgtcaacacccacttcgccgagcgcgtgttcgagctcctcaaccccgacgaggacctggtgttcgtccacgactaccacctctgggcgttccccaccttcctccgccacaaatccccgcgcgcccgcataggtttcttcctccactctcccttcccctcctccgagctcttccgcgccatccccgtccgcgaggacctcctccgcgccctcctcaacgccgatctcgtgggcttccacaccttcgattacgcgcgccacttcctctccgcgtgctccagggtcctcggcctctccaaccgctcgcgccgcggctacatcgggatcgagtacttcggccgcacggtggtcgtcaagatcctctccgtcggcatcgacatgggccagctccgcgcggttctgccgttgccggagacggtcgccaaggccaacgagattgctgacaagtacaggggacgacagctgatgctcggcgtggacgacatggatttgttcaaggggattgggctcaagctcttggccatggagaggctgctggagtcgcgggcggacttgcgtggccaggtggtcctcgtgcagatcaacaacccggcgcggagccttggccgcgacgtcgacgaggtccgcgcggaggtgctggcgatccgtgaccggatcaatgcccggttcggctgggcggggtacgagccggtggttgtgatcgacggcgccatgccgatgcacgacaaggtggcgttctacacgtccgcggacatctgcatcgtgaatgccgtgcgcgacgggctgaacaggataccgtacttctacaccgtgtgccggcaggagggcccggttcccaccgctcctgccgggaagccgaggcagagcgccatcatcgtgtcagagtttgtcgggtgctcgccgtcgctgagcggcgcgatccgcgtcaacccctggaacgtggacgacgtcgcggacgccatgaacacggcgctgaggatgagcgacggcgagaagcagctgcgccaggagaagcactacaggtacgtgagcacgcacgacgtcgtctactgggcgcagtcgttcgaccaggacctgcagaaggcctgcaaggacaactcgtccatggtgatcctcaacttcggcctcggcatgggcttccgcgtcgtcgcgctcggccccagcttcaagaaactctcacccgagctcattgaccaagcataccgccagactggcaacaggctcatcttactggactacgatggcacagtgatgccacaggggctgatcaacaaggcgcccagtgaggaagtgatccgtactctgaatgaactgtgctctgatccgatgaacaccgttttcgtcgtcagcgggcggggcaaggatgaactggctgaatggtttgcaccatgcgacgagaagctggggatctctgcagagcacggctacttcacaaggtggagcagggattctccctgggagtcatgcaagttggtgacacattttaattggaagaacatcgcagggcctgtaatgaagcactacagtgatgcaaccgatgggtcatacatcgaggttaaagaaacatcactagtgtggcactatgaggaagccgatccggattttggatcatgccaggccaaagagctccaggaccacctgcagaatgtgcttgcgaacgagccagtctttgtgaagagcggccatcagattgtggaagttaatcctcagggtgtgggcaaaggagtcgccgtgcgtaatctcatttcaaccatgggaaatcgtggcagcttgccagatttcatcctctgcgtcggcgatgaccggtcggatgaagacatgttcgaggctatgatcagcccttcgcctgcgttcccggagactgcacagatcttcccctgcactgttggcaacaagccgagcttggccaagtactacctggatgacccggctgatgttgtgaagatgctccagggcctgacggactcgccgacccagcagcaaccgcggccccccgtctcgttcgaaaactcgctagatgattgaaggatcaagaagaggtcgcgtgacatatatgctcgtgagaaagagccccgttcatttcgttcatgattgctttttgtaattagcagaaagagagagagaaaaaatggttttggggggaggtgtgaaaatgggaaaagggcaaaggtgagcaaaaactgactagtgatcgatcggtaggttacagatgttcatgttttacccggtaggcagttcttttgtacaaacgtcaaaagttttttttccctgcctagatcgtcagaagaaacaaaatcatatggttcggtg

SEQ ID NO: 21912 - DNA, 2224 bp, Oryza sativa
  ref <308>: DATABASE ACCESSION NUMBER: AK072133
  ref <309>: DATABASE ENTRY DATE: 2001-12-06
gagcaggtgaggtgagagctccacctcccggagctcgaggcttccccggtgaacacctcctcccggacaaataaactaatccaaatgccgacctcgcttccggtgctcgagctcatcggcgaggcgtccgcacgtgcgccaagaacccctcatgagcaggtgaggtgatccttcaagaaaccagcaaaagaaatccaaggtcaatgccggaagaacaacaagaagcggaagaggggatcgccggcggcggcggcggatgggcgagcacggcgctgcagccggtgcggtggctgcggatgctgtgccgggagctgggcgcgacgttcgtcgccggcgtggtgctggtgtacgggctgagccaggggttcgccgggtccttcttccgcgtggcgtcggactactactggaaggacgtgcagcgggtgcagccggccaccgtgcagctcctctccgccgtcttcttcatcccctgggtcctcaagcccctctgggggatcatgaccgacgtcttccccgtccgcggctaccgccgccgcccctacttcctcttcgcaggagtacttggaacggcttcagctgctattgttaccatggttaatggactaccgatgacttccgctatactttcctttgtggggatatcaacagcagttgccatagcagatgttacaatagatgcatgcattgcgaagaatggtattgataagccatcattagtcccagacatgcaaagcctttgtgcattctcatcatctctaggtgcacttattgggtatgctacaagtggaatgtttgtccaccatcttggggcacagggtgcattaggtgtgatggctttacctcctgcaacgttggtttttctaggatttttcatatatgagctgaaaatgtatcagcataatgtgaaagagaaggttttgaataaggttcatatggcagtgaaagggatggctcagacaataaagtacccagtagtgtggaagccatccctgtacatgtttctttccctggcgcttagtatcagcactcatgagggacagttctactggtatactagcaaggaaccacctaatcctggattttctcaggaatttgttggtatggtccatgccatcggcgcagttgcatccatggtgggcgtcctggtgtaccacaagtacctcaaggactaccctttccggagcatcctcttctacgcgcagctgctgtacggcgtctccggcctcctcgacctcaccttcgtgctccggtggaacctcctcctcggcgtgcccgacgccgccttcgtcaccctggaggagtgctgcgcccgcgtcgtcggccgcgtcaggctgatgccgatgatggtgctcagcaccaagctgtgcccgccgggcgccgagggcaccttcttcgcgctgctcatgtgcatcgacagcgccggcatgctggcggccaaggccggcggcgccgccgtgctgcgcgcgctccgggtgaccaggaccgacttcgcccgcctctggctcgccgtcctcgtcaggaacctgctccggctgtccacgctcgccgccatctcgctcgtccccacggccgaccagaccgacgtgctcctgccgcgcgacctcctcgccgtcgccggcgacggctctcctcccgccgccggcgacggcgacgacgaggagaggctgcagctcgcgaaattcgctgatcacgtcgacgacgacgacgacgacgactgaacatagttgatcatacgacattgttgcagcgcgttcttgcatgcatcctgtcactgtcaggtgaggatgcagctatagtagctctgatcaatcgatcagatagattcgttgattcgttcatggcgagcgcatgcatgtctctgatgagacgttgccaggtgacagaaatggcatctctctctgtacgggcaacccggagtggaaagatgagctgggatgtacggattctgttttctgttcagtttggttagcataggaggattctacagagaaaaaaaaaaaagggagaatttgaaccatgccacacaaattttacaaaatttgtgatatgccaccctgacccacatgttattgactcatgtgggtcttatatgtcattgagatacgggtggtatatctcaaatttataaatatagggtggcatggttccaacaaacccaaaaaaaaaaatgaagtgatactaaactctggatttgttttagaaaagatgctgaactttgggttct

SEQ ID NO: 21913 - DNA, 1925 bp, Oryza sativa
  ref <308>: DATABASE ACCESSION NUMBER: AK072134
  ref <309>: DATABASE ENTRY DATE: 2001-12-06
gcttagcttaatcggcctcgttcctcttgctgagcgactcagcttcctcaccgagcagattgcattttacaccggtcctactgtgggaggactactgaacgcgacatttgggaacgtgacggaggtgataatcgcgctgttggcgctgcgagaaggaaagattgaggtggtgaaatgctccctgctgggatccatcctctccaacctgctgcttgtcctcggcacctccctcttcctcgccggcatcgccaacctccgcgcccaccagccgtacgacaccaagcaagctcacgtcaacaccgccctcctcatgctcgccgtcctctgccactccctgccgctcatgctcaggtacgccgtcacctccggcgaccacgccatcgtctccggcgacgccgtcctcctcgccatcgccgccacttacctccacttcggacaggtgtgggtgtttgtgcttagcttaatcggcctcgttcctcttgctgagcgactcagcttcctcaccgagcagattgcattttacaccggtcctactgtgggaggactactgaacgcgacatttgggaacgtgacggaggtgataatcgcgctgttggcgctgcgagaaggaaagattgaggtggtgaaatgctccctgctgggatccatcctctccaacctgctgcttgtcctcggcacctccctcttcctcgccggcatcgccaacctccgcgcccaccagccgtacgacaccaagcaagctcacgtcaacaccgccctcctcatgctcgccgtcctctgccactccctgcagcatcctcatgctcatcgcctacctggcctacctcttcttccaactcaacacgcatcgccagctgtttgagccccaacaggttgaggatgatgacgacgatgatttagtgatcgctcaagatgatgagccagtactgggattctcgagtgccatgatttggctggctctcatgactctcctgactgcgctcttgtcagggtatgttgtgagcacaattgaggcggcctcagaatcatgggaactatcagtgagcttcattagcatcatcttgcttcccatcgttgggaacgcagcagagcatgccggtgccgtcatatttgctctcaagaacaagatggatattactctcggagtgtctttgggctctgccacacagatctccatgtttgtggttccagtgagtgtgattgtagcctggactatgggaatcccaatggatcttgatttcaacctgctggagactggctctctgtttctagcaatattagtgacagccttcaccctccaggagggagaatcacattatctgaagggattgattcttgtcctgtgctacgctgtcatcagcgtgtgctttttcgttataagacggcgttctgcaggagggacggacggtgttcaccatctggatgtgattgtgtagcaaattactaacaggcagaccgcagaagcagaaacgtacgtacatgcgcctaacatatatatggagtccgtacagtacgtgctagctacggagtactcctgtacactactgtactactgcttgcacaagagaagaggatcgagtaccgtagctagcacaggcggcggagacgagacgatctgcttgcttgaggaggcagccgatcgaagccggactgggcggagatcgatgcatggatccagtttgtttagactgacggacgatagaggatgataccacgacccaaccatccgtccctgcaattggctggtttggtcattcaaatagggaatcacaattgggttttaatgggttgctttagtttaggtcgttttggaatggtttgtttatatttatctttttcaaaggagtttgtttaggtttatcgaactactagaatatacatccatcttaagattattacattttaaaataaagatatatagtatg

SEQ ID NO: 21914 - DNA, 2693 bp, Oryza sativa
  ref <308>: DATABASE ACCESSION NUMBER: AK072135
  ref <309>: DATABASE ENTRY DATE: 2001-12-06
gttacttgtattggtaagagactaagagagtgagcttgccggagatgtcgcggtttgtcgacaagctgccgctgttcgaccggaggccgtcgccgatggaggaggccgagggcctcccgcgcagtggctatcttgggcagctgcaccaccaccagtactaccagccgcacagcaacatgctgccgctggagcagtcgccgccgacgagcacgaagcacacgtcggtcacgctcgcgcagctcctgaagcgcgtgaacgacgcgcgcagcgggtcgtcgacgcccatctcgtcgccgcgctacaccatcgagctgggcgggtccaagccggagtccgtcagcagcgagagcgacgaccaccactccgacgacggcggcagcgaggggcagccgagggcgctcgtgctcaagttcaccgacctgacgtacagcgtgaagcagcggaggaaggggtcgtgcctgccgttccgtcgtgcggcggcggacgagcccgagctgcccgcgatgaggacgctgctcgacggcatctccggcgaggcccgggacggcgagatcatggcggtgctcggcgcgagcgggtccggcaagagcacgctcatcgacgcgctcgccaaccgcatcgccaaggagagcctccacggctccgtcacgatcaacggcgagtccatcgacagcaacctgctcaaggtcatctcagcgtacgtccggcaggaggaccttctgtacccgatgctcaccgtcgaggagacgctcatgttcgccgccgagttccgcctgccgcgctccctccccaccagggagaagaagaagcgggtgaaggagctaatcgaccagctcggcctgaagagagcggcgaacacgatcatcggcgacgagggccaccgcggcgtgtcgggaggcgagcgccggcgcgtctccatcggtgtcgacatcatccacaacccgatcatgctgttcctcgacgagcccacctccgggctggactccaccagcgcgttcatggtggtgacggtcctcaaggccatcgcgcagagcggcagcgtcgtcgtcatgtccatccaccagccgagctaccggatcctcggcctcctcgaccgcctcctgttcctctcccgcgggaagacggtgtactacggcccgccgagcgagctgccgccgttcttcctcgacttcggcaagcccatcccggacaacgagaacccgacggagttcgcgctggacctcatcaaggagatggagaccgagacggaggggaccaagcgtctcgccgagcacaacgcggcgtggcagctgaagcaccacggggaaggccgcgggtacggcggcaagccggggatgtccctcaaggaggccatcagcgccagcatctcgcgcgggaagctcgtgtccggcgcgaccgacggcaccgtgtcggtcgccgcctccgaccattctgcgccgccgccgtcgtcgtcgtccgtgtccaagttcgtcaacccgttctggatcgagatgggggtgctgacgcgtcgcgcgttcatcaacacgaagcgcacgccggaggtgttcatcacccgcctcgcggcggtgctggtcaccgggttcatcctcgccaccatcttctggcgcctggacgagtcgcccaagggcgtgcaggagcggctgggcttcttcgccatcgccatgtccaccatgtactacacctgctccgacgcgctcccggtgttcctcagcgagcgctacatcttcctcagggagacggcgtacaacgcgtaccgccgctcatcctacgtgctctcccacaccatcgtcggcttcccgtcgctcgtggttctctccttcgcgttcgcgctcaccaccttcttctccgtggggctcgcggtggcgtgaacgggttcttctacttcgtggcaatcgtgctggcctccttctgggcggggagcggcttcgccacgttcctctccggcgtggtgacgcacgtgatgctggggttccccgtggtgctctccacgctcgcctacttcctcctcttcagcggcttcttcatcaaccgcgacaggatcccgcgctactggctgtggttccactacatctcgctcgtcaagtacccgtacgaggcggtgatgcagaacgagttcggcgacccgacgaggtgcttcgtccgcggcgtgcagatgttcgacaacacgccgctggcggcgctgccggcggcggtcaaggtgcgggtgctgcagtccatgtcggcgtcgctcggcgttaacatcggcacggggacgtgcatcaccacgggaccggacttcctgaagcagcaggcgatcaccgacttcggcaagtgggagtgcctctggatcaccgtcgcgtggggattcctcttccgcatcctcttgtacatctcgctgctgctcggcagcaggaacaagcggaggtagacgacgacgacgaccaccttgctgatcgatcagtagctcgtacgtgatagcgatcgtcacctcgtctcaccgcagcggcggcgtggaccggccggcttcgttggagcaagcgacgcgtgggacaccattggttgcatggtttcccttgttttttttttcacttgttaagcatttcgatgttttttgattaaccgcctgtgattaccatgggacgggagttgtttgtaaaatttgtgtgcaagttgcaagtcgaaattgtatctggatgatatgacatttttttttc

SEQ ID NO: 21915 - DNA, 3320 bp, Oryza sativa
  ref <308>: DATABASE ACCESSION NUMBER: AK072136
  ref <309>: DATABASE ENTRY DATE: 2001-12-06
ggttttgtttccggtgagagaaatcaagagatgggtggccacgtcatcgtgtggatattgctctcggtgtgctcatggcggatttcagctgctcaggctcagcaaccaccaagaaccgatcctgtagaagtggcggcgctggaggcgatcctggggagatggaacaagaccaattcgccggtgtggagcatgagcggcgagccatgccgcggcgtccccgtcgacggcgtcaccggcctcgacggcaaccccaagaacaaccccggcatcaagtgcgactgctcctacatcaacggcaccgtctgccatatcacccagctgaaggtatacgccttgaacgttgtcggtcagatacctgcagaattacagaacctcacctacctaaattacctggacctggatcaaaattacttgtcaggccccataccatcattcatagggcaattgactgccttgacagaattgcatgtgggattcaatgcactctcaggaccaattccgaaggaacttgggaatctcacgaacctcaacttgctaggcatcagtttgaccaattttactggtcaacttcctgaagaattgggcaacctgaccaaacttcaacgattgtacactgatagtgctggcttgagtggtccattcccttcaacgttctcaaagcttaagaacctgaagctcctgcgggcatcagataacgattttacaggaaaaatacctgattatattgggagcttgactaatttggaagatctggctttccaaggaaattcttttgaaggaccgattccggaaagtttgtctaatctaaccaaattgacaacctttgtattgaggaactgcaggatatctggagaccttggagcagtagacttttcaaagttcacaaaattagccttcctggacttgagttttaacaatatctcgggcaaagttcctcaatcaattctgaatctacaaatgcttacagacctgtttcttgggaacaatagcctaaccggaggactgccagatgggataagcccttcactaaaaaacttgtgtgtaaacaattcaacattgcagtacagctaaaattagaatgatgcatttatttcatatttgcagagatttttcatacaaccagctcactggaagctttccctcctgggctacccagaacaacttgcaattgaatttggtggcaaacaactttgatcttggcagcaccaacaacggtcaattatgtccacagtattctacctccagggctaaactgcctccagaaagacactccatgtttacgaggttctccagaatattattcctttgcggtagactgtggtagtaacagatctatcagaggctcagataatactatgtatgaattggatttcacagaccttggcagctcatcatattacgttaccagtgaaacaagatggggtgttagcaatgtaggaaaatatttccagtctccaaatgacagtaagatcatatatagcaatgagaagattcagaatgcagtggtttcagaactactccaaactgcaaggatgtcaccatcgtctctgagatactttggccttggacttgagaatggaaattacactgttctgcttcaatttgcagagttaggttatccagactcaccaacttggaaaagcttaggaaggagagtttttgacatatatatccagggtgacctaaaagaaaaggacttcgatataaggaagatggctggtggaaaatctttcactgctgtttacaagagttacacggcaactgtgtcgaaaaacttcctcgaaatccatctgttctgggctggaaagggcacttgttgcattcctattcaaggttactacgggccattgatctcagcattaagcatcactccaaattttactcctactgtgcgaaacggtgtacccaaaaggaaaagtaaagtaggtgcaattgctggaatatcgattggtgcctcagttgtaggattagcagccctatttggaatatttatgttcataaagaagagaagaagacttgcacaacagcaaggagaactgtacaacctagttggacggcctgatgtcttcagtaatgctgaactcaagttagctacaaataattacagttcccaaaacattcttggggaaggtggatatggaccagtctataagggtatgctacctgatggaagagttatagctgtaaaacaactttctcaatcatcccatcaggggaaaaaccagtttgtgacagaggttgcaacaatttcttctgtgcaacaccggaatcttgtcaaattgcatggttgttgcattgacagtaatacacctttgttagtttatgagtaccttgaaaatggaagcctagatcaagcactcttcaggaagaatagcttaaaactggactgggcaactcgcttcgagatcattttaggaatcgcaagaggactaacttatcttcatgaggagtcaagtgtgcgcattgtgcatagggacatcaaggccagcaatgtcctacttgacaccgacctcaccccaaagatatcagactttggactcgctaggctctatgatgagaagaagactcatgtcagcacggggattgcgggcacatttggttatctggctcctgagtatgcaatgagacgtcatttgactgaaaaggttgatgtttatgcattcggggtggtcgcattagagactgtcgctggtcgatcgaacactaataactccatcgaggaaagcaagatctatcttttagagtgggcctgggacctgtacgaaaaggagcaagcacaaagaatcgttgatccaagacttgaggatttcaataaagatgaagttctcagagtcattcatgttgcgctcctctgcacacagggctcaccaaatcagcgaccgccaatgtcgagggtcatggcagtgctcactggagatgctgaggtagttgagatggtgacgaaaccgagctacatcactgagtggcaatatagagatggaaacagcaccaactcagaatctaccacctcagagttcagcaggcagaaggagatcgaccctctcaccatgtcgccaacaatcaccggatctagtcatgatggaaggtgaatgctgcaacctgcaggtgatcttggtttgaaatgattgtatgtaaatgtaagacggagctaatagtggaacttaattattctgaagtatgtatgatgataaaagtatttactccttgtaatttgtaacaggtcaaatagagtagtatcctagtatatatcttagaaattaatcaacgtattcgcatgtttatgagcacattctgcagcaaaatagtaaaaactgtccacg

SEQ ID NO: 21916 - DNA, 3167 bp, Oryza sativa
  ref <308>: DATABASE ACCESSION NUMBER: AK072137
  ref <309>: DATABASE ENTRY DATE: 2001-12-06
ggctctctgtgtcagatatccacacgtgccccgtacgccgccatcgccatggctctccccctcgtccgcctccccccgctccccgccgcgcgccacccaccgctgctccgcctccccaagcactccgttccgcctcacggcggccgcgtctccttcgcctgttcgtccggtagccgcgccgccttcgctgcctgctgtgctagcgcctcggtggccccggcggcggaggcggaggcggtggtggaagagcccgaggggccgaggacgcggctcatcgcgcagaacatcccctgggactgcacggcggacgacatgcgcgcgctcttcgggaagcacggctctgtcgtcgatgtcgagctctcgatgtacaattcgaccagaaacagaggattggcgtttgtaaccatgggttcagaagaggaggctctttcagcactcaaccatctaaattcgactactctaaatgatagaacaattaaggtagactttactagatcgagaaagaagcagtatgttgtgccatcagctcccatgccgaagcacagcgtttttgtgggtaatctgacgtggagagtgagatctcgccatcttcgtgaattatttgcatcaaccccaggtgttcaatcagttgaagttgtcttccataccacaagtccgaggcgatctgctggttatggatttgtttccttttcctcaaaagaggcagcagaggctgccatatctaccttcaatggcacgaaattgatgggaagatccattaacgtgatgttcaaagatgacaatgccaaaaagaataaatctgctgcaccaacggaagaggatctgaaggcagaatcatctgagcagattgttagctaagcatcaattgtcatgggaacacaccgagaacttaaatgattgaggattgcttaactgacattttcccagtctcccagctgctggtcagttttgctcattcaacgcctcgtgagttctatattacagcgttgtttatgctgtccacttgatatggatgacatatgacatttggaggtcagctttatgccatgagcacaaaatatatgtaagcttttcttgacacccaggttaattaattgtagatagagataagtctcaaggatctcagccgtaacccgatggatttagcgataatttgtttattgtgaaatatttggctgaaatgtataaatcaccgggataactttaaaggctaaaagctactactggtattgttttcagtctgtacttgtcttcgtttttatgtgaccggaagattgtagaggccgggtttaatctaatccattatctaaaataaatgtgaccggaagaactgtgacaactgtcaaattaatatatagccttcacatcagttccaaattgcacgcttggtgtgctatccttaaaggttgccgtgcagtacagacccaaggttcttcagtaaccaaacgggctagtacatctgcgtcacgagcggtccgacgaaacatctgtgagcaatactgaactgtgctgaatcaattattgtccagtcttccgtccccatctgtctattcttagctcagaaagtatcctctttaataatctgataatcttgtagtactaagcttgttgattgtgaatgtgctgcagatatttaggtccattctttttttagtggatttatgttggttctaaagatacgctgaacctccctcttaacctggacctagtcctaagagcaaagttaatagtatagccaactactagctacaattcatctataactaatctaatagttaattcatacaatagttgcttactatactattagtatatagtcccactgtcatatacacattatgtcttggagtccgtgctgcagcgggctacagaagctgttcttctctctcatcttttatcttattaaaatatgtttgtagctggctaatagtatgctattgtacctgctctaagagcacccgcaatggtaaagtaaggtgctctctataaaacatgtatatctcagtaatagattagattaatagtaaaccacctcaatagtatttctacatgggtatctatagctctctcatccattgtcttgtttttctctatagactctccaggttagtagatagctttactctctctctccatttaatctcttacaagtaggaaaatacgattatcttttatagagagcatatagataaccattgcgggtgctctaataacactagctaagcgcaaactccgagttatccatttcgcagcatttaccttgacggagtggacctgaaacgctaaacgcatgagcaaacgtgtacggaactcctttggtcaatcgttggattatccatctgaaactccttttgttttcgccgggatacccgtatgaaactcctgcatccgtcgccttcattcgcaccggtgataccgtactcatttggccggcagaccaaacatagtggattagtggacacttatgtgttgagaataccgtgccggtcctttgcgaaagcacatgtaacgcctaggaaagcaaggagcagaagcaatctgcttgtcttgtgtgcgacaacgaggccagtgcgttgtcctcgcaccaagcgaccgcctcgccgccgattgttccgtgcgacgccacaccgaaaccgaaccgggacaacctatttaatctttcaacaaatttaaaccttcaaatcttgaaaagttttcaaccaatggatgcaattcattttaaataaaataattaaaaagcatatcaaaaataataaatctagatataaaaagagttgtataatctaattccactatacttacgtagataaaacactgttttacgtaaaacgatatggcattaatgtataattaatagagttttaattatcataaccttaaaaatttatttatagcaactttcatataaaaagttttttaatgaaatataccgtttagcagtttgaaaaacacgtgattatctaaatttttatccaatttttattacataaaaaagacctaaatttacaagaatattctctctctccgtcccataatataagttattttggagagatatttattttggagagatatgacacaatctaatactaccaatctagagtaccagattattatgatacattcctttaaaattaattatattttgatataaaatcctacgaacg

SEQ ID NO: 21917 - DNA, 3942 bp, Oryza sativa
  ref <308>: DATABASE ACCESSION NUMBER: AK072138
  ref <309>: DATABASE ENTRY DATE: 2001-12-06
gagctaaagcttttgaagggaagatttcaggccacacaacttgagcagaggaaggatggaagcggcggcggctgcctccaccggcgaacttttgacaggcaaaagttcagcgcctctaccccacaagaggcgatcgcgagacactacgctctgctgctgcgcgcatcgccagcagaaaatcgcagcatttgcaggctctcgcatcattttcagtcgccacgtgatccaggtggtggtcgtctgcgcggctcggcggaggagggcggacatccagtcggagacgtacgtgctgatggagccaggggaggaggaggagttcgtgagcaaggaggagctggagggcaggctgagggggtggctggagcggtggcccggcggcgagctgccgccggacctcgcgaggttcgacaccgtcgacgacgccgtgtcgtacctcgtccggtccgtctgcgagctggagatcgacggcgaggtcggctccgtgcagtggtaccaggttcagctggagtagagtggttcttgtgtggaatggaatgaacgcgcgatcgacgtggagtgatagtttatacacgtacgtagtaatcttcaacgcgacaccatttatctttttcagatttagaattctacggaaccgatactctactctgaaaagtaagaattttacagagactaaaattcaacccgtgcgaaattcctgtagaattcattcgtccagaaaaaaaaaggggcacattgtgtcattgtccctcgtagcgtaaatgatgtccctcgtcgttctctcgtgtcacaattcttttctgtttacttcatataatctgctctacgtttctagaaatatgttttcttatactccctctattactatataattatcaccatcgattaaaaattgttgtaattttgacctttagtaatttttaaatgtttagattataacgaacgaaacttaaatacttatgtttaatatgtacccgatacacttcaataagggagcatctatttatcagtttagaaagtattttaaaaagataaatagtcaaaatttcaataatacttcgataagtttcttggagcactttcaacttgctctgagttagggtgtgtttagttcatattaaaattagaagtttgattgaaaatggaatgatgtgacggaaaaactgaaagtttatgtgtatgaaagtttcgatgtgatgaaaaatttgaaagtttgaagaaaaagttgggaactaaaccaggtcttagtactaatttgctaaatttattttttatatttaatttattttataaacgataaataatctaggataatcatccgtttgaaaagctagtttggtttatacacctgcagtctacagaaagtctagccatgctaaaagcagtcacggtcagccgtcagcgcaagccaagtgctgtaccctgtacgaaagcacgctctcctctctcccgtctcaccattccacaggtcgccgcaacccgcaacaaacgagctgcagtgcagtgcaactgtggaaggctgcaactgcaagaaaaaaggggaaaaaaaaaagaaagaaagaacggaagagaaggccgccggccgtcagaacaggaacgggaacggaacggtcagcggccctttcaacgggagaccccggcagcacggcatccgttcccgttcccttttattcagtcccgtcctttccattgaccgtccacatcctcccccctcctccacccgctgccacaccatccgtcgccgtcgccgtcgccccgctcgccatcgggttgacttgactcctcctcctcctcgtcctctctctgtagttgtacatacacctccccgccctccgcctcaccactccatttccgtcttcttcctcctctctatctctctcctcttggatttgtcaggttctttaccacggcggtttgatcggatccccaatcctgggttccggtggctctcgagcacagcggcggtcgggaccggcgaagaagcggcttttcgctgcggagggagtgcgggaagaaaatcacctccactgattttatagaagacgttgaatatatagtctacaaaatgatggctgctgagttaattaagcagttttcaaacatcaccctgggagaagaacaggagttatgtgatattgagcatgcactcaaggcactgcggaagaagattcttactttggattttgaaaattccatgcgtgttcatgatccgcaaaactcatttcagtacttggaagtgctgtacaaaattcggcagctgactgaaaggttagggagcttacaccctggtggggaagccaaagagcataatgagctcatagtatatgctggcgacctttttgatatggcaatggcaaggcttgaagaggaatttgtttatcttcttacgcattacaaacaaccaatagaacaaggacttgtttctttccggtctacagaggatggcagtgtggatgatttttcaagcagctcattcaatgaggaacaatgtgacggtaagacaacacagactgaaactactggaggatcagaatattttgcgactgatttgattcaacatggtgcactctctgctgtcaagtccattgccaacttcatgtttctgagtgaatatgataaggagtgttcccaggcttacataagcacacgacagagtgcagtagatgagaaccttgggtctcttcgtattgacaagctcagcatggaagaacttttgagcaccaactggaccaagttaagttcattgataaagaggtggaatcgtgcaatgaaggtctttgtccaagtctaccttacaagtgagaagcgccttagcaatcatgtctttggtgaactttcagaatcaaccgcagacttgtgtttttatgagatttcattgagctcagtcatgcaacttctgaccttttatgaatctgtagcaattggacctcctaaaccagaaaagcttttccgtctgcttgatatgtatgaggtcttaaatgatttactccctgaagtagaattcttgtttcaagaaggatgtgatgatatagttttgactgaatataatgaagtcctgctacagctgggagaatcagtaagaaaaacaattacagaattcaagtatgctgtccagtcctacacttcatccaatgcaatggcccgtggtgaagtgcatccccttacaaagtatgttatgaactatataaaagctctcacagcttatagcaaaactcttgattcgcttctaaaggacacagatcgaagatgccagcatttctccactgacattcagtctatggcaaaccaatgtcctcattttactgtcagtgcattgcatttgcagtcagttactgcaattctagaagaaaatcttgaagctgggtccagattatatagagatgatcgattacgaaacatctttatgatgaacaacatctactacatggtccagaaagtgaaaaactcagagcttaaaatctttcttggtgatgactggatccgggtgcacaatcggaagtttcagcagcaagcgatgagctacgagagggcatcgtggagtcatgttctctcttttctgagtgatgatggcttgtgtgctgctggggatggtgcttctcgtaaaatcattaaagagaaattcaaaaatttcaatctgtcatttgaagatgcttatcgaactcaaacaggatggtctatcccagatgaccaactccgtgaagatgtcaggatttcgatatccctgaaaattatacaggcctatcgtactttcacgggacgatactatagccgccttgatggcactaggcacctagagcgatacataaagtataagcctgaggatttggagaaacttttgctcgatctttttgaaggagctcaaaaaacattgtagcttgcagagtgtagaacttaaaacacagttattcttgatgaaatgtgcagttgtaatatttggtttgtatt

SEQ ID NO: 21918 - DNA, 2798 bp, Oryza sativa
  ref <308>: DATABASE ACCESSION NUMBER: AK072139
  ref <309>: DATABASE ENTRY DATE: 2001-12-06
gatcccttataggcgccgcctcactccaccggcggccgccgccgcgaccctagagggggcgcctcgcttctgcttaccgaggtaaaggactgagctgccgtacacttgcaaccaatgtcgatttgatctgaaattggcacacggcttagctcatccttagttcttgttgggtttgtttccgttccgaaaaacgatgataaaaatcggtttcttgttgttgtttagggtgccaataaaaaccgaagggtttagtttccaactagatccgtggatctagtgtctcataatctcccaattttccctatattgtttctttttttttgagggggataagaagaagaagaagtaggaggcacactctcgttcatccccaccgattttgatattctagctccagtttctcacagcaaaatgctgatttggccacaggatcgttagggtggatgaaaggtagcccggattcttcatcgacgggagaggagcagaggattgctgcttggctgctactcgtttcctgcgtcctcctatggctatggccattcctgctgctgctgctgctgctctgtgggtgttgccatgccacagatagttgcgtcgctagattccttttgccctctaagttatcttccttaatactgtatggaacaggccgtttccatgcgacagaccggagaggtgatatgccgcctgcacatgtggaaccgggatggactgtcaacagctgccaacagtcactacgaatgcatcaaccgaccccccctttcgatccggacaaatctaacccacttctgctcctgcccatgcgactcatcagaaaggagcagtcctgacaattatgcatctagtgtagcaagtgactcaaatggtggtggcattggagcaaggaacgggcatccgcttcgttattcttcaaatgtccatcttctcgacgagaatgtcaacctcatctcaactgagtctgtggcacagcttgataccgctatgggccgttgcggagagatcataggtgatcacagagaagaactgctcatggtcttcactaacaattcagatatgttgagcagtctcttctatgaatatgatacaccatggattcttggtaaaaacacaaagacatccatggatttttcgaagtgtgaagatcttggaaaagattatcttattatgctgaaaattagcaccaaagttctccagtcgatgttctgtcagttttgtggacaaaatcaaccatttttccaaacaaaaaaagactactttcaacagtttgcaaagtcacctattaagaagatgttggagattgcactttctttcagtgagtcaaactggtctgaggagcatatccgtccaatgctacttgcctatgatacactacaagatgtccttcctaccataagggagttgtctcctgatgaacctgacgagttttttaccagcatcttacataacatgaggaatgcttccaggggaataattgacaatatgaagcgattcatacaacataaggtgcaaacctgggacaacattgctattcatccaacgacatgtttcctcataaatgcaataaagattttcaacgttcacaagaatttattgcattccactctggtccctggtgatggccaagactcatttggttatcttattaatggcgtcattgcttgctggaaattaaagatcaaagagctttccatgttagatgatccagacaaaaatgattcaggcggaaacaatccaaacttgttcatattcttattgaataacataaagcattttaatagggatacaaatggtctgctggatgggttattggtccatagggagctcgttgaagagtgcaagaatgagttccagagtgacatggaaaattatactagtagatatatgactgcatcttggggtccagccatatcttgtttgaacaatcatacaggcggaagcatacgtcaatctatgaatgcattcatttcaaagtttgaaggtacttttgattgccagaaggttttgaaagttcctgatagtgagctaaagcagaaattgcgagatgatatagaaaatttaatttttccagcatatgaaatatcctttgaggaactgcagagaaattccaattcaggattattttgctcatgttttccgaaatttaacatgcagcatgtataccccagagatattacgacgttctgtgcaaggcttgtttgaaggatgaactctatttctcctccctctctatatatagttccaacaaatgtacctatctttgttcaattgaccagatttaattggcagggaaactatcgagattaaggtttgctattaaactatcgagatttcgctgtaaccaaaataaagccatggaaagtttggatgcagcaggacaggacagcacctagattctatgggtgataagtgctccagagatgggagatgagtggcagaacagaagcaaaggtccaaggtgtgagaaagtcaactggggcaatgaagacagcaaaaattacggttggttggcaaagaccgcatgccatcgctgatgccattcaactatggcaagttcgcctaccatggtgatctggtgtgccactcaaacttcagaagagagcagtttgttatatactatgtcctgccattttaattttcaagttagggaaaaggtgacctttctttcttttcttttcttttctttttctttttacaaggaagggataaggtgacctctgttatccttgttgacaggttttctagttttgagatactagtgctaaagatgcatatataatttgaaattgtttcagaatcag

SEQ ID NO: 21919 - DNA, 3637 bp, Oryza sativa
  ref <308>: DATABASE ACCESSION NUMBER: AK072140
  ref <309>: DATABASE ENTRY DATE: 2001-12-06
gatttgtggctgttgggtttggagcttcaggcgcaatggcccccaagggcgccggccgtggcaagggcaggggcggcggcggcggcggcaaaggcgacaagaggaagaaggaagagaaagttgtgccgagtgccatagacgtcacggttgtcactccctatgaatcccaggttacactcaaggggatatctacggaccgtgttctggacgtgaggaagctgctgggctcgaatgtggagacgtgccacctgacaaactactcgctctcgcacgtgacgcgagggcagcggctggaggacggcgtggaaatcgtgtcgctgaaaccatgctctctcaccatcgtggaagaggagtacgcgacggaggcggcggcggcggcgcaagtccggcggctgctggacatcgtcgcctgcaccaccgcgttcgtgaacaagccccgcgacggcgccaagcacaagtcgtccaagcacgcgcgcccggcgacgccgccgtcaccgcccgcgctcgccgcctcccccgacgcccatggcgccggcgccgcccaggcgcgccggatatcggaggcgcacgacatggcggccatccgtccgccgcccaggctgggcgagttctacgacttcctctccttcgcccacctcaccccgcccgtccactttatcaggaggaaggagagcaatggcgcttctcaggaaggcgactacttcgaaatcgaggtgaaagtttgcaatgggaagctcctgcacatcgttgcttccgtcaagggcttctattcggcagggaagccgcacaccgtgagccactccttggtggatctgttgcaacagctcagcagtgcatttgccaatgcatatgatgcactgatgaaagcttttctggatcacaacaagtttgggaatctaccatacggatttcgtgcaaacacatggcttattcctcctatatacttggattctgctacaaagtgcccagcattaccagttgaggatgagaattggggtggaaacgggggtggcaatgggcgagatggaaagtatgacagaagacgatgggcaaaagaattttctactttggctagaatgccatgcaaaactgaggaagggagggtgatcagagaccggaaggcttttcttttacacaatctctttgtagatacagcaatttttagagctgcatcaacaatacagagactcattgatctgtctgggaactcaactagtcaacaagctggcctagatggttctttagcaatcgaggaacgtgttggtgacttgcttataactgtaaagagggatcaggctgatgctagtttaaagctggaggataaagttgatggagttgcactctatcaaaccggttctatggatatatcacaaagaaatcttctaaaaggtttaacttctgatgaaagtgtcgttgttaaggacacctcaatactcggagtggttattgttaaacattgtggatatacagcaacagtgaaggtttcagggcgcacaaaggacggaaatggtggcaaacaaaccagtgatatctgtgatcatctcgatggaatttcgaatgttgatgtagatgatttgccagatggaggttctaatgccttgaacattaacagtctaagaatatcactgccaaaaattgtcaactcagacatcgctagtactcagtgtcctactccgcagtctcatgttgataatcatgcaaggaaactagtgcgcaaaatacttgaagatagcttgatgaagctggagaacatgcctgccaataatcctagaaccatcagatgggaacttgggtcatcctggctgcaaaacttgcagaaaaaggattcgccggcatctgaggacaagaaaaatgcaggacatgttgaaaaagagacaactatcaaaggtcttggtaagcactttgaacagctaaagaaaattaaaaagaaagaatgccatgttgaaggtgctatgtctgagaaggaagactctgacagtaactgctctgtcataaatggcatggaagaatctgaaaacaccaaggagactgatattagcaagctgatgtcagaggatgatttctgtcgccttaaggatctgggagctggacttcatcaaaagtcccttgaagagctcactatgatggcccataaattctatgatgatactgcgcttccaaagctggtggctgattttgcttcccttgaactttctcctgtggatggaagaaccatgaccgatttcatgcacacaaggggtcttaatatgtgctccttaggccgtgtggtagagctcgcggagaagcttccacatatccagtcaatttgcatccatgaaatggtcattaggtcctttaagcacattgttcgagctgttattgcagctgttgatgacatgcaaaatatgtctgcagctattgctgagactttaaacattttacttggatgcccaagacttgaaagtggcactgaaacagatgcacatagtgaacataatttgagatttagatgggtagagaggttcctttctaaaaggtacaattggaaattgaaagatgaatttgcacacttgcggaaatttatcattctgagaggtctttgcagtaaggttggacttgagttggttgcgagagattatgatatgaatagcccaaatccatttgacaaatctgacatagttaacattattcctgtatgcaagcatgtggtgtactcttctattgatggtcgaaacttattagaatcatcaaagatggctttggataaaggaaaacttgatgatgccgtcaacttcggaacaaaggcgttgtccaaaattgtagcagtttgtggtccataccatcggctgactgctaatgcgtacagtcttcttgctgtagttctttaccatactggagattttaatcaggcaactatatatcagcagaaggcacttgatatcaatgaaagagagctaggtcttgaccacccagaaactatgaagagttacggggatttatctgtcttctactaccgtctccagcacatcgaaatggctctaaagtatgtcaaccgtgcactatatctactccaattttcttgtgggctttcacatccaaattcagctgccacatacataaatgtggctatgatggaagaaggtatgggaaatgttcatgtcgctctcaggtacttgcatgaagcactgaagtgcaacaagagactgctaggagctgatcacattcagactgctgcgagctatcatgccatagccatagccctctcaatgatggatgcatactccttgagtgttcagcatgaacagaccaccttacagatacttcaggagaaactaggacaagatgaccttcgaactcaggatgctgctgcatggcttgagtattttgagtcaaaagcattagaacaacaagaggccgcccgaaggggcatcccaaaacctgactcatctattgcaagcaaaggacatcttagtgtatcagatctacttgactacataagcccggatcaggaaagaaaagagagggatacacaaagaaagggcaggcgtgcaaagaataatatcagaacccatcaaggtgaattagttgaagaaaaggagagctttgagcacgacataggatctcctcatgaagcaaacaaagaggagtttcaacaagt

SEQ ID NO: 21920 - DNA, 2917 bp, Oryza sativa
  ref <308>: DATABASE ACCESSION NUMBER: AK072141
  ref <309>: DATABASE ENTRY DATE: 2001-12-06
tttttctttttttttttttttagtgagtaaagttaagcagtttgaaaatgctgccggataatctctggtacacccaattcatttatgagtgctcatctgcgaatgacctgaccaaagcaaagccttttcattttgtcttctgacagtaaatacagcacgtgacaagataacaaaatcatcaaacttttaaacgaaaccttgcaaaaacaatgacaattgacaaagtgagaagcaaaggctcaacgtgcctaggcagcggtttgcaatcaccgtcttcccctgcccttgctcatgaagtggtggcgcttcaacctcttcttccggatcaccacggaggacttgatgtgctccgcgaacggcatgccaaggagggtgagcagcctgagagcctcgttgtcggtcttcgcggtggtgacgatgcagacgtccattccattcttcttcccaccgacctcgtacgggatctccgggaacacgccctgatcacgaaggcctatggtgaagttgccatggccatcaaagctgttggggttgacaccaaggaagtccatggtcctaggaagcccaaggttgatgagcctatccaggaagttgaacattaccctgccgcggagcgtaacggcaataccaatggtgttcccctcgcggatcttgaaactggcgacggacttcttggccttcgtcttgacgggccactggccggtgatcatggcgaggtccttcatggcggattcgagccccttggagttaccggcttcagcccccaacccgcaattcactacaatcttctcaaccttgggcacctggtggacattggtgtagccgaactcctcggtgatgagggggaccaccttctggtcgtatacagccttgaggcggtgcaccttctgtgcctcggtggggtcgacgaggacgatgcccgaaggcgaggtcggcggcggcgccggcttgggtggcgcgtcggccgcggcggaggcggcgacgcggagggctcggcgaggaggcggggagcggaggaggaggcggacgttacgggaggaggaggcggtggtggtgacggggaagggggccggcgaggacggcagggtcacagccgtggccgccattggagcgtgcgcggagcataggctgctcaggaagggcggcgccgctgccgccggcggcgggctcaccgtcgagggcttccaccgctggctgtgcagcgacgccaacgctgcactggatcctcagaaacgggtatatcaagacatgggattgcctctgtcacactacttcatctacacggggcacaactcatacctgacggggaaccagctgagcagcgggtgcagcgaggtgcccatcgtgaaggccctccacgacggcgtccgtgtcatcgagctcgacctctggcccaacgctgccaaggacgccgtcgaggtcctccacggcaggacgctgacatcgccagtgggtctgatgaaatgccttgaggccatcagggagtacgcgttcgtcgcctccccttaccccgtcatcctcaccctcgaagatcacctcactcccgacctccaatccaaagtcgccaagatgatcaaggagacgttcggtgacatgctctacgtctctgaaactgagaacatggcggaattcccttcgccggacgagctcaaggggaagatcatcgtgtcgacgaagccgcccaaggagtacctccagaccaagaacgacgccgacgccgacgaggccggcgtctggggcgaggagatcaccgacgacaaggtggcggcgacggcgatgacgacagaagagaaatgcgcggcggcggaggaagcagtcgccgccgccgccgtcgacgaggagatgcaggaggccgagacggacaagaagacgcagcacggggtggacaacgagtacaggcgcctcatcgccatccctctgacaagaagaaagcacgacatggatcaggacctcaaggtcgatcccgacatggtgacgcgcctcagcctcggggagaaggcctacgagaaggccattgtcacccatggagctcacattatcaggtttacgcagaggaaattgctgaggatattccctcggtcgacgcgcattacgtcttcggattataatcctttgatgggttggaggtatggagttcagatggttgcagcaaacatgcagggccatggaagaaagctgtggctgactcaggggatgttccgagcaaacggcggttgcggttacgtcaaaaagcctgatattctgatgaacaacgatccagataaactgtttgatcctacatccaaactaccagtaaagacaagactaaaggtgacggtgtacatgggagacggatggcgattcgacttccgcaagacacatttcgacaaatgctcacccccagacttctatgcaagggtgggtatagccggagtagaagcagacacgaggatggagcagacgaaggtgaagatggacacgtggattccggcatgggatcacgagttcgagttcccgttgagcgtgccggagctggcgctgctccgggtggaggtgcacgagtccgacaaccaccagaaggacgacttcggcgggcagacctgcctgccggtgtgggagctccggcgaggcatccgctccgtcaggctctgcgaccaccgcggcgagcccctccgctccgtcaagctcctcatgcgcttcgacttcacctgactactccatcttcttcttcatcatcgtcatcgtcttagtagtagtagttccatgtatgatatcatgagggatgaagcattgatcgtactttctccgtcccgaaatatagcaatgtaggattagatggaaacatcttaatactacgaatctggatatgtcctatctggttctggtttgctatgttttaggacgaatatagtacataaaattttagaagttttgtttt

SEQ ID NO: 21921 - DNA, 2640 bp, Oryza sativa
  ref <308>: DATABASE ACCESSION NUMBER: AK072142
  ref <309>: DATABASE ENTRY DATE: 2001-12-06
gttaaagtctccaccctccgcccgggaaatcctttttaatatatttcgagaatttttttggttctcgggctcgccgcggacgcgatcccactcctcctctcctcgccggcctggcctcccgctgctcccggcgattctcccggaaacttttttttttcgctcgacgcggtgaagtgaagtgaattgccggtgctatccggggagggagagaaagagagagaagtgaactcaggaaataagcagctctattttcaaggaaattgtttgaggcatgactaggacttaagcacacaatgcagatcatgaagattgatgatggaaggccttaccatagtaatgtttttcatgagcttgtatccaatggcggccctaaagtagatggagaaattgaaagagaaactaaacaacatattttgcttgatacaatggtacaacaaaccaatccatcagaatatagttttatgaaggccgggcaacaaaatgtagataaagccatccagatacggcctgaggatgtttcttatgacaaggatgttgtggaaatcaaattgccagatataatggtctcttctaattatggcgttcagtttgttaaggatgtctgcattgatgagggagtacttgctgatcagaaggctatagcagaaaaggtgtcactgaacctgaattcttcaaagggagatacaaatggtattcggataaaagaaacagcagatgaacctgcaaaatctgttaatgatttaaaatcgcaaatagttgtcctgcccgaagcatgtgttactgatggggatactgtggaacaaaatcatccttgcaaattgcatgatctcgaaggcaacagtagtgtagatggattgactgttgtaaatgttgagaaatcgacgcccaaacaattagtaagtaatgacaatgcagaatattgccaacaaatgggtgcagatgtttctgagagcagtgaaaatcatgggccaaatctcaatggagaaccagttgatcaggttccatcaaatgattcccatgaaactggagctagtattgcatctgcgatcactaacgtcaatggtttatcagttgagtcaactgctgatggccactctggggtggtgactgaagatggtgtttctggtgtggcactaaataagacagaaatcaaccaaattaatcactataatcccttcatcgcatatggatcattagaggacacgtgggaacccaagtactccctacctacaattgttgatgatgtttattcagtgccctgtcctgtcgaaaagacagacagttttagtgatatcgtctatggtgcactgcgaggatttaattttcttgaaactggtgaatccattgcagaagacagtacattagattctgttgtagaaaattcaagtatgactgatgtccaagcatctgaagaaaaagatgaagcaagaagtgatgacattttgagtgatgagagaaaaattcctgttgatcagagaagtcctgttgaaaattcagacagtttgagtgatcctgttgacagggcacttagttctactgaaacagatggagcgagaaatgaagacagtagattagactctactgaagcaagtccaagtaggtcgtatgtccaaccttcggaagatagaaatgatcaggtggataatttcgtttatggaattagaactgatgcagcacatgggacgagttcaggtacatctccgttaactggtaagacagagcctattgatgcgaaaagtgagaatgatccaaaatgcgagatcgatagtgtccaagacggacatgatttcaacccaagagaagcaaacgatggcacaaatataagtgaggacaacaaagatagtaagagttccacacggcaaacaggaccagtaactgaacaaaatgaacctgacagtgcaaagatgacaatgcaaacagaacctgtagctcaacggaatgaacctgacagtgcaaaagtgaccatgcaaacagaatctgtagctcaaccaaatgaagctgacagtgcaaaagtaacagctcgaaatgttatccgcaatccctttgagtcaagtttttctggacctagcattatatcaggtccactaacaccatcaggtcatataccttattctggaaacatttctcttcgatcggatagcagcacaacaagtactcggtccttcgcatttccagtgctacagacagagtggaacagcagccctgtgaagatggcgaaagcggaccgcaggcgcttgagacgggaccgaggttggggttatagaatcctctgctgtaaattctgaatctgcatgctcccgcatatcttttctttttgagatcagctcttcgcgtcgcgcccctgagctcgtcgtggtagccgtgttaaattcattcaaaatgttgctcatttctcccctttccccaccacccctcctcttgctgcccccctccctccatgtcctgctctctcttttttttactcatctatagcaggttaatggcttgtctggattcggtagtggcttgtaatttgcattgagagtgagaaatgaaggtatacttggtgaaaagtattgtagctgatgagcatccctggagactgtaaaactgaaactggactgtgttaccctgttcagaagaacacaaatcgccatagtc

SEQ ID NO: 21922 - DNA, 3267 bp, Oryza sativa
  ref <308>: DATABASE ACCESSION NUMBER: AK072143
  ref <309>: DATABASE ENTRY DATE: 2001-12-06
gaccgccgccgcagtcccctcctccctctcatcccacccgcgctctccctctccctctcacgccgccgccgccgccgccgccgccgtcttcgcctcccccacacgccaccgtcttcgcctccctctcgcgccgccgccgtcgccgtcgccgcatccccctcgcgccgccgccatcgtgtccctgtcgcctccgccttccctctagccgccgtctccacctcctccgccgccaccgtcacgttgagatctccgagctcctccgcctcccactcgcgtcgttgcggtcgccaagcggtggtgaaggcggggccctacccaccccaaaaccatagctaccgccgccgcccacgccctctccttcctctcctctctctaaccctctcgctctctctctctctctctctccctctcctgccgtcgccatcgccgttgccaccgctgagcgctgcctccgcctccacctcgcgccgccacatccgcctcgcgccgtcgccatcgtcgtccccgtcgccgcgcgcctccacctctgccgcagtcgccgccgttgttgaagccgatgacagctccacggtgccccttctctctcctctcagcggtggcggccaaggaggctagggacgcggcggcggatcgaggagaccgaggcggtggttgagccaccaagcgaggggggagaggtgcgtggtggtggcggtggaggagacgtgctacgcgtgggccgccgaacccgatgatggcgaggtacgtgtacgccttcgtgttcttggcgaccaacctgctcacctggatgctccacgacttcggccaccccgtactcgccgagctccggcgactccgcggcagctgccggggcgccagctactgcctcggcgcgagggcgtcctccgcctcagccttggctgcttcctcttcttctacgtgatgttcttgtcgacggtgaggacgaggaagacgcacgatcgccggaattcatggcactccgagtggtggccggcgaagatcgtgctgtggatgggcttcaccgtcgtccccttcttcctccccccgcctctcatccagctctacgggaaggtcgcgcatttcggagcaggggcgtttctggtgatctagctcgtttccatttaacaatgttcacccctgcaattgatatttggagcataggatgtatatttgcagagctgcttacaggaaagccactctttccagggaaaaatgttgtgcatcaattggatctcatgactgatctacttggcactccagcagaatcccttgctaagatacggaatgagaaagctcgatgatgcctgagcaacatgaggaaaaagcctcgggttccttttactaaaaagtttccagtggtttggagatgctgagaagttgacaaaggcccttttctcctttgctagccgattagctcccgttatcatatttgtggatgaggttgcatgatggtaatcggaacaagctgaagcttaaggatgagtttgtactgctgggctgctggcagctcaggtagaagaggccttcaaataattaaaagtttcagagattactaaccttagttctcaggttagtttattcagaccacttccgatccttttggcatgcgattattttgtgactcatttcagatagattgtcttcaattcatccattgtgaatatttgaattgcttccttgcactaaatgtatgcaggcatcaaggttagtagtctggctaatattgctcgattgttaattaatcgtgacgaccttataaaatcttgacttttgtttcagaatatggatagaacatcatgctacaactttacctgctatttggaaacatagagactttggatgtttcttcttattttaacaagaaagacatcaacttttttttttttgctgaaatttttcattcagatctaaacctcaacattttctataccacaacatattgatactgggacagatggccttgaatgtttttcatgacccagcagttacataggttatgttgattatcctcatatatgtcttttgacttgtcggtgtctttatttgatttattattatcaacatgcataaactgtccggaatatgaatttctctgctttacaaaagctaacaatattatgtggttttatgtccttaaaactcaactgtttatttctaagtgtaattaattaattaattagtatgcactcatcacttcatggttcttttcataagtacggttggacaaataagttctatacatatggatgtaattaattggcatttggtttcttcataccaccaaacctgcgatctatttgttctgtgtcatatagatgtctagcggtagctttaacatatcttaaaatttcatactaatggttctccaattccccatgtcatgcataaaagggttgccatgctaataccaaatacaagtcagtataaataccaaatacaagttagtataaataccaaatatgccgtgatgacatttttttaacatgtcttgagtttctctggtttagaccatagactaatttggtgtttgttgtaaagaaaggttgaacatggagtaggcccaggttatgtcaactgtcatcttaaaatactagaggatatgatttggtaaagctgtagaggttagtttaatcataaaaaagtatcattttactttagccataatttgggatgtaaaatgagcgaaaaaactcagtgctctgctgaaatagtttgtgagagtaaagtggacttttttttttttgttaaaacatcgtgaacaacgagatgctttataggtctttctaccaagtactgggaagagacatttagttcacttgtttagggcagcacataaacttatccctcatatgttctcttttatgaatgattagaatgttgaagatgtacacggctagaaatctacagcagataaacacatttgagcagatgtacgccatttgatgacttcttttttatgaaatgccagttcgtgatattgccttacaacttgttgcagggttatgccatccatctaatgggaggtattaccagcgatttgtggacaagctctccattctggatctccctatttgcgctgcatcttctaccagtaatcaaaagagtagatcctcacagaagaactgaaaagtaaagtgacgtaccagtgttttgcgttgataatcaaggagcttaaatgacctagcctgacatgtggttgttcttttgatttgtaaatactatccaaagatgcttatggtcctcgcgcttatggttacccttttgctt

SEQ ID NO: 21923 - DNA, 3085 bp, Oryza sativa
  ref <308>: DATABASE ACCESSION NUMBER: AK072144
  ref <309>: DATABASE ENTRY DATE: 2001-12-06
gtattatagatggcaaaacactgaaacttccccctattatcaaatccaacctccccgtcccgtctccctcgcccgccgccgccgacgccgacgatctccatctccaccagctcgagcagctgggccggcgtcctcctcctcctcctcctcctcctcctgctgctactgctgctgcttccgccgcatagtactcttgcctctgacctccacgcggcccgagtcaatcccctcggccagcctcgcgagttcgcccgagccgccgcctgcctgcctgcgcgcgccgatctccatccgtcccgcgaggggagcagcggtggctgccccgtcgtcgtcctgcctcaggttgaggtaaattattcatggtgttctctgactggtgatgaattgcttgttggatacagggggtagagggaattgagtcagtttccatatagatggaaaaattgactgtgaatgatagattttgcttaattgttatatattagcctagagagcctgatggaacctagaagagatgatgttcgctctgcagctcaaagtaccatccatggatcctcgagctcagcacctaccagttctccagttccagactaccctatttcgggctctgttaagcctgtccttaattattcaatccagactggggaggagtttgctcttgaattcatgagagatcgagctatacctaagaagcatctggtttctggcatgtctcatgatcaaaatgttgcatctggtgctggtctcaaagatcctagaggactcctcggtgctcatcgaacaggtgcagagagtagatttgatgccgcaatatttttgactactgatatccagcaaacagaggggattgaaagaaaatcttttgctgaaaatgaaaacagaagcaggcatgtgtcaactagctcagttccacgaatcccatctcgcagtggaagtagtcagagactgtcccatggctatgcttcttctgagtcttcagactcctccagaaggataaaaattctctgtagctttgggggaaaaatattaccccgaccaagtgatggaaagcttaggtatgttggtggtgagacacatattattcgaatcagtaggaacatttcttggcaggagctcaaacagaagacaacagctatctataatcaaccccacgttatcaagtatcagctaccaggtgaagatcttgatgcgttgatctcagtctcaaatgatgaagatttgagaaacatgatggaggaatgtggttttcttgacaatggggaggggtcccagaagcttaggatcttccttgtttcttccattgatttcgatgacatgagtttcagcctgggcagtatggatagtgattctgggatccagtatgttgttgccatcaatggtatggatgtgggaactacaaagccttcaagtgggcatggtttaggaaacacgtccatcaatgagttggatcagttcattaatctcaacaacgatagtaaccaaccaaattcaagtagagatggttcaaatttgtatagcatgagtgcatcaactgctgtccctcctgctttgatttcagtaccattaccagtgaccctctccagtgacagtactgcaaatttgtatccttaccatagccatgggatgcagcatgttcagggctctgattactccctcccagcttccagtgaaagattttatgacattgagggccagacatctattcctttatctgtaccttctggttatagatatacttctcagtgcacaccgtactcaggaactacttcactgcaatctttcgaccaacaatcttaccatgatagtatgatggaaggatcaatgaaggaggaaaaacagccttctgttagagtgccacttcaaaagaatgatctagattatttccaatcccttgagaatatgagtgttcctgtgattcaccatgactcttctagtacaaactatatgaattcagatgtcccagttacaacttccattcaagaaggcctgaaatcttctcttcaaccaagtgacagtgcaaagagcctagagacttatacagcatcaaaagctatgtctgctgctcaagattcagagtgtaatgaagatgatcgccactctagtggagcttttgcatctggctgctctgactttcaagttgacatgatggaccacagcaataagaatccgccacctcactctggaagggtttttcattctgagcggatacctagggagcaggccgggtcgctaaaccggttatctaaatctgatgattcacttaattctcagtttctaattcttcagtcacagtctggtgtggcaaaggaatccattgcagaagcttctgatcctgcaattgaggggactgaaaaatcaaatttagatgctcgggcaataaatctgaatgatccagctactgttgatagtgtcacacctgagaaagaatgtgccaatactgtacaacagactagcacatttagtgaacaactgcttggtgaaaagaggtcctcaactgacatgagtacaagaaatgtagagaaaaatatgcatgcagcggaaaatgctgtagctaaatgtaatctgaatgatgcaacttctgatggcacaaaaatagtcaatcagcaggcggatcattctgctgtgccacatcatgttagttgggacacccccaatcctgcaatcccaactgatgttggttgtgatccatttgtaccttccaccagttctttagatgattctcacaaggaaccaattatccctaaaaaggataataaggacattgttggtggtatgagtgagaggacctcccctgacattctttctgatttcttcgccaacactgcagcacaatcattaagccctttcaatgaacctgtacttagcttgaacatgcataattatgaacctcagagatggtcattcttcagaaaccttgcacaaaatgaatttgaacataaaaataaggagcaagacctggcaaagatcgaggagggagtttatcctttggtacatgcagagcatgatgcagttaacgtgaagaatgtggctcctcagaatgatgttcatctggaaacttatccagtatcttctggcatcaatcttg

SEQ ID NO: 21924 - DNA, 3452 bp, Oryza sativa
  ref <308>: DATABASE ACCESSION NUMBER: AK072145
  ref <309>: DATABASE ENTRY DATE: 2001-12-06
tcggggcagggggcaggcaggccactactagtactagtagtagtaaaagatctagcgccgcatacaccaccacacgagacgaagcagcagcggagaggggcctctcgtcggcgacgcacgccggccggaggaggacgacggcgacggcgacggcgaggcttccgctccaaccaaccaaccaaatcacaaccgcatccaccggagggattccctccagatcgccattcgattcgctgctgctgctccgcctcgtcgtcgccgtcgtcgagttcgtctcgcaatcgcctcctcctctccccctgggccgtgcttaggagtatcttcctcgcgactgtgggttagtcctcctagtgggtttatgcatgacagcccctgcagtccttccaaatgagttagaagggatctcccgttctcaaagagtagagctgttccgagacgctagttgcaatatcgaaaaggaggtactgtccagtttagcaaatggccaagattctcatgcttctggaacaaaccctggcttcagagttggagagatcaggctctccaacagggatatttatttcggcacattattggggaacacaccagagggttcagggaggtatgtctggtcagatggttgcacttacgatggtgagtggaggagagggatgaggcatgggcaaggaaagacaatgtggccatctggagccacctacgagggtgagtactctggtggctacatttatggtgaaggcacatataccgggtctgacaacatcgtctacaagggaaggtggaaattgaatcgtaagcatggacttggatgccagacgtaccctaatggagacatgtttgacggttcttggattcagggagaaatagaaggccatggcaagtatacgtgggcaaatggaaacacttacgttggcaatatgaagaatggcaagatgtctgggaagggaactcttacttggaaaaatggggattcatatgaaggaaactggttagatggcatgatgcacgggtatggaatctatacatggaatgagtgtgggtattatgttggtacttggaccaagggactgaaggatgggaaaggcacattctatccaaaaggttgcagagttcctgttaatgatgagctctacatcaataatctaagaaaccgaggtgtgctgcctgacattagaaggcagaatcacggctcacgcatcctcactcttcttcggttgacatggggaacatgaaggttggcttaactcgggaatcttcaggtccttcatctagaaggaactcaagtgagcaacctcattcgaaaaatgtatccttggaaagacggtggagccttgaggtggccattgaaaaattcattggccatgacgcaactggaagctctggcctagaaagatctgaaagcattaatgattctgatctgcctatgctggaacgggaatatatgcaaggtgttctaatcagcgaggtagtacttgacaggagtttttcggattcgtccaagaaggcaaaacggcgccagaagaaaattgttagggagacaaaaaagccaggagagacaataattaagggtcacagaagctatgatcttatgctcagtctacagcttggaatcaggtacacggtaggaaagattacgcccattcagaaacgtgaagtccgtgcttcagattttggtccacgagcaagtttctggatgaccttccccaaagaaggatcacgacttactccttcacatcctgcagaagacttcaaatggaaggactattgtcccatggttttcagaaatttgagggagatgttcaagattgatgctgcagattatatgatctctatatgtggaaattctgcacttagggagttatcttctccaggaaagagtggaagtgtctttttcctatcacaagatgatcgattcatgatcaagactcttcggaaatctgaagtccaggttcttttacgaatgcttccaaaatattaccatcatgtccgtacttatgagaacaccctcataactaagttttttggcctccacagggtgaagccttctagtggtcaaaagtttcgctttgttgtaatgggtaacatgttttgcacggaattgaggattcatcggagatttgatttgaaaggttcatccttaggccgtttctactgacaaaatcgaaattgatgagaacacaactctgaaggatttggatcttaactattcattttatcttgaaccttcctggcgtgaggctttacttaagcagattgaaactgacagtgaatttctaaggacccaacggataatggattacagcttattgcttggtgtgcactatagagctccccagcaccttcggacgcgtgcatcttatcatcgaagcatggcagcagatagattaactgttctttcagaagaagacgctcaggaggacgatgctttcaactacccggaaggtctagtgttggttcaaagaggtggtgatgaaaacagtgtggttgttggccctcacataagaggtagccgtttacgatcaacagccgctggatttgcggaagtagatctactacttcctggtacagccaggctgcagatccagctaggggttaacatgcctgcaagggcagagcagaaccctaaagaagaggaaagcaaatcgtttcgggaggtgtacgacgtggtcctttacctgggtttcatagacatattgcaggagtacaacatgtcaaagaagatagagcatgccgtcaagtccatgcagtacgactccatctccatctccgccgtggacccccagttctactcggagcgtttcctcaagttcatccagaccgtctttccagaaaattcatagtgccccagccagcagccattgcgattatttcgtccgcggattgattctcctgccttgtgttatgacatgaacttcattcatagtgcctcagcagcaggtactaattttttgccgagcagcatcctccttgaaacgatatggcactgcgggatggcagggaaagcacgcgaatttattctttagttctgaaggtgctgaaactgaaatgtgcgaaaggcggtcatggagaactggagatgggagagaatttgacgtctttctcttgatggaaggaaggcacaaccgcacatgtctagggcaatgtactaccgtcggtgccatgtgcttgtgagcctctcttgtttgggcacaacacaacaaatcagaagcaaaagcgcagtgcactcatatgtgccagaaatatattttccattccagagtatactgttagttgtataggattacagtgaattgccaccttggtcttaatgttgtatgaaagatttttcacgtttttgtgataatatttttttttttcgatgaagataaacgaacattggcacgtaatatagccaatgtgtacatcatgctatgcgtttcttacatatatgtacgtcatgcagtgcgtctgttccc

SEQ ID NO: 21925 - DNA, 3101 bp, Oryza sativa
  ref <308>: DATABASE ACCESSION NUMBER: AK072146
  ref <309>: DATABASE ENTRY DATE: 2001-12-06
ggggaggggaggagaggaaccctaatcctgtggcggcaagcgggcggcggaggtggaaaagaattaggagtcggagaggaagatggccagcaacatcaagcttcctttggccgatggggaggagcgcttgtcctgttgcggcgagctgttggccatggggaaaaagttggaggaagcggtgacgatcagcggcaagcttcctttggaggaggggatggggaaggggaagcggcgtccagtggtggcggagcttgaagatgaagaggagtttaaagatgaggagttgactgagcagataattgcgcgagacttccgtgtcagctgggaacatcgctttagccctcgctattccttccacgacaccacaaccgtatctcccatgcgctatacagagggacctataccaagatatgcttgctgctgtgatgctttgcaggtcttctctctccaagtgaaagaagcaaaagatggtcttgactggccgctacatgtgtatggcttggttgccaccagggactctgtagatcaaaggcataaccttcttttcaagcgcacaagggataattgtcagattctcactccacaggattcacacctgctgttaacaggcccatctcgtgcagttgtggtaattgatccagtaacgtttgaagttgaactaaaagtaaggggaaaaacagaggctgaggataaagtgttgagcctgacggtctttatgcaccacacggcttacccataaacgaagcatacttacatgatccgtagatgtttgtccagcaaacatggcgagcttgagttgacatatgctgcacttgttggaacagttgaagccactatggtgagtttccaagttaccgaggggtcatggccagatcatctgcgaggagtagtcgtttgcaaaactgccagcgtagagggaggggatattgtgctgcttgattctcgggatggaaaaatgcctatcaattgcaatggtgccattgagctttcaaggcgtgtggtttctgcggaattagggggagagcttctgttcctgctcttggtttggagacctactatgttgctactgggtacgacgattgtgcaaaggcgactccagctgtggtgaaggcattcacaactgctgggcaatttccttgccctgaaccatatgtttgttcaaaactggaaggaaaaacagtggagatgaagaactcttaccactctctctcttttgatgtaaggcatggcctcctccagacagtaactcgcaacaaggatggggaacacaccgatgttggtgaagaaattggcatgtaccgcagccacggtagtggggcatacttgttcaaaccaataggggaagcacaatccattgttgaggaagggggatatttcatccttagtgaagggccattggttcaagaggctcattcccttccaaagacacagtggcataagtcacccatctcacatagcacacggatttatagctgtggagactctatacaggatatgctgattgagaaggaataccatgttgaacttgttggccatgtatttaatgacaaggagttgattgtcagattcaagacagatattgacaaccaaggagtcttctattctgatctaaatggctttcagatgagtaggaggcagacatatgataagatccctttgcagggcaattactacccaatgccatcacttgcatttttacaggattcgctgggcaatcggttttcagtacactccaagcagtcactaggggcagcaagcttaaaaaatggatggctggagattatgttggatcgtagactaactcaggacgatggtcgtggtctgggccagggagtggtggacaaccggcctatgaatgtaatcttccacctcctcagggagtcaaatgtttctgccttgcctaaaactcacagcttgctaactctacaaccatctcttctctcccaccgtgtgggtgcacacctgaactacccaatgcatgcttttgtgagcaaaaaagctcaagaaaaatcgttcaagcttgctcaacaaacatttgctccattaacttctcctttgccctgtgatgtacatgttgtgaacttgaaggcccctcagcctctaaaatttcaccatgctgaagcagtcgaagcaagatttgcccttctgttgcagcgaagaggctgggatgcatcattctgcagaaggggcggattaaactgtacaactattggagaagagcctgtgaatttgttctacatgttcaaagatctggccgttctggatgtgaaggcaacttctctgaatctcttacatgatgaccctgaaatgctagggtaccttgagcaaattggtgatgtagctcaggagggaaacgttcttatctcaccaatggacattcaggcatacaagctggacctacagccaccatcatcacaggaagagtagtatgtcaggacagtatgcggattccgatctgtgctactaacaggagacgatggctttatccgtaataagtgatagttgcatcatgattctgctggaacatctctcctactcaaatctctgctcgctttgttgacgtacttcgtatcaacataaggtgatcttcaaaatgctctttagtcctaaatatatagaggtgttgggtgacctttgaagtctggatgttaccctctgaattcagcccggctgtttcctggcaaccttctgatatacgcaggtgcatatacttcctttcttctcggtgattgtttgacaaattggaaatttggggcacattcaagcaagcaaattgtagtaatttccatttctttttgctctagtgcagactagctgtgctattacagcttctgtatgctttgctactgtagtcatacagcgtgatatgccggctagtgctatcataataggaacctgaacctatatatgagcaaatttttcgtgtatctccttttggtatctgacttttgtagtgtgatcacagagcttgctggccaagacctgaaatagtctagacagttgattcttgctttgagagttttcacatgtacaaattatgactgtaaacattttctgaagatctctcgaaggcaggccttggttatttctggggcttatgc

SEQ ID NO: 21926 - DNA, 2049 bp, Oryza sativa
  ref <308>: DATABASE ACCESSION NUMBER: AK072147
  ref <309>: DATABASE ENTRY DATE: 2001-12-06
gagagacgttcgtgcccccatcctcccccagtagccagaagctactctcgaaccctaatccctctcctcttcccacgaggagccgccgccgccgccacggccaccgtcttcccctcgagctcgtgaagccggagccgccgccttcttctcaagctcgcggagccagccgtcgccgccgccgtgcggagccagtggttaccgtcgctgtcttcccatcgacttcttgcgagtcatttccgtctcattccccatcccacgcagactttggttcttgcaagatctgtgcccgcatcgagcccccacaagcacgcggtaatcagaaggtgaagctcgacgtgggtgtggcagtagctaaatctcctcctgctgatacgaatcctcaaattgattgctcacttctgtttaacagtcctctgtctcactgctctctttcatatcaaacccggcagcctctgcttgatttttctgtatgtagtgcatggtcattcaggtctgaacatatgaggttacaaatgctttacctgcattaagcttctgaaatttcaccgttagaaggccatattccgttgattcacaacattttttttatgtgcaggcctgcagatatttttggaagcacaaacgaaaggatcacgtatgtatgtcatgtttgctgattactacctttccctgcaaatacacatacaccacttggatgtagatacacattctgtcttgcttaacatgttaattaacttgattgagtaaatgatttttgcagtgattggccgatatcccaaagtaaaatcaataagtgactgaaggtaattcattagtgttttatgtctatatatgatcataaaagtgtctgcagggtgcatcagacaagcaaaaagtatatgggcagtgatggcacatttcttagggaagggatttatgagttcaacggcaaaatcctctctatcagtccatatagtagcagttgcctagcatttttaacttacctacattgctcccctatttttagctacataagaactatatgtatgtcaccccatcagagttgttgtatttaaatcacatattcttgtattctaagtccatatgttgttgagaagtgttctccaattcatctctatgcagagcatcctatcataacattaacaatgttagaccgtatttttggtgagtgctgcatgcagttattattatcaaagccatcaaaggtattgtacatcgttacatctccttcaccctttacaggtttctacattacagatgctcatgttattgttttaaatctttttcaaccagtacaacctgattagctattcttactaattctttttatacaaaaaaatatttaggcatgtatgtttacaccatcaagtttaaaatgctacttacactgcttgcatatgtaagaaaaaataactgccagctccgttcaagttccctagagccatatagtctattgatattctgcttgatttttaatcttatgacaatgattctatgattaagtttaattatgtatatcgtcgtcatgcatcttgcatttcatttgctgaataatacacaaattgatgtataacaacataactgcataattgagcttaatttttgcaaagaccatccagtacagcttctgagttacattggtaatggaacaaccggcgttattatactactatcatatgctatcaggtaatctcttccttaaattgtagtttgatagtcttcgggtctctactatttgtgcttaccaatccgtttttaaagcttgctcctgcttgcatgaagagattatttctgtttggtgctgccgagcacgaagaatttgttcatccatgtgttgccaatgcctcttgcagtgtgatatgatgtgaattgagtattcatgctctgttagcctctttcaagtagctaatggaggaaatgattcccaccatttcagtagctgtattatgtcagttatgcccatttcaaatatgtaatttctactttatttacctcattgaggtatattgtttcacatttttccgtgagatacatttcagatggcatttt

SEQ ID NO: 21927 - DNA, 2876 bp, Oryza sativa
  ref <308>: DATABASE ACCESSION NUMBER: AK072148
  ref <309>: DATABASE ENTRY DATE: 2001-12-06
gacatttcatcgaacaccttgtgtgcatgcttcatcatcaccggttggaaccgaagccggcgtagctgaccgcgggaaccgtcgctcgggccgcctctacttcctctgctgccttggatcaacgtcgggaaccacgcatcgaacacctgcaagcgtcgccgaccgctagccgcccctgtttcgtccgcactgagctacgcgccgccgaacttcgccatcccgctgtctctcggtaaaacctcgctcctatagctcctcctagtctagtacggagtagaagctaaattccccaccagttttggtgattagcgcccttcggcgtgccgtcccggccgccgcttcgccatcggcgggctcgccgtgagtaggtcacctcgagcactctccttcccacctagctagcaaaacggaatcaccataagctgtacaagctcttgcgccaaactaattggttagagacctcgccatttgccgagtccccttgcaccctagagctcggccatggtggccatgccgcgccgccctgtgctgtggccgccggcgggaggtcgccggaccctcctccgcgcctcccctgaccgccgccgggtcgccctcgtccgggctgggccgcacgcgctgcgcctctgctctgctcgatggccggcgcgaggtagaagacgatggggaaaaaggaaaagaacaagagagagagagattatgacatgtgggacccacatctacttagcacacagtaattctcttccaatgatgattatacctgtccatgacgcgtgggtccggatgattagaaatttaattaaaaccaatattaagtttactctccatgacaagctggacccactggtaattaaaacagccggtttggccctagtcaacctgggctggtcccacgtgtcagccaatgtatcttatggataatgccatgactaaaaataaatcaattatgaacagtatcatttcacaattattggaattaattcaaatttgaatctttaaacaagtataactcactcattttagctcggatttgaatgaaacttggacctaaattcatataaaatcaagatctagctgatggaatcacttttgctatttatttttgtactgttgaattttggtgatttaatttgaattctagttgaattcaaatcgaatctttcgcacgtacatatagattccgagggagtggttgagttgactgcagaacagggacatcaaatctgtgagcaaggcaagtcatcactaatctttgagcatgttggacctattgcgaacttattttgatttaaataaagtttgcatgctatttatatgtgaatgtcctactttgttatatgccatacctttgatattgattatccatataatctttgtaatccatgatatcgtgtgtctttagtcaatatttgacaaatgcttagcccatgctaatttagatccatgcatattcatatttatcaaaatgctttatgcttgggcaattaccttaattagggaaggtaattgacatacggcatgtggagacatgagcgccacattgccatgataatgatgagatgatttgtgaaagaaaattaaactaaacaaatgtttttgactggggcggctggaggacttgggtggtgtccgataaaggctagtgccgtccctggtcagttaagtaccgagccattaagttaagcatgaaacgaccctagtacagccgtacttctcgaatgggtatagacctagtggagtagatagccgagcggaggcagtacccctgcatagtggtttcacttaggtgtgtggacgaacaagcagtctgctggcggatacccgatacggatggccagagactgacttgtcaagactacaagactacaaggagatacccaaaagaggacagcatggattgggttcaactacaggatgcaatgttaggctttcgtgagttttccccctcgggagcgccagaacttctctcactgctagaaacttatgacgcctagagtgcatgaggactcaagttcatggagcgggtattgccaaagtgaggttgttgaaaggctttgccgtggcaagtctcattcgttgggacataggctcatgtgttgggcaagtcgcgtagtacgggtaaagtgtacatccactgcagtgtaagtaaaccaatctattcgaatagccgtgctcgcggttattgagcaccgggacatgtattacacttggctagactctaaactcttaaaatgatgggtgggatatgcataatgatttttagactggtggatcaacttctcgagaggcgagaaggggtagaccccagaaaaccatgacaaccagtggcgggaagctatccttgggaacacaatggatggtggacagaaccgtcgctgtttaatgaactacggagataaaatttgatcagttatgctaggtcttaggcttgtgaaaagaatagcaaaattggctttatgcaaataaaccattagcctttcattgaatatcctctatcatatgcatcgttgttgtggtggcttgctgagtacggttggtactcactcttgctatttacaaattccatcagaagccggtgatgaagtctcggatgacccatatgcttactaccaggagggtgaagaagatggtggcgcttagtaggtcttagttacggtcgtcgcctgtggcaatggcgtcgccgctgccttgattccgctgcttatctatttctgcttttgggatgtattccggaccgtttggtcctatgttctagactatgcctgcgggcctatgatgtaattattcgcgctagacaatctttgtatgcgcacttgatatttcagcaatgtaatcgtgagtaccagactacttgatacagggaaatggtactattc

SEQ ID NO: 21928 - DNA, 2475 bp, Oryza sativa
  ref <308>: DATABASE ACCESSION NUMBER: AK072149
  ref <309>: DATABASE ENTRY DATE: 2001-12-06
acgaatccttttgtagctcatcatttattggcaaaaatagaaaaggtcaatatgaaggaggagaaagaaacaatagtaacgtggtcccgggcatctagcattctacccgcaatggttggccatacaatcgcgattcataatggaaaggaacatatacctatttacataacaaatcctatggtaggtcgcaaattgggggaattcgtaccaactcggcatttcacgagttatgaaagtgcaagaaaggatactaaatctcgtcgttaactgaattcagaatagaaagattcaaaataaaaaaaaaagaaataggtaagcggggaataaccttatttatgacaagtttcaaactggtaaagtatacccctaggataaggaagaagaagagtgggctaaggaaactcgcaagaaaagtaccaaccgatcgtctacttaagttcgaacgggttttcaaagcacaaaaacgcatccacatgtccgttttcaaagtacaaagagttctggatgagattcgttggcgttactacgaagaaactgttatgatattgaacctcatgccttatcgagcatcttatcccatcttaaagttggtttattcggcagcagcaaatgctactcattatagggatttcgacaaagcaaatttattcatcactaaagccgaagtcagtaggagtactattatgaataaattcagacctcgggctcgaggacgtagttctcccataaaaaaaaccatgtgtcatataacaattgtactaaatatagtaaagaaatcgaaataatctttagatccatctaagatttgattcccggtaaaaaaaatagaatagaaaaatatgggacaaaaaataaatccacttggtttcagacttggtacaacccaaaatcaccattccttttggttcgcacaaccaaaaaattattctgaaggtctacaggaagataaaaaaatacggaattgtatcaagaactatatacaaaagaataggaaaaagggctcgaatagaaaaatagaagcagactcaagtttcgaagtaattacacataataaaaaaatggactcaggctcaagttccgaagtaattacacatatagaaattcaaaaagaaatcgatacaatccacgtcataatccatattggattccccaatttattaaagaaaaaaggagcaatcgaagaattagagaaagatctacaaaaagaagttaattctgtaaaccagagacttaatattgggatcgaaaaagtgaaagaaccttatagacaacctaacattcttgcagaatatatagctttccaattaaaaaatagagtttcattccgaaaggcaatgaaaaaagccattgaattaactaaaaaaacagatataaagggagtaaaagtaaaaattgcaggccgtctcgcgggaaaagaaattgcgcgtgccgagtgcatcaaaaaaggtagacttcccctccaaacaattcgcgctaaaattgattattgctgctatccaattcgaactatctatggagtattaggagttaaaatttggatattcgtagacgaagaataaccaaccctgtcttcccattctgttcagtaatagaataaaaaatgacaagagccttattttccctaaaatccctgaaaaaaagaagaaattctacctctttctataagatttaatgaaaattgagaaatcttttaataaaattgctatgcttagtgtgtgactcgttagtttttttttagggttcaaaaaggggattaaaaaaaaatagaatgaaccctactatgtaattatagaaaatgaactaataaccaacctattgcttcgtattgtcgagatcctaactaagaaacagtcactatatgaataaatacatctatcataaatgagtaaatctatcatatacgtgtagcaactgcaattttttctttaaaaaaaaataggattctaagttgtgaagcaaaactaaaggggatgtagataaaaggaaggatgatagaaagaaggaagagaaataagaaagatataggattccaatatgtatggtctatgaattacatcataaaaagcaatgtgataaagcatcaatataataaaaataacagagaattcgaaatcgtaatttgattgaaacaagaaatacaaatttcaaggaataacaaagagcgtcccgagttaataaaactgagaaattgactcggaaagaaattttttggaagctccattgcgagattcaaacctaaccattaaaggagaagcagtgggaacgacagaacctatgactggataggattttcttgaaaagaatcccaatacttcattgggtgggatggcggaacaaaccaaaaaaattgtcttatttgataaggttatgaattaacaaataagacaggaaagagtaaatattcgcccgcgaaatttttattgaattagaatactttaccgcgattcaataagagtaaaataaaaaaaggagact

SEQ ID NO: 21929 - DNA, 2333 bp, Oryza sativa
  ref <308>: DATABASE ACCESSION NUMBER: AK072150
  ref <309>: DATABASE ENTRY DATE: 2001-12-06
gagcagccagccagctgttcgtcctagggtcatgcgcggcgccgcgtacgactaggggacgcgcgcgcctgccatggccgcgcccgcagccgcctgcgacctccgcttcctccttgtggggttgttgttggtggtggtggtgggatcccgcctcgtacggccccccgatggcggcggcattccgacgacgctggacggcccgttcgagccggcgacgcgggcgttcgaccgcgcgctccggcaggggagcgacgacgtgccgctcaccgacccgcgcctcgcgccgcgcgcgcggccccccgcgcccgagcagatcgcgctcgccgcctcctccgacgccacctcggtctgggtgtcgtgggtcaccggcgaggcgcaggtgggatcccacctcaccccgctcgacccgtccaccgtccgcagcgaggtctggtacagcgagaggccctccccgacggccgccgccgccggcgacgtctccggccactacccgcacgtggcgagggggaaggcggaggtgtacagccagctctacccgtacccaggcctcctcaactacacctcgggcgccatccaccacgtccgcctccggggcctcaggccggccacgcgctactactaccgctgcggcgacagctccgtccgcggcggcgcggggctcagcggcgagctatccttcgagacgctcccctcctccgccgccgcggcgtaccctcgccgggtggcggtggtgggggacctggggctgaccggcaactcgacgtccaccgtcgaacacctcgcccgcaacgacccgtcgctggtggtcgtggtcggcgacatgacctacgccaaccagtaccgcaccaccggcggcagaggcgtcccctgcttctcctgctccttccccgacgcgccgctccgggaatcctaccaaccgcgatgggatggctggggaaggttcatggagccgctcacttcgaggatcccaatgatggtgatcgaagggaaccatgagatcgaaccacagggacaaggtggagcggtgacctttgcatcctacctggcaagattcgccgttccatccgaggagtctggctctaacaccaagttctactactcgttcaatgccgggggcatccatttcatcatgctcggtgcctacgtcgactacaaccggacaggagcccagtactcgtggttagagaaggatctgcgaaagattgatcgacgagtcacaccttgggttgtggctgcttggcacccgccctggtataacagctattcctcgcactaccaggaatttgagtgcatgagacaagcaatggaagggctcttgtaccaacatggtgtcgacattgtcttttcagggcatgtgcatgcttatgagaggatgaaccgggtgttcaactatactctcgacccctgtgggccggtctacattaccattggagatggagggaacattgagaagattgatatcgatcatgctgatgatcctggaaaatgtcccggtcctggtgacaaccaccctgaatttggtggagtctgccatctcaacttcacctctggtcctgccaaggggaaattttgctgggagaaacagccggagtggagcgcgttcagggagagcagtttcggacatggcatcctagaggtggttaattctacatatgcattatggacatggcaccgtaaccaggatgcatatggagaagacagcgtgggggatcaaatctatatagttcggcaaccggacaaatgcttgcttcagactacgagtgcgtcgtctgaaaacaactgtccctctgaaggatgcccttctctagtgagcaacagtggctacggtgcacagaaggatattattagaagtggccatctcatttggaatgcttctctagtcatatggatgatcttgatcagcacagttttcatgaagggaaatttgtgctctcgtttctagcctggattggtcaacaaacaagaggaaccaaagcaccagcgaaccaagatgttatactgtgtgtgctcttggatttgtgtgatggccaaagctggactctggttggttgtgtgcagtaaccatcattgcttttggtagtacatactcctacatctacatgagtttatgaaatagtcgtcggcttttatttactcaattgtcagtgctgaccatgtttccatgaacacgctgatgcaactaactcctttttctatctaaagtagaatggtccaaataaccaaatgccttgaaatgggtgtagtgtggtgtatttgtttttgttgtttgaaagaacagtgtagaggtttctattggagtatatactactgcaacaactagaagtcaacgactg

SEQ ID NO: 21930 - DNA, 2452 bp, Oryza sativa
  ref <308>: DATABASE ACCESSION NUMBER: AK072151
  ref <309>: DATABASE ENTRY DATE: 2001-12-06
ggttcttcctcctcctccctcgccgtcctcacaatttgtctcttcccctaatttctccccccaatttcgtcccttctcgggtctcgaatttgtcgcccttcttcctcgcgatctgtcgcgcttcatcgccatcggcgacctcgcgcgcgcgccgccggcgctgggggggcgccggaagcctttctctcgtcgagaggcgtcgcggcccccttcgccccccccccccctctcccgactcctccgcggcgtgctgggctagcgcacgtgcagcgtagatccatccgggtttggattgatttcttatttttaaaaaaatcggtaaggaaccctagctttgcttacctcgatggttcatttcgatctaaatctttatttatgcccgtcgttcagttagtggtggaattatttgctgcgcgttgcgctactagcctaatagacttatccgtggctggtgattccatgattaggtacttattcttcttcagagctcaagatcaacatgagttgaaccaaataattttggtactctaggtgcgggcgcagttaccttttttttccagaaatctatgtggttcaactgaattttccatgccctatgttaagtctgccgctgctcctctggataggaaaagtttccaattaggttgtacctgaccaggttgggtaatttttcggcggccaatatggagcaccttcctgttgaagtcattggcaacattcttgcacatcttagcgctgcacgtgatgtcatggttgcctctggggtgtgccggaagtggcggacggcatgcaggaagcacctccattcattatcgttcaattccgatgacttccctcgggacatgactacacgccagctggagattgtcatcacacagactatatttcagacaatggggctgcagtgcctctctattcacatagatcgtacccatgagttctcggcagcacctgtgattgcatggctcatgtataccagggaaacactccggagcttgtcttacaatgttcggacaaaccctaacgtgaacatcctggagaaatgtgggaggcagaaattggaggtgttggatttagaccataacacaatcactggtgttgaaccaagttatcagagattcacctgtctgaaatccctttctttaaggcatgtgagcatttcagccttggatttgagccttttagtggctgcttgcccaaagatagagtcactggcacttgatttccttgaggttgtcacttcagatccacagtctacaatggagctgactagccataccttgaagagcctatttgcaaaatctgttggtgtggacaagatcatacttgatacagataatctggaagttctaaacctaaatgctttgaaccttgatttgtttgagctcattgggaagggtactctaaagcatctcaagattgacgatgttagtgttactcatatggatattggggagagcacagatcatctggaggtagtggatgtgagtaactttactatagtccggccaaagctgtacagtatgatatccagagcatctaacttgcggatgctacgattttggggtgttgtgtttgatgatgaggatgagattgtggactcagaaaccattgctgtttcatttcctcttctaaggcatctttcattgagttatgagttacgagatgggctacttcattatagcctgcaaggatcgtcaccactggataatgtttcagtcttggaacttggttggacagttataagtgagcattttggaccctgggtttttggaatgatcgagaggtgcccaaatctcaagaaacttgtcattcatggtgttctttctgaggcaaaaacacgcgaagagcgccagatgctagcaagctttacttcatttatagtctgcctcatgaggaagtatgtgcatgttgatgtacaatttgagtacgagtgatcattgtccaagttgggtgggcattcttgccctagctcattcgagacataccatcagatttgcttctcatccaacttcacgaaggcctgtggtttgttactgtcagctgcatgtacttgatcaagaaagtttgagttgacatgtccacagaataaaaagcgcatgcatttgccaatacattatagcacaagtcgcgcacccttctctggaaaccatcgtcctctctgttagtgaaacacctccaactgaaatggaatgcttaaggtgacatttatttggcacatgcccatgaatataatgccctcatcttttggtctgttcatgagagaaattttgggtgggaattctctttacatactgtaagtgtgaatggaagatttataaattgtaagttgacttcatgcccacagaaaacgtgaattctcttaggaaaatggttattcccctgaaactttacgccttgaaattcctcgcgccgagtgattctattatattgatatttgctcttagcatgg

SEQ ID NO: 21931 - DNA, 3222 bp, Oryza sativa
  ref <308>: DATABASE ACCESSION NUMBER: AK072152
  ref <309>: DATABASE ENTRY DATE: 2001-12-06
gatcttttccatcctttgcatcagcgtcgtacgactctctcggcctcccctttcttccttccaccgcccaaaccctagatcggcgccgccgccgccacgcagggccggccagcaccgtgtgggggagcgtccggccgccgccggggtgccttggagatcgatctcctcgccgccgacgacagcttttcttcgccggatgcgttccgtggcggttatcaggactctttttctctcgagatagagaggaaaagctccctctcgatctgctgttggatcggaagaacagcagagagagagaaagcttagcgggatgatggtgcagatcgcgtggatctgtcgccgggaggtgacctggatcggtgtcgtgctctcgccgtgtgggtgagattcaccggcgccggtgcctcggatcctcttcggcggcggcgttgggcctccgatgcgcgaagacctggggctctgaggtcatgaggaggactttattttggggagaggatttgatgagcatggaggatgtgcagtgctccaagtcggaaagcttttttttttaccattactgctgccgaggaagctcaatctctgtcgggatggtaattacggaaggggttatcttagtatggtgtggtttatgaaattcagagatcggttatcttattatggtgtggtttataaagtcagagatccataatttcgtcgcttcaggaggataaaggaacacacatcgttttgggtgtccggtaccaaatattgttcatttcaccctctgggttgtctttcaaaaggtgtcagagtgatggttctttttttccttcttcaatcactggtgatatatagttttgcaaactgagctaaaatgcacggccattccaatattccaattgttctgtatttatgtggactcacacgaggattttgaaagacttctactattgtggattaacacgaggattttgaaagattgttactatgcggattcacatgaggatttttaaaagaccgttcattttagaggttggaaaatgttttacgttcatgttcatccggcttcctcttgatatggccggtaaccacaatggagatcgtccaatcatcgtggaatccctgagaggtatgcaatgataagcctgttaggcgggagggcctgcctagctggtccaaggcagtcaacatcggtgcctaggcggtatggagaagatggcatcaaggcattgccgcaagtgcctaggcgatatggcggatgacaatgcaactaggcggtggccaggtgtgatatagaatcagatcttcgagctcacctgcacctgtgacccaaatcagaggtggctagggaatcattgagcacacggcaagctcacctgcacccgtgacccaaatcagagggaatcattgagcacacggcaacttgatctgcgccggtggggttcgcctctgcccatatcttctccccggaggtctgcacctcccttctcttcgagcattagcaggcagcagcagcagtgatcaaaggaatccacagtcgagcaagcaacattgctgacactggtggattgagcaagagcatgtgatttcaaagaaatatcaagctcggcactggtctgatcagtcaaaacaacacatctttatttctgcatcagaaatggctgctgtattcaaagaatcccagtatggtacatatttggaggccaatctaagtagttcgtgtggtaataaagattctcctcaggttcttcccaggttgcttttgttgggatcattacatccacactgtttctccggacaagattacatcctgttgatgaacaaaatgggaatctttatctggcatgaatatttctcgacttccagtgttctataaacagggagacaatttctttcatcctgcatgggctctcacttccaaattggatactaagatttccatattcctttattgaagctgttgtatggtcatgtgttgtatactacacggtaggctttgcaccaatggttgacaggtatacccaggacatgtacccttttgatcaatatgcctaactagctacatcttttgtatttgttcatgttgatctaacataccatgtgcagattcttttgtttcatgttgctgttattctctatacatcaaatggcattgggccttttcaggataatgggagctattgcacgagacatgaccatggcaatgtaaccttttcagccactcaccatgaagttccacaatgtgaactattatgtcaatttgccaaaggtgactcactcaaaaaatctagtactcttatttattgatcttacatgttacctcagctaaaactgtattttattaaaaaggaaatgcaagcaaaagttattcctgagaaaagactacagttgctgtgtgaagtgtgagtacaactccatcacaagtgtgagttcaactgacaactgagctctctgtattgtcgaccctaattcctttctcccaaccactagggccaaaattttgtgaacactctactgtagattgttgagccaactggtgtgtttactactcgagtgtgatttctatttatacatcatttcacctacatcagtattattttgcagagaatccactgaagagatatattgtgcacaatcagtaactcgcaactccaattgtgttaaactgctaatcacaattaacaacaacaagctagatggctctcgaggcgttacctgtagatctagatgctctctggtcggggccttcctgttgacctacggctcgttggcggcctccttcgctgcctccgccgccattcggccggccgccacctccttccgcttggcgaggcatctctgcgtatgctcgttctcccttgtggtagatcctttgtagaatcttccgcaggagcactgaaagctgtcctccgcagccttctgccctgccttgtccttgcggtcgctggcggcctgcgccttccacgctctggtggtcttcgccatcggagccggagggggacggggtcgtcggcggtggcggtggcggcggaagattagagcttagggaggggacaggaggaggaggcggcggcggaagggagggcagtggacaggggacgcgagatcgcttcgttgttttgtgggccggcagtactaggcctgctaatgggctgacatataacctaaatccaacccacccgaagttcaccacagttttacgccagtctatctaaggtcccctaactataataccagaaatgt

SEQ ID NO: 21932 - DNA, 2934 bp, Oryza sativa
  ref <308>: DATABASE ACCESSION NUMBER: AK072153
  ref <309>: DATABASE ENTRY DATE: 2001-12-06
ggcttgagtagacagccaccacccacagcgcacgctcgctctcgctcacgcacgcacgcacgcacccacccggagcgcgagaggacggcggcgagcggcgaggaggaggcggggaggtgggagcgagctcgctagcttaggcggagggcggcggcggcggcggcctgccgtcggcgaagcgtgccgggggcgttcgctgcctgctgccggagcgggggaagggaagtgtggtgcggcggcggcgcgctcgccagatctgcggacccgccggcggcgggccgccattcccgtcgctcagcattggatcaggatccggttatctaccgaaattgagcttgttgggttttgtagcagctcccctttgtaggggaggttactgcagtcttcaactctctgatttgttgttgctttctggtgccctcgagctagtgttcaagatgtcctttgtcgcctgatgattgctgctgtgacatctctctcgcaccctagcaccgcgtcatctgccaagtttgacgggcgcaggagcgaagagaggcgtaagaagggcctcattgttgcagctgcctctagtgcattgacctccattcctttgtcattgttagccatgtctcgcaacttggagagcccagttcagacccagatggcagtttcagccttgaaccgtgctctgagcagcgagtacccttcgaaaagtagaagtgagggcagagctagtgggtggaagcgtatttttgtccaaactggcaccggctgtgtactggctgttcaattagatcgaggtgacaatgcacacacagtcaaaagaaagctgcagcttgccctgaatgttccaacagaagagagttctctgacatttggtgatcgtgtgcttaagaatgatctcagcactatccggaatgattctccattgcttctgaccaagactttcatgcatcgaagctcctccaccccatgcttgtctcctactggcaaggatatccagcagcaaagggataggggtggtccaattgagttgttagtatgcccaagccgttgttctcggactaagcagcttgtgaaggatgttgctagggctataagaaatggtgtggatccaatacctgtcaatagtgggcttggtggtgcctactatttcagaaacagcaaaggtgagaatgctgccattgtgaagccaaatgacgaggagccatttgcacccaacaatccaaaaggttttacagggaaagcccttgggcagcctggccttaaaagatcggttcgagttggtgagactggttttagagaggttgctgcctaccttctggattatgataactctgctaatgttcccccaacggttcttgttaagatctctcatcctgtatttaatgtgaatgaatgcgtcagttcagccaacatgaaggcttctaaggactatccaggggctgtaagtaagattgcatcatttcagcagttcattcctcatgattttgatgccagtgaccatgggacttcaagctttcctgtctctgctgttcataggattggtattcttgacattagaattttcaacaccgataggcatgctggaaatcttctggtcaggaagcttactggaccaggaaaatttgggaatcggactgaactgatccctattgatcatggtctctgcctcccagagtgcttggaggatccttattttgaatggatccattggccacaggcgtccattccattctctgatgatgaacttgattacatagctaatcttgatccgatgaaagatgctgacatgcttcgtatggagcttcctatgatccatgaagcatgccttagagtgctaatactctccaccatatttctgaaagaagccacatcatttggtctttgccttgcagagattggtgagatgatgagcagggaatttaccgggatggaagatcagccaagtgagttagaggttgtctgtatggaagcaaggaggctggcaattgaacgtgaagagagctcccctgaaattgattctggtgatgaggatgcaattcaatttgaacttgattgtgaagatgatcatgaaatgctgaaagcacaaccagcctatcattttgaacttaaggggggaagctcaagaaacccactgtctaaactggatgaagccattgaagaagaggaagatgacattgaggaggaagaaagcaatgcagaaaagttaggttaccctaaagctatcaacaagtggcttcctaacatttccaagctatcaacctcactgaatggagtgcgtctcggcgacaaaatccagtgtcagctccccgctgctccaaagataatggatcctgtgaaaattttcgagggcaacagcaaccacagtggctcccaggttggcaactggaggagtgcagatgagcaacttccgacaagtgcgagcttcgtcaagctggccgacatgggatcggagacatgggcgctattcctcgagaagttccaggagctccttcccgaggcattccgctcgcgcaagtgcggcgctgcggggcaaagggcaaggcagaggcttggcacttcttgccagttttgagttagcgcaggagtaggggaggtgaagaatacttgtggtttggctgctgctgtttggttgtggctttcttgcaggtgttcgagctatgcagctgtagaataaaagccatccttttacaggcttgcaatagggtttgagcaacaactgctatcgcctgtgccagaggtccatgttgtgatgatggccttttttctgtacataatctttttattttcttcttttttttcttttctagttagacatgagttgcttgaaggaagttgggatgatcagcctgcccagtcattggccgcccagttcttccactcatgatatgcattcaaagatgtcattcaaataaaacattaaaaaaaaagggtttcctgatgtgatcattg

SEQ ID NO: 21933 - DNA, 2100 bp, Oryza sativa
  ref <308>: DATABASE ACCESSION NUMBER: AK072154
  ref <309>: DATABASE ENTRY DATE: 2001-12-06
gtgcggcttcctctcttctgcggccgcgcgcgatctccacacctcccctgcggaggcaaggaaggagaggcgcccctccacacgcggagcagaagagagccatgggcctccaggtcgcggccgtcgcgccatccccgtgcgcgcgctcctccgcctcgtcttcgccgccctcgacatcctcctcgcgtcccgccctcggcggtgcggggctcgcgagatcccgcgccccggttaattggggcgccggtgttatggcgcggcgccgcgggttgcggcagccggcgaggtgcgccctgagcgccagtttggatggcgtggggggcggggacgcggagttcttgcggcggatcgaggagctcgcggcggcggtgggtgtgcagcccacgggttgcgggtggccggcgagcgtggagcgcagcgcgagcagcgccgggatgcctctgtcgctccggatgctgaagcggaagaagcagcagcagcagctggtggcgcggcagacgcggtgggacgagcggctgctgggctccgccggcgactcggtggggcgcgccttctcgtcgatggtgctcatcgtgcgggagctgcagagcttcgcgctgcagcagatgcgggaggcaatgctgggcgacgacctgcagagcgtcctggcgcgagtccatggcgagatgcacgcctccttcgtctggctcttccagcacatcttcgccggcaccccggctctcatggtctccctcatgctcctcctcgccaacttcaccgtccactccatgggtcacagtgtcgccgccgccgcagccatccctcccgctccacctacctccgcggctgtcgcggtggtcgacacccagcacgccgacccatccctcccgcggttcgacgcggcctcggtcaagacgttctctattgggcgtgccgcctcggtcggcgggagcagcggcggtggcgggaaggttcggcccgtcgcgggcgccactggcgacgaccggtgggacgaatccctagctcggctgagcggtgtcgcgccgcagcaaccagcgccgccggcgggaacgggagctggtatggccgtggacgagcaggccatctgggaaaggatggtggcggaggcctcgaacatgcaggagaacgcgcgtgcagaggagctgagcgacccggacgtgctcggcaacctcgtcgcaccggtggaggcggagatcgagacggagggccacgctgagtacacgcggacggagcagcggtacgagctcgccgtgtccgaggagcccaataacccgctcatcctggccaacttcgcgcagttcctctacctcgtgcagaacgaccacgaccgggcggagcagtacttcgagagggcggtgcgcgcggagccggcggacgcggaggcgctgagccggtacgcgacgttcctgtggaaggcgaggaacgacctcgcggcggcggaggacacctaccaggaggccatcgcggccgaccccggcaacgcgcaccatgccgccgcctacgcgcatttcctctggaacaccggaggtgaggacacatgtttccccctcgattgacgcggccaccggcacaacaatggccactcgaaatcagacagaaaattaggaagcggaaaaaaaaaagaatctctattcaaagaagtccagttcgtgcagcatgcgcgggggcggccacgcggcgagacgcctagagcacacgacgacatgggcggcggagtggagctgacgcatgatgccttccgtttacttaggtaggttgagtagaggtgtgcgtgggcagtggagtgagttgtgagcttgtgagttgtgtgatacgggagagcgcgcggtgccgcttctcccgttccacaaatccggcgacgggagcatttcgccgggaatgaggaagaggacggatacggggatgcaagctcatttcccgacgatcttgtcggcaggggtacggtggcgtggatggatggatggtgtatagcaacttgcgtcctgtaattatgtagattgagcaaaaagaataatagtactaagtgaataaagaggtcatgttaatctcggtgtaatcctcctcggatctaatgcatttctgcttccagttggtacttcc

SEQ ID NO: 21934 - DNA, 3062 bp, Oryza sativa
  ref <308>: DATABASE ACCESSION NUMBER: AK072155
  ref <309>: DATABASE ENTRY DATE: 2001-12-06
gtggcggcagccaaccaaatccgcaccaaccacaccatgcctctcctcgcccgcgcgccaccgcctccaccaccgctccgccaccgcggccgcctcctcccgcgcttcacctcctcctccagtccccgccgccgccgccgcccacgcgccgcccgcgtccgcgcctccggctccgacccgccgccgcagcagcagcagcagcaggtcaacctctccgtcctccgcttcaccctcgggattcccgggctggacgagtcgtacctcccgcggtggataggcctcggcttcggcgccctcgtgctcctcaaccacctcctctccccgtcgcccacccccgcgcagctcgtcgaggtcggaggcactcgggctgtgcctggccgcgttctcggcgactctgccgtacctcgggaggttcctagagggtgctggtgctgctgaacgtgtgcccttgcctgaggggagcaggcaggtgtttgccatgtctgatagcctgtcagcagcacagaaggaggacatggcgtgggcttcgtacgtcctgctgcggaacacaaacaccacatctgtcgtacgttctttccggtcatacttgcttgaatttcgcttgatgggatgtgcagtgctgaccaaaatgtgatgtgttagcctgttaggtgctgtcatacttgcttgaatttcgcttgatgggatgtgctgaccaaaatgtgatgtgttagccttttaggtgctccttttccagctttcaaaaccaggtggttgaagtgtttgtttgtggtacttatgctccagtttcaagctactaaacagttaattttaatttccatggaaaaaaaatagatagcaacctttcatttgtttttccatgacaagcttaagacctggttgttccagcttgctgctatatgatgcttagaagaaaacatcggtacctagcttctagcttactatagaatatagacatgccctaggattgtgttgcagtgcagtaaatggttgatcttatttcttctatgggtgtacgaattggcaacaatacattgttctgtaattgtgtatctagactccatttgaatgtaggtactgatcctccatctccacactccatttcttatggattgctctgtaattttctttcatataaacgctagagtctagaccctccatatgttgtttgcttcttattggccctgtaaccacattgcaagtttgcaacaagaaaggtccaagatgaccagatattttttttccttgaataatagaggagagctgcatatcatttcattaagaagagagcataccgaaatgtttgtttttagaatataggtaacaggacctggctaggcttatatagaaagccatattggcagagtcagctggagttgccagcatacatttgcagcacaggtatctgaagaaagaaaaacctcaatcactggtcacagcctgaccatgaagtaccgaaaggtacaacacacaacaccatgtatacaccacaccttcctaacagaagaagtacttgtggtgttagctagcttgtacttcatcattcccatgatgactggatatattgtcctgtatatatgtagtgtatgagttaattttacaattaactcgtgtagacaccatcagttcttaaaagaggtgaagggtttgtttgatgtgaaaccacattattgttttgaacatcgttagggcatgtagaatacatttaacatcgttaatgttagagcattctctaacattaacgaagctagtagtagttaaaataattgagcagttatagggatagcaaagtttgcatgctatggaaatgtgaaatagtggatgatttttccatgtatggcagttttttagttcttgtgtcaaatctgtttggagcagttgtaactttttaactgatcagatgtcttacactcaccttagttttgattcttgctagctcatatcaattggcaatcagttgtgcatacgaggatattgggatccgcctgaagatatttccaaatatgccatgattgagtggttcaaaagtcagatgcaggaagctggaattgttgatttgagggaggatttgtacttccctaccttttctgacactcagcttgggaagcttctcccacaggggattctttctgtgctggcacaaccagttctaaacaaccctgatccaactaacagtgaaataaaagctgaaggtttcatcctactggcgtccaattcgagttacgcatacagcgagaaacatagggtttggattagaacagttgcgaataaatttcaatgtacataattcagagatactgaagttacagctaaaaggacataatgaacaatttgaggacaatcttcaataggagatggagacatcaggcgcatatggtgaatgcttgtgcttgtggagcacagagctgtcggttgacgccgcggcccaaaattttccccggcctttacaatggcgctaaccactctttgccagctgaagcttggtatagttaagagcaggtgatctcaacggtaactgatcgagtgagctcgcgctgcactgcaactgaaagcctggggattgttactgattggcgatggacctggagacagagacagtgacattcgcgtgcaacgtactactcctgcttaacctctggagtagggcatcatcaagcattaatcgcctcctttccaacacgtacaattacccccttggaaatcaatcagctggggcattcagatggataaaatcaagaattgtttggctgaggaatttcacgaagaacaccaaatgtttgtttggattaggagaagtacagtactacgcactatggagactttggacaggaaaacaaggttcgccttggaatggacggcactacggtctacgacaaatctggcgtggcaccatctccgatcagccatttctgaattcaaaaaacacatagccatatgtccgggtgtttttaaggttgtgtttggttcacactgaagtttgaaagtttggttaaaattggtacgatatgatagaaaagttgtgtgtatgaaaggtttgatgtgatggaaagttgaaagtttgg

SEQ ID NO: 21935 - DNA, 2176 bp, Oryza sativa
  ref <308>: DATABASE ACCESSION NUMBER: AK072156
  ref <309>: DATABASE ENTRY DATE: 2001-12-06
gtgtcgggcgcgcgcatacaccagcaaattgccaaatcctagcgtcgaaagcgcccccagaccacgagccagtcagagacggatctggccggccgatgcgcgcgtgaggcatcgtcagccagagccagctagtgtgtttgtgtgtgtcactgtggtggtgtgtggcctgtcacctcacctgatccaacacaagcgcgaggaggcgaaggcgatgctgcagcggttgggcatcgggggccgcgcggcggaggagaccgagccggcgcgcttcgccttcgccgacgccctcccggcatggccgcaaggtggtgggtttgcgacggggaggatctgcgtgggggagctggagctcgcggcggtcaccgcgttcgagaagatctgcgccctgtcggcgacgaagggcggcggcggcggcgtcacgttctacaggccggccggcgtgccgggggggttctccgtgctcggccattactgccagtccaacacacgcccgctccacggccacctgctcgtcgccaaggcggtggcgggcaagccggagtcggagtcgctgccgcctctccggccgccgcacgactacgagctcgtgtgcgcgttccgcgccgatggcgtcggggaggacaggaagtcttgccgtgggtacggccgcaccggcgcctacttctggcttcccgtgccgacggatgggtaccgggcgctcgggctgctcgtcacggctgagcccgacaagccgccgctcagggaggtggcgtgcgcccgcgcggacctcaccgacgagtgcgagccccacgggtcgctgctgcagctccagctcgtggggcaatcggcgtgctggtcgtcgtcgacggtcccagcggcgttcgccctgcgtggcatcaggccgacgcaccgggggatgtgggggcggggcatcggcgccgggacgttctgctgcggcgcggtggggctgtcgccgcgggagcagggcatggcgtgcctcaagaacgtggacctcgacctgtcggcgatgccgacgctggagcaggcgcacgcggtgatccgccactacggcccgacgctgtacttccaccccaaggaggtgtacctcccgtcgtccgtctcctggttcttcaagaacggcgccgcgctgtgcaagaaaggggaggacgccgccgtggagctcgacgttgaggggtcccacctcccgtgcggcgagtgcaacgacggcgagtactggatcggcctgccggacggcaagcgtggggagtccatcatctacggcgacatcgacagcgcggagctgtacgcgcacgtgaagccggcgatgggcgggacgtgcaccgacgtcgccatgtgggtgttctgcccgttcaatggcccggccaggttcaagttggggccgatcaccatcccgctcggcaagaccgggcagcacatcggcgactgggagcacttcacgctccgcgtcagcaacttcaccggcgagctcatggccgtctacttctcgcagcacagcggcgggcggtgggtggacgcgtccgcgctcgagtacaccgcggggaacaagccggcggtgtactcctcccggaacggccacgccagctacccgttcccgggcgtgtacctgcaggggtcggcggcgctcgggatcggcatccggaacgacgcggcgcggagcgagctggccgtggattccagcgccaagtacaggatcgtggcggcggagtacctcggcgagggcgccgtggaggagccgcggtggctcaacttcatgagggtgtgggggccgacggtggtgtacaagtcgaggcagaggatggagcggatgacgagcgcgatgcaccgccggctgaggagccccgcagagaggatgctgaacaagctgcccaacgagctgtccagggaggaggggccgacggggcccaaggagaagaacaactgggaaggggacgagcgatggtaggaggctgaggatttgtcatttgtgctttggtgtgtctgtttgtttcgttttggttcaggtgttttacggttactggagcagcttgtactgtgacagagatgtagtactacgtgattattattcatgattgagggaacagatttgctattgtttgtactttgtaggctattattatactgtccactactactacagtacgtgagaacaagggactacctacttgagtattttgcc

SEQ ID NO: 21936 - DNA, 2987 bp, Oryza sativa
  ref <308>: DATABASE ACCESSION NUMBER: AK072157
  ref <309>: DATABASE ENTRY DATE: 2001-12-06
gaattctcctcctcgtcgtcgtcctcctccgcctcctcaccacgcgcgacgcccgccgccaaccagttttggtcgcaggtggctgaggaagcagtcttcgggtggcctttgcgtggtttgcttcatcaatctctccatcctaaggtgagtgaaagactagtcccacctgattatttgtggcttttgatgatcaatctgggtagttgggaaatgtagctgctggaattgtagttactgagatggacatgagcagtttacttctgtgcggatttgcgtgtacttcaatttgctctgaaatgcttgaagaactatatgatttagcttattttagatctgtacctattattagatgctacactttacatggaaggaagactatctcgtgctatttttgtgcttgggatttatagttggctgtggtggagtacttgaatttttgaattatttgtgttcttatcatatacaaaatatatgactaaagtcaaagaaatgtacagatttaagacccaatttcctaacgataactgcatgtcacaactaaacctgtacatatttgtcaatatgctcacacacgccaattcaagggcccaatcccacacgtcacgtcgtaataaatgaattccatgcagtgatcccaccaaaatctttacccatagtccccaaactaaataacgtgttgccttacgttattatccatatcccgcaaacaaaatgacactttcctatattctgtcttcttccaacgcttaccagttacccctatacttggaagaaaggcatccctaaccgtaccaaagctctaacctctacttcatcactaaactccaaaactcaaggttcagagcaagctaagcctcaagttcactccatattggcccatttttatgcaagaggcctatgcagctatcatgcacagccaaggatggtattgatgaattacgttcatggggtgccagcaaaaggaaacgaataaatggaagggcgcatttaataaacacatagcaaaaccagatttaccaaactagatcaaagtcaaatgaataaaaacaaattagggattccgtaccaataacagacatcagttttcggtatctcttcacactgatctcgcttaggagaggaggagagtagtttgagaaggcagattgttatggtataaggcaggcatgcactgctgtgaacattgatgattcaggcagcagtgttgaatttgagggaggggatatgatggaagagatataagaacatgttggggatcaccagatgaggttgattgaattcttgcttatttcctcctctgcattggaactggatcaatttacaagggaattttgtttatccttgatttcttaccatgtataggaaatgatttctctttatgaggcccctaacaatggaaaattaaaggattgtctaaatgctcccaacagatatgcttggatgcaactacacaacatagtcctttagcaatcatctacgctgctggccctgccatttatgcaccacctcatgggccatagcatgacattctgctactgactttttgtatagtcactgcatatgaagttttccttagtgcataaatttctatatattaatcaccacttaagaactgtggatcatgtaagctttattcaactacctccgtcccaaatataacaacttccggctatgaatctagacaagcacatgtccaggttcatagctaaaaatgcttaaatttggggatggagggtaatacttaagcatggtacctggattttggattagtgggctcttacggtctaccatgatgatgtactgattactatgtctctgtttatccattaaagtttggttacttcatttcattttttttgtttcaaatacttgtatgtgctgataaggctttacttcaatttattatgtcattttttagcaacaaccagattttcatcttttgtctgtattagttcagtttaagtggtgactgttaattacagagcgagttgcttctcttggttatgtgtatttgaacgaaaaatttagctagtataatctttttctgagggagcagttttgggttgaaattggtcattgagaaaacattgcaactgtttgaaactttgaattcaattttactttctcctttctgatgacaccaaatgctgtagagctcttccgtactgaaggtgttgctagtgattcatatctctgacccatttggttcgaccaaacttccaaactgtcttttgcatggagtgaagacaggcattatgtaaatttgatgtgatgtttattagagagtatatgattcttataagaaattaatgtttgctcttaattttattttcaacttcccaagtgtacacatattattctgattctttactcacttgagttttttttttttcaaaccaggataggcaacagagtgctttgctaattgctatggaccggcaagtcaggggtgaccatgaagggatcaacgttgttgggtttgaagtgccaacatcaccagattcaagctacaacaaccctgttcctggaaatgaagatgaagctcgagagcccccattggttcctcctcatctgcagcatacattattgagcttcccaccgagccaagatgattcaagcagccttcctccacctcaaaacgtggtactcaaccacctctacatagagaaagagaactctagatccgtcgtcgccctggggattacccatcggttcagggcaaagtttgtgactgttgtgctgtacaagcccgtacaaaggcggtagggtgaaacattttgtgtacctgcattcctgcttccatttcctcgtgcagggactagacacccacgaggttgaactgccaaacaaatagaaaccctccttgttgtagtcctgaggaaacagaggaacaatctagctgcccatgaatctcaaatgattcaacccttgtacttaattggctgttggttgcggtgattggtggtggtccagttgaatgttggttt

SEQ ID NO: 21937 - DNA, 3051 bp, Oryza sativa
  ref <308>: DATABASE ACCESSION NUMBER: AK072158
  ref <309>: DATABASE ENTRY DATE: 2001-12-06
ggctcacctcccacgcccaccaccactcaccgcctccgctatatttcgcccccgcgcccctcgcctcctcgcctcgctctcgctcgccacccctcctcctcctctacttgcagcttcagctttcgcttcgctgccgctgcgggcgctgctctccgagtcccagcgggaggtggagatggtgggcgaatcggaggggaggccgctccgggttggcctcgtctgcggcgggccctccccggagaggggcatctccctcaactccgcgcgatccgtcctcgatcacattcagggggaggacttgctggtcacctgctactacatcgactgcggcatgaacgcctacgccatatcacctgcgcagctatattccaacaccccttcagattttgatttcaaacttgaaagtctagcccaaggattccaatccctatttgactttgcacaacatcttgccgcaaatgttgacattgtcttcccggtgatccatggcaaatttggtgaagatggtggtattcaggagcttttggagaaagcaaatgttccatttgttgggacaccctctaaaaattgcctccttgcttttgacaagtataatgcatcgcttgagctcaatgcacaaggctttttaacagtaccaaactttcttgtagagaaggacaaattagctaagtcgaaactggaggaatggtttcaaagcatcaatttggataaagaaaatggcaaagtagtggtcaaacctacaagtgctggatcgagtattggtgtagttgttgcttatggtgctaatgatgcagctgagaaagccgagggaataatttcagagggaattgacgacaaggttatcatagaagtttttcttgaagggggcactgagtttacagccattgttgttgatgttgggacagctaataacagtgagcctgttgttctccttcccacggaagttgagcttcaatcctccagtaatattgatattcaggaggatacaatatttaactaccgtcggaaataccttccaactcgacaggttgcttatcatacacctccacgatttccgtcagaggtgattgattgcatcagacaaggagtgtctattttatttcgttgtcttggcctgcgtgatttcgcgaggatagatggttggtttttacctactcccgttacctctctaccttcagctgaaaatactggtaaatttggaaataccaaatacggtgctgtcctttttactgacattaatttgatgactgggatggagcaaaccagctttttattccaacaatcttctaaggttggattctctcactctcgaatccttcgtacagttgttcagcatgcttgctcgcggtatccgtctcttgtaccatgcagtaatgcatggactgctttgtccagaaaaatacaagcagcaaaacaagcagaagcaatccaaaaaggtacatccaaaaaaaaaggtctttgtgatctttggtggtgacacttctgagcggcaagtctctcttatgagtggcacaaatgtctggcttaatttgcaaggttttgatgatcttgacgtgacaccttgtttgcttacatctggaaatggttattcttccttccacaaccaaaatatgaatggaatttcacgtgatgtatggacattgccatattcgttagtgctacgacataccattgaagaagttaatgccgcatgtattgaggcaattgatccagaacggatggaattaacatcccgtttacgtgaccaagtaatgaatgaacttggacagtcattaagcaaatatgattggtttgcgggctttgacattgccgataagcaacctatcaaatactctcttcaacaatggatcaatcatgttaaggaagctcaagccgtagtgtttatagcagtgcatggtggtattggagaagatggtactattcaatcgctgttgggatctgcaggagttccttacacagggcctggacaaatagcttctaggacatgcatggacaaagttgcaacttcacttgccgttagccatctggctagctatggagttcacaccataccaaaggatctgagagcaacagatgagatactaaagtcgtctcctgacgatatctggaatgacctgaaagcaaaactacaaactgaaacggtttgtgtgaaacctgctcgtgatggatgctcaactggtgtggcaggattgtgttgtccgaaggacttggaggtatatgcaaacgcattggagagaaaattacagcgcatgcctgctaactgtttatctagggcacatggtgtcattgagatgccagtctctcctccagagtcactgatatttgaaccttttattgaaaccgatgaaattatcatttcaaccaaatcagtggatgatagcacccgacatctggtatggaagggggaaaataaatggcttgaagtgactgttggtgtagttggcaaacgtggagaaatgctgtcactaaatccaagtatcacagtcaaagaaagtggtgacattttatctcttgaggagaaatttcaaggtggaactggaatcaacttgacaccacctccttcaacaattatgagcgaggaagccctgcagaagtgcaaaagttgtatcgaaactttggcaaacactctcggattggaaggcttttcaagaatagacgcatttgttaatgtccagaatggggagatactgctgatagaggtaaacactgttcctgggatgactccatccactgtactgattcaccaggcactgacggagaaaccacccatctatccccacaagtttttccggacgcttcttgatctggcgtttgcaagggcgaactagctaagctactactgtaactatgtttgtgatgtattttcatttcagtgcaaataaggtgcctaccatgcatgtatcgatctgtattactgtatgcaatatgcaactgccgatgtgatgtgatcagtactgtaccgtgttgaaggattaatttttttttaaacctaaggcggaactttgttccacttttatatttagaagaagagaattgacccagtttataagg

SEQ ID NO: 21938 - DNA, 3523 bp, Oryza sativa
  ref <308>: DATABASE ACCESSION NUMBER: AK072159
  ref <309>: DATABASE ENTRY DATE: 2001-12-06
gaaaaaagaaatctcccgtctcgttctcgttctcgttctcctccgctccttgcgccgccgccgagacgaggggagggccgggcggcgatctccatctggcgagcagagcagcggaggggaggggatcctgcaatgtattaccgcaggcaaaggaaggcttcttctgaggccaatgccaatgtgtttatgcctgggggtccaaatgatatctcatttcctgcatcaaatagggatcatgattggggatatggcggtgttggcaaagaatgggaagctagttatgctcgcaaactccagttgatgaattttctttcttcactgcatcaacgcactgcaaatcctttggtaaccactagaatggatgctaacatggacactcctttggagcaaaaactgaaggacagctcagcaataatagttcttgattccgatgatgaggacggatatacggaaggatgtgaacagctcacatctgagaacaataaacaacaggcaccatctggactcactagtccttacacgacatggattgtatccagtgcgaaagaccaagtaaatggaaccttgcatgttgatggagtccaaagcactcaaattgttccatattatggtcaaaatgcaccgttaataaatcagttccctttgcaaaccagctggcaaccatctatccaatatgaaagggttatattgcagaaaagacctgaggagcaacgcgttcaagatctggtggcagcaagccatgcagagaagatagcagaaacacaagttctccttactcttcctactcttcctaatgagagaaaacgaaggaaaacagaacccaccaccctggtagatgttgatggtggaactaacctaggaaaaagaaaaaggaaaaatcatcaaaatcaagcagcagttgattcaaacttggatttgcaacaaaatgatgttccttcacaaagctacaggactatgatagaagaggagaaacctgtaaaagaaagtgatggtctcgaggatctttggaaagatttttcattggctgctgaatgtacaaagcttgatacaaatgaagacatgtccaatgaaaaagatgtggatgatgaaaatgagatggatgacgactgcaatcatgacattcgaattcatgaagatctaggccacgtatgccgtatttgtggcatgattgttagaaaggctgaaacaataattgattatcagtggaaaaaggcttcaaggacaaggacaaattactatgaatcacgttcaaaggatgctgatgagattgatactggtgctgttaaagtttccgaagatttcattgtctctgatattgccattcatccaagacatgcgaagcaaatgagaccacatcagttggaaggattcagcttcctggtcaagaatctagtgggagacaaacctggaggttgcattctagctcatgctcctggttcagggaagacatttatgctcataagtttcattcaaagcttcttagcaaagtatccttctgcaaggccccttgtagtgcttccgaaagggattttaggtacttggaagagggagtttcagcggtggcaagtggaggacataccactatatgatttctattctgttaaggctgacaaaagagtagagcaactggaagtcctcaaatcttgggaagcccagatgagcatactatttcttggatacaagcagttctcacgaatcatctgtggtgatggagatggaaacattgcagctgcgtgtcgggacaggctgcttatggtacccaacctacttatactagacgagggtcatacaccaagaaatcgggagacagatgtactggcatcactaaaaagagtccaaacaccacgcaaagtggtcctgtctggtacacttttccagaaccacgtttcggaagtgtttaacatcttggaccttgtgcgccctaagtttctcaagatggaatcatcccgtcctattgctagacgtataatgagtcaggtagcaatatcaggtatcaggagtttaaaaggggttcatgacagtgcattcactgagtcagtggaagacaccctgctgaacgatgacaacttcactagaaaagcccatgttattagaagtcttagagaattaacaaaagatgtgcttcactattacaagggtgatatcttagatgaactacctggcctagtagattttagtgtgtttttgaaactcagtaccaagcagaaagaaattgttcacaagatagaagcctatgagaagttcaaaagaagtgcagtggggactgcattgtacattcatccctgcctgtcagaaatttcagagggtgatgctgcagatagggcgagcaacttgacagatgccactgttgacagcttgattgagtctatcatcattaaagatggggtgaaagccaagtttttctttaacattctgtctcttgctaactctgcaggagagaagttgcttgccttcagtcaatatatacttcccatgaaatttttggaaaggttgttggttaagaggctgggctggcatgtagggaaggagattttcatgatatctggtgatactagtgcagacgacagagaagtggcgatggatcagtttaacaactctgccgatgcaaaagttttgtttggttccatcaaggcctgtggagagggaatctcccttgttggtgcatctcgagtcatcattctagatgttcatttgaacccatctgtcacccgtcaagcaattggacgtgcattcaggcccggacagcagaagaaagtgtttgtgtacaggcttgttgctgctgattctccagaggtgaagttccatgaaactgcattcaagaaagaagttatcccaaagctatggtttgaatggagtgagctctgcactactgaagacttcaaactgaatcaagttgatattgatgactctgaagatgaacttttggaggctaatgctatccgccaggatatcaaggctttgtatagaaggtaacaagttgtatgtggctgctgtacaccatgtacataatgcaatgctgatctttctggctgatcatcgctgtgaagatgttacagtagccccttctaatgccggagttccgttcatgctaggatttatcgttaacctcggtcgtttccctacctatttgaaccactgtccgctttgttaacatgtgccagcttggcgcagcggttcgccagctgatcctagtcttatttttcttactgaagatctccaggactaataactatggtttctgccgttcccgcttgcggcaacaactgaaataatgccactgtttccttacctgtcttttgtgcacttcaattggtcttcaaatttgcccgttttgctagggtaaagatagtttatttctgcgcataacggaatgcaggttatccatcgtgcatttgtgcatctcttttatctcctttgttgctgtacctggtttttgtgtcgaccattctagtttcaattctggctcccatgaaagatgctttaagactcgcaatgccaggatgcatacttttttttttaatgc

SEQ ID NO: 21939 - DNA, 3041 bp, Oryza sativa
  ref <308>: DATABASE ACCESSION NUMBER: AK072160
  ref <309>: DATABASE ENTRY DATE: 2001-12-06
gtcctctcggctctcgccgcttcccctcagcaacgacagtgtgctgtgcgcccgcctgtgccttccgggctcgccgtcgtcgaccctcccgcacctcgcagccgccgcatttcatctggggagcgtcgggctgggggtgctttctcgttggggtggtgcgagaaggattggctgatggttcccccttcactttccttgctctcagatccgtgtgcccgcgtgacgtgatgcgagccactgggctgaccacgatgtgtttgtggaattgcctcgccgagggaggcggcggcatacaagtgtacaaggtggcatcatgttgaactctctcctttgctaccaatctggaacggcgatctgattgcaattaggtggtaaacaattcagatcaagattacagtcaccttccagaattagatctcagtgtcatgctcaatcagggtactcttcaccaatcacaagaccaactcctcatcaatcatacaagccctgtaaggtatcagtgtttactctcctgttctaattggcattctcaatctacaatttcagcatgattttatatgacaacaaataaataagggaccaccaatcgtatgcgtcaaagcattgaaatacttgacataacttgtttgtctggtagagttacagaaagggacctgaaggttcatttcccaaggagggaaaggtttacttttaccatgccatcacattttgaggtaccatatagaggagttttaactcatccaactctttctttctaggtcgtcggttattttttggtagttgaaccacattctcatggttcttgtggttttgctttgacacaatggatacagttctaggtgcagccccttgtcaaaaatccaatctcagtcactctagtttgtgattcttagtttaccaaagatgttttcatgtgttgtccttcttttctaacttaaaagggttttctggcatagtgaaggagtttcatcaggtctactgcagcaatcaaatacgtggatatcatgaatcaaaacgtctccgatgaccttgatgaatggtcaacagtattttcttgcacgatatcaacttagtgtaccctagccagcccctctgcaacaattaagcagcgaccagtgtgtggcaatattgaaactgtactttccagtagtatcgctgctgtttttttttttttttgcagctttcgtagtattttttgctttagaattatttagtgatgtattcttctaactagtatcagctggtgtatttcctcttttgcactattcccattatgatcgtgcagttttaaaaatgattttaacttgagttgtgggcatatgttgttacagaaaataattgtgttctttaccgatactgtcaaagaggaagactccatggacactcaacacataggaactatattgctttccaaaaacagtctggatggtagtgaccttgcatcatcatttagttttttttttaattttttctcaatctgagcatgcttcatacattatacttctttaggagtccgtctgactgtggtccaggtatcatcgatgtttatggtcgcgaggactgaggactatggtagagacttccaccgatcttgaaggcactctggaccaagtgtcaggaatattctctttgtgggttgatagggcgaaatggaccgttcaaggtatccctactcgtccaagggggaacaactataggaaaggatcctacagtgtatgttataataattctataatatacacggttacatgatggttactttgcttgtctggttgtaagcatcttgttttagttgattttagcagcatatctgcatgaagcatgatgcatagttgattacagcgttgaactttgtttcatcccattgtggcaaccagtttagactatacccttaactcttcatttctacttctacatgtcttctataatgcatatgaatgccctgatgatagcttaatatgttttgcttcttggaccagcactgtgcttttctctataaattattctattgctacagaggttctctaccctaccgatttgttggtagggcagagatatattaactcgtgtttggtttgctatcaatatgataccaaatttcatattatggtagagaaacttatttgtgccaaaatgagtatgggcattgctaactaattggcttcaaaccaaaccatcatatttactattcaacctcctaaaacattggtagggaaagttttggtatcaatccaaaacggccataatgggctaatgtaacccatctttttggaaaaccatttatgtgtttcttatatggtccacacgtctgtttcttagccagacattagctgtgttctgatagttttcttaaaaaaaattggggtaccttagccagtgacatgcataggctggttctgatagttttcttaaaaaaaaattgggggtggcaattcgagcactcaataatgtgtttacattttgttctgaacctgtaggctgtcgaggatccaattgttgctgctgggaacactgctgtgttcgtaagaaatcagattccttttgcagcgttgagaccctgagaaatgaatgcaaaaagggaataacctgcatgctcgaggagattcttgcaggacaggctgaggttgaatttttctgcaggcaatgagtcgcttgcagaagggttcagacttctcacttcagagaatccacatcttttctttcagactgaagagcttcggccttttggagtggttctgatgtcgatatccaggtaggcgtcgtagctacctcggagcatagcagagcagctttcagcaccttgtgtgactatcgactcgtggtcgtggaatccatccatccatactgtaggagattggtgaaaaagtgacgtgggtcacggagcagccgctgatggatatattggcaacatggcatctcctgtgcaacgtgaagtactgaaactatgtgttccatctcgagtttttggccatgttttagtggagggtttcgaaagctccggtaaacaaatgtcagatgaaataatctgcgttgatagatcc

SEQ ID NO: 21940 - DNA, 2716 bp, Oryza sativa
  ref <308>: DATABASE ACCESSION NUMBER: AK072161
  ref <309>: DATABASE ENTRY DATE: 2001-12-06
ggctcccttctcatccactgtcactgccactgctctctcgctggccaaaggagaaggagaagaagagaagagaagagaagagatggcagcgacctcatcatcatcctccccctgcatgattgcctcgctacgcagcagccatcgctgccgcctttcgccctccgccaccgccacgtcgccgccccgcctccgcacgcttcctccccgccgatgccgacgcaacccctcctcctcctcctcctcctcccgccaagcggcggcaatctccatggctcccgccaatcctcgccaccgcctcatcgccccgatccacgccgccgccgccgccggaggaggaggaggaggcgcgggcgccacctctccctcgggcctacccagcctcgtcgggatcgcgcacctgctggtgtcgctggggatcgtgctggcctccgacaagttcctgaagcaggcgttcgcggcggcgtccatcaagttccccagcgccctcttcggcatgttctgcgtcttctccgtcctcgtcgtcctcgacgccttcgcgcccgcgctcgccaaggggttcatggacttcttcgagccggccaccctcttcatccagaggtggctgcccctcttctacgtcccttccctggtcgtcctgccgctcgccgtcagggacgtcccggctgcttccggcctcaagatcttcctcatcatttgtatgcacatcactacgctcctatcgttgcatgcattctgctacttctttcttcctcctgatcatcgtgcttatctgctccgcctctgcttcctccggattttacattctactacttcgtatttgatatgctgatcaattaacttgcagtaaatattaccacaccaacttgcattgtggattggccccattcataaatcacaacaattttacttagagggtgtttagattcaggggtgtaaagttttaccgtgtcacatcggatattatatagggtgtcgtaatagggtgtttggatactaataaaaaaaactaattacagaatccggcagtaaactgcgagacgaatttattaagtctaattaatccgtcattagcaaatgtttactgtaaaaccacattatcaaatcatagagcaattagacttaaaagattcgtctcgcaaattagtggcaatctgtgcaattagttatttttttagcctatatttaatacttcgtgcaagtgttcaaacgttcgatgtgacagggtgtaaaattttagggtgggatctaaacatgcccttggtttcagattaatttgcattcaatctgaaaaaaccgatggtgtgatgttatctggttttcatttcccagttggtggctggtttgcttcactcatggtggccggatacacagcactcaccgtgaggaagattgtccagacacagcttataccagctgagccgatgagcaagccgtctccgttcgcgacgctggaattctgggcctggggtgctgtctttgtcgcatcgtttgctgttgcgtatgttaaccccacagcgcttggcaccacggcaagaacatgtcttcctttcctcctcgcttcaactgtactgggatacatggttggttctgggtaaatacatatgctttttgtatacacttaatctgtaagatctgacgaagccaccagctgccttgtttactccatttctctaacaacatacatgggtcttattgattacttggcaggataccatctggtgtcaagaaagtgcttcacccaatcatttgttgtgcactctctgcagatttggcagcaatagcatatgggtatctctcccggtctggagttgatgcagtgctaggtgattacctcacaaaggcgccatctaatcctggagctggtgacgtcctgatgggatttcttggttcagtcatcatatcgtttgcgttctcaatgttcaagcagagaaaggtagtgcttgctgctgtttctgcagaattattctcagttagcatgcatggttatggtgtgagatgattcatatatatcctgaggctctgtgtttgttgttgctggtgtgtgttggctaatcaactaataatgttttgcggtgggtaaaactcagcttgtgaagaggcatgcagcggaaattttcacatcaattgccatcgcatcaacattctcgttatactcaactgccatcctaggacgggtgatagggctagagccttcactgaccatatcaatattaccgaggtgcataaccgtggcgttggctctgagcatcgtgtctttctttgaaggtgtaaattcttcgctaaccgctgcggtcgtcgtcctcaccgggctgatcggcgcaaattttgtgcaagcagccatggacaagcttggcctcaacgaccccatcgcgcgaggaatagggacggcttccagtgctcatggactgggaacagcagcgctgtcggccaaggagcctgaagcgctgcccttctgcgccatcgcttacggcctgacggggatcttcggttcgctcatttgctcggttccggccgtcaggcagagcttagtgttcatagctggctgacaacacgcacggtacatcagttttgtttttgtttgttttttctttttcactttcttttgggtcgtcgtgcgtgtatagagcgatgctcgcaagattgcaagaatatatgtatacagacacattttttgtgattatgtctccgttgtaataagaagcaagagagtaatttt

SEQ ID NO: 21941 - DNA, 2711 bp, Oryza sativa
  ref <308>: DATABASE ACCESSION NUMBER: AK072162
  ref <309>: DATABASE ENTRY DATE: 2001-12-06
gagccgcaccgcacgctttcttgcataagaactcccccccctcctcgctccccgccgccgccgccgttttcttggagaggagaaatccgtaggctcagaggatttttggtagtcttgtttcgtgatattcgtgaagagggggggagctaaggggggattcgtaagatcagaattggatcacgcgggggcgcgctcgggatcgggggttccaaacacagcttcttcgttgaatttaagtggatgtactaatggagtcaaagggtggcaaaaagaagtctagcagtagtcgttccttgatgtatgaagctccccttggctacagcattgaggacgttcgacctgccggaggcgtgaagaagttccagtctgctgcttactccaactgcgcgaagaagccatcctgatagccctttcggcttctccatcctagtagtttaggatttcttgcaattccattttggcacttttcttctgacctatttctctggctgctgcttcctgataatcgaccagttctctagtcttgctccctgcactcctccctcctccatctccggcacagtgttctgaccaacctgctccaatgggtgtcttgtctgctgctgaccctcccccagtctcagcaattgggtttgagggctatgagaagcgccttgagatcactttctctgaggcacctgtctttgctgaccctgatggtcggggtttgcgcgccctctccagggcccagattgactctgttctggatcttgcacggtgcaccattgtgtccgagctgtccaacaaggactttgactcctatgtcctctctgggtccagcctgtttatctattctgataagattgtgattaagacctgtgggactacaaagctcctgctcacaattccaaggattcttgagcttgctgaagggctttctatgccacttgctgctgtgaagtactcccgcgggatgttcatcttccccagtgcacagcctgctccccacaggagcttctctgaggaagttgctgtcctcaaccgctactttggccatctgaaatctggtggtaatgcttatgtgattggagatccagcaaagcctggccagaagtggcatatctactatgctactcagcacccggagcaacctatggttacccttgaaatgtgcatgaccggactggacaaggagaaagcttcagtctttttcaagacttctgctgatggtcacacatcatgtgctaaggaaatgacaaaactctcgggcatctctgacattatcccagagatggagatctgtgactttgacttcgaaccctgcggctactccatgaatgcaatccatggctcagcgttttctaccattcatgtgacccctgaggatggcttcagctacgccagttatgaggtcgtgggcttcgacgcctctactcttgcttatggcgacctggtgaagagggtcctcaggtgctttggcccttcggagttctctgttgctgttaccatctttggtgggcatggtcatgctggaacatgggcaaaggagctcaatgctgatgcttacaaatgcaacaacatggtagagcaggagctgccctgtggtggcctcctcatctaccagagcttcgacgctactgaagacgtacctgttgctgttgggtcgcccaaatctgttctgcactgcttcgaggctgagaatatggtgaaccctgctcctgttaaggaaggtaaactgggcaatcttctcccctggggagaggatgcgttggaggagaatgatggagtgtttgatgagtaagatgggacttctggtgacgattcgctgctttgttttcattccgtggcatttttatctgttgaggttgtcgtttggttattctgtgaagcagccagccaggctattagtattttcgcttgtaagcatgtgttctgatcttgggacgtatgcttggtctaaataataatggtgaactaaaagctctaggtggtcagctgcgtctgccacaatgagcatgcgtcgggagaaatgttgtcaaaacatatgaataagtatttgcgggaaatttcctttgccttctgctaatgttccttccgatctcaattgttaaattttgttgctgctggtgtctaagaaagttctgcttgggacactagatagtatggagaaaacgattttcgaaagtttccactcttgttatctcaactctgtagagctccccctgttccatgggactgcaaatgcccatggcacaggtatatcttaaggtagtacattaatgaaaagtctgggagaatagcatgtgcaaaatgcttactagctcttataagttaaaaatagctggaagaactgcattctatagctttccccgtgttcatggttatcttctgcaagatatggctggacgaagtatatgccgcatgcttggctcttgccgccccattcgccttggcatggaccattgacttcgattttttttttggacatgtttatgtatttgcttattgtcctctactttacatgtaacagtaatttaaaggagtgctgcctgatctgataattgcgtttggaatcctttaatgagcttgatcttgtcgcgcttggaaagatgatgcagcgacctgttcggtaccctatgcttatcttctgacatccatatctgtattattgtttatgaagttgtacgctttgtacccaattatccatgaatatatatattttttctttctgg

SEQ ID NO: 21942 - DNA, 2102 bp, Oryza sativa
  ref <308>: DATABASE ACCESSION NUMBER: AK072163
  ref <309>: DATABASE ENTRY DATE: 2001-12-06
gtaactcaaactgcacttcccttttcagctcttctccaacctcaatttcaccccatttttccatatcctctctgcacacgtacgtacaggtaaacgtgcctgatcatggacatggactcgtcgccgtcgacacaggactgtggcggctggctgctgtacgtctccctcgctgccaaatgcggcggcgacccttgccgcgtcgtcggcttcgtcgccgttgccgtcgtcgccttcgccgtcacgtcgctcctgcactggctgtcgcccggtggcccggcgtgggggaggtattggtggaacaggaggggtggtctgggcattgctgccgccattcctgggccccgtgggttgcccgtgctcggcagcatgtcgctcatggcgggactcgcgcaccggaagctcgccgcggcggcggggggctcgccggcgaggcggcgcctcatggcgctgtctctcggggagacacgggtggtggtcaccgccgaccccggcgtcgcgcgggagctcctcgccagcgcggcgttcgccgaccggccggtgaaggagtccgcgtacgggatgctgttccaccgcgccatcgggttcgcgccctacggcacgtactggcgcgcgctccgccgcgtcgcgtccacgcacctcttctcgccgaggcaggtgtccgcctccgccgcgcagcgcgcggtgatcgcgcgccagatggtggaggccatgaggtccgccgccgccgccgccgccggtggcggcgtggcggcgaggccgttcctgaagcgcgcgtcgctgcacaacgtgatgtggtcggtgttcgggaggaagtacgagctggcggcgccggagagcgaggagacggcggagctgaggagcatggtggacgaaggctacgacctcctcggccagctcaactggtccgaccacctcccatggctcgcaccctttgacctcaagaagacgcggtcaaggtgctcgtcccttgtcccccgcgtcaaccgcttcgtcacccgcatcatcgacgagcaccgtgctcgcctcagcctcgccgtcgacgccgccgtcgacttcaccgacgtccttctctccctccacggcggcgacaagctctccgacgccgacatggtcgccgtcctctgggagatgatctttcgagggacggacacggtggcggtcctgatcgagtgggtggcggcgaggctggtgctgcaccaggacgtgcaggccagggtccatgacgagctggaccgagtggtcgggtcggaccgggcagtgaccgagtcggacgcgtccaagctggtctacctccaagcggtgatcaaagaggtcctgcgcctccacccgccgggcccactgctctcgtgggcacgcctcgccacgtcggatgtacacgtcggcgggttcctcataccctctgggaccaccgccatggtgaacatgtgggccataacccatgaccctgccgtttggcccgacccgaacgagttcaaaccagagaggttcgtcgcagggccctcgtcggaccaggccacggagtttccgataatgggatcggatctcaggctcgcgccgttcgggtcaggaaggcgaagctgccccggcaagtcgctcgccatcgccactgtcggattctgggttgccacgttgctacacgagttcgattggcttcccttgtcagataagtcgcgcggcgtcgatctgtcggaggtgctgaagctgtcgtgcgagatggcaaccccgctggaggcaaggctaaggccgcgacgcaaggtgtgatgacgtgtcaccaccgtcacgtgggactaagacgaggagagggaagccgacttccacttccttctagtgcttgttgagatgtgtaaatgtccctaaatgtaaagtgttacgctttgagtagaaatgcccctacgttgtagtgcgtagtattgtacacttgtagtatgtaatgcttgtatttttgtgtgttttgcacgtcctaagtagtggagtagtagctgataatagttagttaattactctgctatttagtcatagttaactacctacctgcaggtgatgagagtgacagtttttttttgtttaattaactgcaggtgatgagtgtagaatagctcggt

SEQ ID NO: 21943 - DNA, 2938 bp, Oryza sativa
  ref <308>: DATABASE ACCESSION NUMBER: AK072164
  ref <309>: DATABASE ENTRY DATE: 2001-12-06
cggaggcgagcagcttggcgctgaacagctcgccgtcttcctccgaggaagccggggccgcgtcggtgagaaatgttaatgctagaggtgactccgataagaggaagcgggtggtggtcattgatgatgatgatgtggaggatgacgagctggtggagaacggcggcgggtcactgagcttgagaattgggggtgatgctgttgcccatggagcaggggtgggtggtggtgctgatgaggaagacaggaatggcaaaaagatcagggtgcagggaggcagtcctagtggccccgcgtgccaggtggagggctgcactgcggaccttactggtgtgagggattaccatcgacgacacaaggtctgcgagatgcatgccaaggctaccactgctgtggttgggaacactgtccagcggttctgccaacaatgtagtagattccaccctcttcaagaatttgatgaagggaagcgaagttgccgccgacgtttagcaggccacaacagacgaaggagggagacccgccctgaagttgctgttggtggttctgcatttactgaggacaaaattagcagttatttattgttgggtctccttggagtatgcgccaatttgaatgctgacaatgctgagcatttaagaggtcaggagttgatatctggtcttttgagaaacctgggggcagttgccaaatcattggatccaaaagaactctgtaaactcttggaggcatgccaaagcatgcaagatggatcaaatgctgggacctctgaaacagctaatgctttggtaaatactgctgtagcagaggctgcagggccatctaactctaagatgccttttgtgaacggtgatcaatgtggcctggcatcatcatctgttgtaccagtacaatcaaagtctcccactgttgcaactcctgaccctccagcatgcaaatttaaagattttgatttgaatgacacttatggtggcatggaaggtttcgaggatgggtatgaaggttcacctacaccagctttcaagacaactgattctcccaattgtccatcatggatgcaccaagattctactcaaagcccaccacagactagtggcaattcagattcaacatcagctcagtcactgtcaagctcaaatggagatgctcagtgtcggactgataaaattgtcttcaagcttttcgagaaagttcctagtgatttacctccagttttgcgatcacagattcttggttggttgtccagtagccctactgatatagagagctatattagacctggttgtattattttaacagtatatcttcgcttagttgagtctgcatggaaagagctctctgataatatgagctcatacctggataagcttctgaatagttccaccggcaacttttgggcatctggtttggtatttgtaatggtacggcatcagatagctttcatgcataatggtcaacttatgttggacagaccacttgcaaacagtgctcatcattactgcaagattttatgtgtgagaccaattgctgctcctttttcaacaaaagtgaatttcagggtagaaggcttgaacctagtcagtgattcctcaaggctaatttgctcatttgaagggagttgtatattccaggaagacaccgataatatagttgatgacgttgagcatgatgatattgaatatctgaacttctgttgtcctctccctagttcaagagggagaggatttgtggaggttgaagatggtggatttagcaacggcttcttccctttcataattgctgagcaggacatatgctctgaggtctgtgagctggagagcatatttgagtcctccagtcatgaacaggcagatgatgacaatgccaggaaccaagctttagagtttctaaatgagctgggctggcttcttcatagagcaaacataatatctaaacaggataaggttcctctagcatcctttaacatatggagattcagaaatcttggtatatttgccatggagcgggaatggtgtgctgtgaccaaactgctgttagatttcttatttactggactcgttgatatcgggtcccagtctccagaagaggtggtgttgtcagaaaatctgctacatgctgccgtgcggatgaaatctgcccaaatggttaggtttctgctgggatacaagccaaatgaaagcctgaagagaactgcagagacattcctattcagacctgatgctcaaggcccttccaaatttacccccctccatatagcagctgccacagatgatgcagaggatgtattggatgcacttactaatgatcctggactggttgggatcaacacgtggagaaacgcgcgagacggcgcaggcttcaccccagaagactacgctcgccagaggggcaacgatgcttacctgaatatggtcgagaagaagatcaataagcatcttggcaaaggccatgttgtcctcggcgtccctagcagcatacaccctgtaataaccgatggtgtgaagcctggtgaagtcagcctggagatcggcatgaccgtgccgccgccagcaccgagctgcaacgcctgcagccgtcaggccctgatgtaccccaactcgacggcgaggaccttcctgtacaggccagcgatgctgaccgtgatgggcatcgccgtcatctgcgtctgcgtcggcctgctactccacacctgtccaaaggtttatgcagctcctacattcagatgggagctgttagaacgtggaccaatgtgaggaggagcttagaatggaataagtgtagttgtgttttacgtaagtcgagagcttagtgtgctggctaagatcaaaataacagtactatgtgaggaggatgatcctttgtatttaaagcaggatcgtttcgtttatataaaagcttacataccgtcattattaattattattgattagttattatt

SEQ ID NO: 21944 - DNA, 1806 bp, Oryza sativa
  ref <308>: DATABASE ACCESSION NUMBER: AK072165
  ref <309>: DATABASE ENTRY DATE: 2001-12-06
gccatctctttggacggagagggccaccggagacaggaaggcagaaagaaaaaatggcgataggatggcataggtcacagagcctggcgtctgcagggctcgggctgcacgtcctcctctgctcgtcgttgctgctcaacgccgtcttcatcgcgcaccaattcctcggggcctcaccgccggcaacgccggagcggctcggcgacgggctgagctgggcactgcaggcggccaaggaggccgaggacgtggccgccgtcgactgctccggccacgggagcgtgttcctggatggcgtcaccggcgaggacgggcggcccgggtgcgagtgcaacagctgcttctccggtccggactgctccgtccgaatccccaactgcgccgccgacggtcaaggcggggacccgttgttcctggagccgtattggaagcgccacgccgcggccagcgccgtggtgttctccgggtggcatcgcttgagctacatcaccaccgatggccacttaaagtccgttgagctcgatcgccagatccggcggctccacagggccgtcggcaacgcggtcgtcgacgacaagtacttggtcttcgggaccggctccacccacctgatcaacgcgctggtgtacgcgctctccccggaaggcaacgccgcctcgccgccggccagcgtcgtcgccaccgtgccgtatttcgcgatgtacaagtcacagaccgtcatgttcgacggccgggagtacagatgggacgggacaaccgctgcgtgggcaaacaacaacagctcacggaaccccaccaggggtttcattgagttcgtcacctcgccgaacaaccccgacagcacgttgcacgagcccatcctcgccggctcgtcggcgatcgtcgaccacgcgtactactggcctcacctgacgcacatcccggcgcccgccgacgaggacgtcatgctcttcaccacgtccaagctctccggccacgccggcagcagattcgggtgggcgctggtaagggacgagaaggtcgcgagcagggcgatatcctacatcgaggagagcaccgtgggcacgtcccgggagacccagctccgggtgctgaagatcctcaaggtgatactggccaacctgcacggcaaggaggacatcttcgccttcggctacgacgtgatgagcagccgatggcgaaggctcaacgccgtcgtgtcgcggtccacccggatctcgctgcagaagatgccaccgcagtactgcacttacttcaaccggatcaaagaaccatcgccagcctacgcttgggtgaaatgcgagtgggtggaagacgacgactgctacgagacgctgctggcggcggggatcaactcgcttaccggcactgttaacgaggccggcactcggtacacgcggctgagcctcatcaagacgcaggacgacttcgacatgctcctggagaggatcaccgaatttgtcgatgccgagaagcacggcagagctcccgctgcctccagctccatgtgaaaatcgtgaattgggaccgggacaaaagctttcgtctagctggcttcgatggccactgtgccggaacgatcagctgctagctgattgtaggcaataaatacaaggcaacgtggaaaatcaagactggaatgatcagctacgcgttaatcgttcattcgttcgctgtcgacctttcgacggacaggtgtaattatgtggatctacacaatcaattaggtggacactatgtgattatgtttgcagtgactaataattgagtatgtaaataaatgaagatcatacatgttactgattc

SEQ ID NO: 21945 - DNA, 4252 bp, Oryza sativa
  ref <308>: DATABASE ACCESSION NUMBER: AK072166
  ref <309>: DATABASE ENTRY DATE: 2001-12-06
accgagccgtttctctccctctctctctcctcctccttcccctgcgcctcctccaccgcccgtgtcgccgccgcgcgcgtctatcccctcgccgccgccgccgtctacgccgcgtgaggtcaggattggttgaaaggctgatcgagtgtagagactctgaagctcatatggttggcattggttgatatgatagcgtgtcacgttgtgagatgcagacccccgttatgggggttgattgaatgaagtggatagcactcttataactttcttgctcgaagtttcttgataccaaggcaagtagcttataagaagatttggactttggtggcataaatggatgaactaactggcggcttcaacgtggtgttgattacagtttcttgggcaggctcttgagctaccaagtatgtcagcttcaaatgagaagtggattgatgggctccagttctcatcactgttctggcccccaccacaggattcacaacaaaaacaggcacaaattctggcctatgttgagtactttggccagtttacagctgacagtgagcaattccctgaagatatagctcagctaattcaaagttgctatccatcaaaagaaaagcgccttgtagatgaagtattagcaacttttgttcttcatcatcctgagcatggccatgcagttgtgcatccgattctgtcacgcatcatagatgggacactcagttatgatagaaatggtttcccgttcatgtccttcatctctttatttagccatacttctgagaaagagtactcggagcagtgggccttggcctgtggagaaattcttagagttctaactcactacaacaggccaatcttcaaagttgatcaccaacatagtgaagcggaatgtagcagcacatctgatcaggcctcatcatgtgagtctatggagaaaagggctaacggttctccaagaaatgaacctgaccggaagccattgaggccactatctccttggatcacagacgtattgcttgctgcacctctgggtattagaagtgactattttagatggtgtggtggagtcatgggaaaatacgcagctggtggagaattgaagcctccaacaactgcttacagccgaggatctgggaagcacccacaacttatgccatccacgcccagatgggctgttgccaatggagctggagttatactaagtgtctgtgatgaggaagtagctcgttatgagacagcaaatttgactgcggcagctgttcctgcacttctattacctccaccgaccacaccattggacgaacatttggttgcggggctccctcctcttgaaccatatgctcgcttgtttcatagatactatgcaattgctactccaagtgctacccaaaggttgctttttggtcttctcgaggcaccaccatcatgggccccagatgcacttgatgcagcagtacagcttgttgaactccttagagcagcggaagattacgattgtggcatgcggcttccaaagaactggatgcatcttcatttcctgcgtgctattggaactgcaatgtcaatgagagctggtatcgctgctgatacgtctgctgctttacttttccgaatactctcccaaccgacattactttttcctccactgagacatgccgaaggagttgaactccatcatgagccactaggtggctatgtatcatcgtacaaaaggcagctggaagttcctgcatctgaagccactattgatgccactgcgcaaggcattgcttccatgctatgtgctcatggtcccgatgttgagtggagaatatgtaccatctgggaggctgcgtatggtttgctacctctgagttcatcagcagttgatttgcctgaaattgttgtagctgctccacttcagccacctactttgtcatggagcctatacttgccattgttgaaagtatttgagtatttacctcgtgggagtccatctgaagcatgccttatgagaatttttgtggcaacagttgaagctatactgagaagaacttttccatcagaaacctctgaacaatccaggaaaccaagaagtcaatctaagaaccttgctgttgctgaactccgaacaatgatacattcactctttgtggagtcctgtgcttcaatggaccttgcgtccagattactatttgtagtattaactgtttgcgtcagtcatcaagctttgcctgggggaagtaaaaggccaactggtagtgataatcattcctctgaggaggtcacaaatgattcgagattaaccaatggaagaaacagatgtaagaagagacaaggaccagttgctacattcgactcatacgttctagcagccgtttgtgccttatcttgtgagctccagctgttcccttttatttccaagaatgggaaccattcaaatctgaaggactccataaagatagtcatacctggaaaaaccactggtatcagtaacgagctacacaatagcattagctcagcgattcttcatactcgtagaatacttggcatcttggaagctctgttctccttgaagccatcatctgttggtacttcatggagttatagttcaaatgagattgttgcagcagctatggttgctgctcatgtttctgagttatttcgtcgatccaggccatgcttaaatgcactgtctgcgctgaagcaatgcaagtgggatgctgagatttctaccagggcatcatccctttaccatttgattgacttgcatggtaaaacagtgacctccattgtgaacaaagctgagcctctagaagctcacctgacccttacaccagtaaaaaaggatgaacctcccattgaggaaaagaacattaactcatcagatggtggtgcattggaaaaaaaggatgcttcaagatcacacaggaaaaatggttttgcaagaccactcttgaaatgtgcagaagatgttatactaaatggtgatgtcgcaagtacttctgggaaagccattgcaagtttacaggtggaagcttctgatttggcaaacttcctcaccatggaccgaaatgggggttacagaggttctcaaactctcctaagatctgtactgtcagagaagcaggagctatgcttctctgttgtctcattgctctggcagaagctcattgcatctcccgaaatgcagatgtctgcagaaagtacatcagctcatcagggttggagaaaggttgtggatgcgctttgtgacattgtttcagcctcaccgaccaaggcttcagctgctatcgttctgcaggccgagaaggacttgcagccctggattgctcgagatgatgagcaaggtcagaagatgtggagagtcaaccagcgaatagttaagctgatagcagagcttatgaggaaccacgatagcccagaagcattggtgatccttgctagtgcttcagatcttcttcttcgagcaactgatggaatgcttgttgatggtgaagcttgtactttaccacaattagagctattggaagtaaccgccagagcagtccatctcatcgtcgaatggggagattcaggtgtatccgtcgctgatggcctctccaatctgctgaagtgccgtctatcaaccaccatccgctgtctttcgcaccccagcgcgcatgtccgtgcactcagcatgtccgtccttcgcgacatcttgaacagcggacaaataaactccagtaagctcatccaaggggaacaccggaatggcatccagagcccaacctaccagtgcttggcagcaagcatcatcaactggcaagccgatgtggagagatgcatagagtgggaagcccacagccgccgcgccaccgggctgacgctcgccttcctcaccgcggcggcgaaggagctcggctgcccactcacttgctgacaaggccacaccatgactgtcactgcaagcagctgctgtaggatcagcgagtaggaaaggatgacttgccggccagtttcctgagatgtgatttaagactgatattagctgatgttcccaagcatgatacggggcttgctcccaagatgtgatttttactttacttttggttaatgtgctaccgctgacattagatgttcaagcatatgaaaactgcttgtgctgtaacttgtatgtctgtaacgtaaaaatctttccatatggtaaccggggaagcagaggtatatccttttctgctgttgtatctatttccagtttcctgctgaacttgcaaatgaatattcagcaatttccgttttgctc

SEQ ID NO: 21946 - DNA, 3068 bp, Oryza sativa
  ref <308>: DATABASE ACCESSION NUMBER: AK072167
  ref <309>: DATABASE ENTRY DATE: 2001-12-06
gcagcccttcttctttcttttttccccctcgccataggcgccctgtgctttgctcgctcgctgcttttctctttcttaaaaggctgctccctcactcacaactccctctctctctctctctctctctctctctctctctctcctcacctcttcttgttcttcttctctctctcttgtcactcatcatcatcactcttcagcttgcttggttggttggtggagcttgggagttgaggtcaaatagccatcgatacacactcctctttcttttctctcttcatttctttctttacatcgtctctttcttgatttcccaatctactaagctcctactagctctgtgctctgctgcttcctcccatccatggcggcggttgccagcgacccacctacctacaagtagcttaagctcaagctcagctcagatcggagaggggtggtagaggtagtagcagtagttgagagagagagtgaggatggagagcagatggaggaaggccaagatgtcgctggggctcaacctctgcgtctacgtgcccaggacgctggacgacggcgactcgccgtccaccgggtcgtccacggcggcgctggtgtcgccggtggcgtcctcgtcgtcggcggcgaccagcgccaacaccacgcccacggcggagcagagggtcaagggcgccggcgcgctcatgccgaccaccccgacgccgacctccgccggacttcgcctctccaaatccggcagcaaatccttcaagaaaacatgtgcgatatgtttgaccacaatgaagcctggtcagggccatgctctattcacagcagagtgctcacatacctttcacttccattgtatagctgcaaatgttaagcatggaagcaacaattgcccagtttgccgcaccaagtggaaggaactcccatttcgaggtcccttgcctggtgaatttcctcaaggaagtgcaaggattaatccagttaatgggcaccaaaatggcgggcagatgaccatactgcgaccacttccccgtgctcgttcttctggtcggctgcatcatatgacatcgttgttgcctgacactgaccgtagtatttttaacgatgatgaacccttggactcactgtctgaagcaaatgaaggctcgcagcaggggtgtttaagaacagtggaaataaagacatatcctgagttcactgaagttccagaaagtacttcagaaagaaattttacagtcctagttcatctaaaggcaccccttgctcagactttgcaaacaagcagcaaacttgaagatggcaatagcttgggcacaactcgagcccctgttgatctcatcacagtgcttgatgtcagtgggagcatggctggtaccaaacttgcattgctgaaaagagccatgggatttgtcattcagaaccttggctcctcagatcggctttctgtaattgccttctcatcatctgcacgtagactcttccccctccgtcggatgactgagactggtcgtcagcaaagcttgcaagctgtttattcactgacatcaaatggtgggaccaatattgctgagggcctgaggaaaggctccaaagtgattgaagatcgacaggccaagaatccagtgtgcagcatcatcctactatcagatgggcaagatacatatacagtctcaccaaccgctggtgtacacaaagcagcaccagagtactgctcactcctgccatatactagtaatggttgtcaacaggtaccagttcatgtctttggatttggtgctgaccatgattcagtctcgctgcattcaatctcacaaacctccgggggcaccttttcattcatagagacagaggctgccatccaagatgcatttgcccagtgtattggtggactcttgagtgttgttgcacaggatttgcatgtaaaggtggagagcctccaccctgatgtacactttggctcgatcagatcaggaagctattctagcagacttgcagatgacaagaggaatggctccatagatgttggtgacatgtatgccgaagaggagagggatttccttatgtcagtaaatgttcccccaggttacggtgaaacagcacttctcaaagttggctgtgtctacaaagatccactgatgaaggagactatcaatatggctgatgtgcaagtcaagatctctagaccagcattcgtctcagtacaaagcgtgtcaatcgaggtggaccgacaaaagaaccgtcttcatgcagctgaagtcatggctgaagcaaggttgtctgccgagcgtggtgacctgacacatgctgtttccttactcgaagactgccggaggatgatcatggggtcaacatcaggacaatccggtgatcggttgtgccaagcattggatgctgagctgaaggagatgcaagaaaggatggccaatcgccaaaggtacgaagcatcaggccgcgcctatgtcctctccggcttgagctcacactcatggcagagagcaactgcgcgaggtgactccacagacagcgagagcctaatccaggcctaccagacttcatccatggtcgacatgctgctgcgctcgcagacaatgagccgctcctcaacccctccacagatgaggcatgtgaagtcgtttccagcgcgcccgcagcctaggtaactgcaatttctagtgtttggcaacgccaataaggatgggttttgctaaagcctagatgtgaatttggtgaaagtagtagtgtcagttgaattcttggttttgtggcgggaggacgggacgggggtatagtttgtgtggtataagggggattttaacggtgtaaattaatttgggtgtggtgggggtaaaagggaaaaagaatctgtatttgggagaaggatggtataagagttggggaaatggggtaagatagggtggctattattttttttttccttcttgttggttacctggtatactcccagtattgtactagtagctctcctctctcatttgtgtggtgatgtacataaagagaagggtatacatttgtgaactggaatgtggttgaggatggggatggatacctaatccttttgc

SEQ ID NO: 21947 - DNA, 2163 bp, Oryza sativa
  ref <308>: DATABASE ACCESSION NUMBER: AK072168
  ref <309>: DATABASE ENTRY DATE: 2001-12-06
gagaagcttcctccaactccggccgccaccgacccccctcgacacccgactccctccataaatttccccccctcccgcggccgccgggagatcatcgccgacgacaaccagagcagaggagaggggaggggaacccaagcaagcaatcagcgtggaatcggatcgggtacgaggaggaggaggaggagggggatggatttcgagctgcgcaaggcgcgggagaagctggagcgggagcagcgggagcgcgtgcagcgcgccaaggacaaggccgaccgcgagcgccgcgccaaggccgaggccgcgcgccgccgcgacgcgctcgaggcgtcccaccgcgagcgccgcctcgacgccgcccgcgcgcaggaagaggctcagcagaagatggaagaggtgatgcaacttggaaaggggatttctttcttgcacatgtttgtagctcttcgatatgatggtcctggggataagatcaagttgccaccatcgtcttttaaggaattgtctgatgaaggagcactggacaaaggtcccatgtacttcaggttgtcaaaggttagagacagtgttccgggtgcccctcaggataatgatgccgatgaggcaacatgttgtggtgttcttgagttcactgcaagggaaggctccgcagaactcactccacatgtgtggaacaatctgttccggggtgatagcccagatgttcctctgattgaggttaggtatgtcagtttacccaaagggacatatgcgaagctgaagccagaaggagtggagttctcagaccttcctaaccatagggctgtccttgaaacggcactccgcaatcatgcaacactatctgaaaatgattttgttgtggtgaattatgggcagctgcaatacaagttgaaggttcttgaattaaaacctgcatcaagtgtttctgtcctggagacagatgtggaagttgacattgaaggaccagattcagttttggacaacgtagagaatcaacatgtgcttgtgccacttgagactggaaaggttgaatctggagttgtggaagaaggaaagtttaggtactacaaatttcttgttgatgaaggtatgggtgagaaagtagcttctaggcatgcaaatattgaggttaagatagagacatatacaagtggtggtgacactgatatttatgtatcaaggcatcctttagttttcccaactcagcaccgtcacgaatggtcttctcatgaaatgggatctaaggtcctcatactgaaaccaagggatgccagtctctccagtggtacctacagtattggagtttatggtttcaagggaaccactaaataccaactttctgtagctattaaagatgttcttaatggccaaaggattggtgagcaggctagtgcctcatctagtgttgatgttgattcagtggtgtgcaagaactgcaaacgctatatatccaaccgaacttcactacttcatgaagcatactgtgtgagacacaatgttgtttgcatgcatgatgggtgtggtgttgttcttcgaaaggaggaagcaacagatcacgtgcattgcaacaagtgtgggcaagctttccagcagagagaaatggagaagcacatgaaagttttccatgagccactacaatgcccttgtggggtggtccttgaaaaggaagatatggttcaacaccaatcctcaacctgccctttgcgcttgattgtgtgccgattttgtggtgacactgttcaagctggtggagaaccacttgatgctcgggatcggcttcgcaacatgtgtgagcacgagagtatctgtggatccaggactgcaccatgtgattcttgtggacggtcagtcatgctgaaggacatggacattcatgtgattgctgtgcatcagaagagctaactattgtaaagcattggctctgagaaagatggcctgtcctttatcctgctgggctttaaccaccaaggccatgaagtttcagcactgctggaccaaatgttatttccttttgtgttacatatatcttgtgtcattggttaaattgtaacactgcgtatgggagcttggaacactggggcggtgtatgggagtatggaacacagtggcggtgtctccttatgtatacacaaaccatctataatatttgatttgagctttctc

SEQ ID NO: 21948 - DNA, 3311 bp, Oryza sativa
  ref <308>: DATABASE ACCESSION NUMBER: AK072169
  ref <309>: DATABASE ENTRY DATE: 2001-12-06
gatatacaacggaagcaggacttcgctgctgaccatatgacgacctcggcgataagactgcaatcccttctctcaaccttgttgctagtgttcctgcttctcaccggcagcaacctcctcctttcaagatcagcttctacgcaccgaccaagcccttgtaccttggaccccaccaatccatctcccatctgtcctggtcaagctccttccccgtattgtccccaaccgccatgtcacaacatgaatcacgcgccagccacggagcaacagggtgcacatttgccttaagtagcagatggtaaagggagcgaggtgaaaaacgtatatatattcagggaaaatttcaaaccaccccaaaagtcatttaacgtttgatgtttcaccctataagtaattttgttggaaaagcctcccaccacccagttttgttgcaacaatctttcaatacaaacgtgattaatcaaatcagcccgttatcactgatattgtgccaccatatgctaaactagccgagttaatcttgtctaggtgcttatattagaccactctttatgtttcactgtattgattttgttaatagctaaactcagtgcaataacgtttaagatctgatccgcaattatgtttgtgggaatctttaaaactttttaattttgacagctccttgtttatgaaaacatgttgatttggtcaaacacgtacgtactgggatggttttctggacacaacagtaggattttaggagggtagaaatttatagcaacataatttatgggatggaatatcaaatttcaagtgttttatactgtggtttttgtaaatttccgtatattttagttcgtgtcatcttttaactcgtcccacatctgtgatcgtctagaactatagtatgtagtagtatgtaataacttatgatgtattcctactaaggaaataatatttccattgcctgcctgctaatgcttttcaaataatcaatatatctatctatctatctatctatctatctattatatacatactaaaagtccattaaacttcctacaaacgctctcaagccgccacgtgaaactcctacaaacgctcctaggtcgccaagtggctctatctaatctaaccgtcgattttaacttaaattggtggacccaatattttagaccattagattagatttttacttaaatcggtggacccggtattttagacaattagattagatgtattttattttattttaaagaaactaattccttactctattacgtacgtatatgggagaaacacaactgaagtaaccaataaagcctacctattgttcgcgtcaaaagaaaaaaaagctgcgcacagaattactataaaatcaataagaaaaaaaaaccatacgtacttagcaccatgggaaaaaaattgatgatatttaaaataggattttctatcatttaaagataaaatattttactctataaatttacgtaaatatcaccgttgattttcatttaaattggcggacccgatcgatgttttagaacattagattagatgtatccattatgtatacttcctaaaaatgctcctaatccgccatatgacatcctgcaaacgttcctatgtttccatgtgatgctctaataaattagtaaaattctactttgtctctctgtcctttaaaaaaaagttttgtttcggtatcaaattttgctccataaagagtgtaatttttggttacaaagaaactttttaatgctgcttcgtcgatttctacttcatttaagcacaaaactaataacagtagctccttctccgatgcttgttttcacctctccttattctatatgaagggtacaagtaattgtaattatttaccttttgtttaacttgtctttaactaactaaaataatatttttttagaaatgaagagagtattaagaaagatattaaaacactactatgatttcattaatatggagaaaataaggtgggagaaataaggaggcatctggttcaatggctaaaaacaacaaagaaaaggatgtaatagcactattgaattagatttagcgtatcattataaaactacacaatcaattttagggtccaattcttaaactaaaactacacttttatatggacagacggagtagaaaaaatagaaattaattttgagtcctccgtatataagacgtggggatgcgtgcccatgggtgaaatagcttctctccctctaggccttcgaagcgcaggggatggtagctccggtcaaattaatgtcgacaagcctacaagattgctctatgtcatcccgcctgtcgctggtcatcgtcctgcttgttatcgtcggcagcacggccagcaccgttcctcctgttgccagttcaatggagaactctccttccggatatactctataagtacatacaagaactgaaagtaataaaaattcaaccagcatttgctgacttgtcatgagtcagggccaaagccaagtggtgtccatctggctccatcacgctgtccatgggccatttcttacagtacaaattaaggtggcttcatctcatctgtagaaaaatatgcaatgacacacatttggccaactccactcaacatagttttgttgcgactacactaaggaagttgacaaagtgaatcaaagatatagcttgacgttacaccgagatgacctggtgaagtaggttgcaagctgcacagtatcatgcatctagggctcgcagatctcgatcatgggtgaagataagacatggacatcgagacagtttcgcctctgtacgagaacatcaccgaaacatagaagaagtttgatacaaaccactgaatgaaagaagatgcagttatttcagcaattcagctgccgcgcctccaatctctgctcatccaaaatgttagtagcagagagtttgcgagaaagctggttatgcacggtcttctccattacacgaaatgcagtcctcggtaacgtgcgaatcgcacgcattgagaggcagaagaaccatccggtcgtcgtgatggggatatctccgtgctactgcattgcttttttctctgcaagccccgaagcaaagttaaaatctcgagctacatatgtcggacaatcctgttgcctcccaatccaaattttactttggttttcgctcttgtttggatggatcttaatgtcgactcatcactcatgcatcgctcatcctcctggcctttgatatatatccatgggaactactagagaaaggctttgtagtctcgcttgggaacctcctgactacgaatccgggactaaagatgaacatttattccc

SEQ ID NO: 21949 - DNA, 2362 bp, Oryza sativa
  ref <308>: DATABASE ACCESSION NUMBER: AK072170
  ref <309>: DATABASE ENTRY DATE: 2001-12-06
ggtggttcgctctcttcatctctccaaagtccactccaccctccgcttgcacggatgcaaacaagaatctgccggcaaccttaaccaccctctccttccttgttgtctcgttgatatcttctttctctcctccgatgcgatgcatcctgctttgctactgctccccctcgcctccttgctgcatgccgcggcagcaattggccacaacgagaccagcaccagtggcaacacaagctgcacgccggcgagatgcgggaacctgaccatcagttaccccttctcgctcagcggcgtgcagccggtgtcctgcggctacccggtgttggacctcacctgtgacaaccgaaccggccgcgcgttcctcagcaggacgttcagggaccacctgtttcgcgtggacagtattttctacgagaataactcgctggtggcggccgtagagaccaccttcgccggcgacgccgactgccccgtcccggatttcaacgtgacatccagcctcagtccctacccgttcatcatcagcaacaccaacaagtatctcgcattcatctatgactgctcgattcctgaacacgttgggcagctgcaacggccatgtggaaaccggacgatgggagcttacatctccgacaagtggaacagcacaccaccgtccggggttcgagggaactgcaactctgtcagcgtgccggtgcgtgggtactatgatggaatgaagccggtgagtggacactacgagcaattgatcaaagatgggttcgtcttggaatggatgaggtcggtaatgggagatcaagactgcgatgggtgcagaaggagaggcggggagtgcaggttcgaacagctttcgttccagtgcttctgccccgacgggttgctctgctccaattcaacccgtaccaacacaacgtcaagccatccatcaggcaaggttaatcgaggaatcaagattgccgcaggaaccgcagcggctgttgtatgtctcggtatacttggcgttggctccactgtgttgtatacccggaggaagaggaaaagatctgcatcctttgaaggtctcatccatggagggacgccattgccatcactcacgaaagaattcagcctcgccggcttggcatatacccacatcttcacctacgaggagctcgacgaggctaccgacggcttcagcgacgcccgggagctcggcgtcggcggcttcggcacagtgtacaaagggatactccggaatggggacacggtggcggtgaagcggctgtacaagaacagctacaagagcgtggagcaattccagaacgaggtgggcatcctgtcgcggctgcgccacccaaacctcgtcacgctcttcggctgcacgtcgcagaccaacagccgcgacctgctcctcgtctacgagttcgtccccaacggcacgctcgccgaccacctgcacggcggcgcggcggcgcggtcgtcctccctcgactggccgacgcggctcggcatcgccgtcgagacggccagcgcgctggagtacctccacacggtggagccgcaggtggtgcaccgcgacgtgaagacgaacaacatcctcctcgacgaagggttccacgtgaaggtggccgacttcggcctctcccggctgttcccggcggacgccacgcacgtgtccacggcgccgcagggcacgccggggtacctcgacccgatgtaccaccagtgctaccagctgacggacaagagcgacgtgtacagcttcggcgtggtgctcgtcgagctcatctcctccaagccggcggtggacatgaaccggcgcggcggcgacgtcaacctggccaacatggccgtgcacatgatccagagctacgagatggagcagctggtggacccgcagctcgggtacgcgtcggacggcgagacgaggaggacggtcgatctcgtcgccgaggtggcgttccggtgcttgcagccggagcaggacgtgaggccgccgatcggtgaggtgttggacgcgctgagagaagctcagcggatggacaaggtaggctacgtcaaggacgacgccgggctggtcaagaagagccgagacggctctccggactgcgtcatgtaccagtggattagcccatccaccacttccaataacagcagctgagacttgacaagatgttcagaaaatactggctactgactgcagacaccgtaaatattcagagttgtgtgctattgtttgtcagagaaagagaggtttcccatgaaaagaaaaaagacatagaggtttatgtgtctttggctgtaactgagttaacttgttggccagtggtttggctactttggcacattcagaaaagcagtttgatgatctgttagagaagtt

SEQ ID NO: 21950 - DNA, 2808 bp, Oryza sativa
  ref <308>: DATABASE ACCESSION NUMBER: AK072171
  ref <309>: DATABASE ENTRY DATE: 2001-12-06
ggacctcgcggttttaaataggcgaggtaaaggaggaagagtaggaggaggaatccagcgggtcgggtctcgtgtatcgcgccgcctcgcttccttccggccgcggctcgtcacgcttctcggcctcctccgggaggaagacagtgagataagcagagagattgaggcgcagaagcatcggcattgagccgaatggtgtagagagctccagggatggatcgccggagctggctatggcggcggagatcgacggagaagagcccggccgagaccgagagctcggtttcttctccatccgagaggctgtctgatgaacaggatactccaaagagttctccaagctcagttcaatcaccggagatctcgtcgaaggaagcgcaggatgacaatgtgaaggtgaaggtgttgagcgagagactgtcatctgcagttttggacatacgtgcaaaagatgatcttgtgaagcagcattcaaaagttgcggaggaagctgttctaggatgggagaaggccgagaaagagatagcatcactgaagacccagctgaacgctgcaactgccaagaactcaacactggaagacagaatcgttcacctcgacggcgccctcaaggaatgcgtcaggcaactccggcgtgccaaggaagagctggatcatggcatccaggacgcgctagcgcagcagtcgcgagaatgggagtcggagaaggccgacctcgagctgcgagtagtcgagctgaaggcgaagctggaggcgaagtccgagttctcggtgaacgctgaaactgatgcgagctcaaggctggcctccttggagaaggagaactctgctctcaaggttcagctgctggccatgtcggaggaggtggagctcaggaccatcgagaaggagctgaacaggagggcagcagagacggccagcaagcagcagcttgagagcatcaagaagatagccaagctcgaagccgaatgcagaaggctgcaggccaatgcacggagagaactcaagcgtgcaccaagctcggtctacgccgagtcagtcaccgattgccagtcagactgctcggactcatgggcctcgattctgatcaccgagctcgatcaattcaagaacgacaagagcatcacgaggagtgcgagcctcgcggctgcagacatcggcatgatggatgacttcctggagatggagaagatcgcgtcggcgaatagcccatccaagagcgaggccgaggacgccgctagcgtccagctggtgaagctcgaggagaagatcaagaggctggcaatggagaaggcggacagggagaaggcgctgcacgaagctcagcgagagctcaggaacacccggcatcgggcgatggtggcagaggagaaatcggtcgaattgcagaggcaactgaaccttgtcaagggagtgaaacattccatggaaaccgaaatggaagccatggagaacaggaggaatgaactggaggggagaattgagctcgcccatggcgagatcacgagcttgctcgacaagggccgcattctggaggaacgtctcgagtccgaaaaggcgctgacgctggagctggctgctaagtatcagcagatggatgcactagaggcagagaggagagagctgcgtggtcacctggaagcatcacaatctgaagccaaaaatctcggtgataagatcactcttctagagaagaagctggaggaggagaaggcgttttcaacccggctcgcagtgaggtgccatggaatcgaagctctggaagagaagaagaagggtacagagcatgagttggagtcggcacgagaggaaattgcatctctgcagaagaaagttagcatcttggaactgaaaatccaggaggagagggcactgtctgagaaactcgcgacacggtcttgtgatctagaggcactgggtgtgcagacaaatgagctcagatctcagctccaatctgcaaactcagaaatcgctggcctgaatgagaaggttaagatgcttgaagaggctgaagagaagcacaagccattgactgcaggattggagtcccagctcaggttggcacaggctgaagccatgcgcctgaaggatcatgtcagttcgttggagaagaagctggaaagccagaagaacttgtcatctgcctacattactgcattggatgcttctgaagcccagaagaacaaattcgccagtcggtttgagctcaaagaggcggaagtggaggaattgcgcaggaagatccgtttgctcgaggaggaaattcacaaagagaaagcacaatcttctgaacttggagtgcaatgtcagaatttgaaagagcaatttaccagcagagctcttagccaaccaatgaaacctatggcaagtaaagaacttcacattaaaaaggagaaagagctagctcgtgcagcagggaaactggcagactgccagaagacaatagcttcactgaacaggcaacttaaatcgttagcagattttgatgagtttgtccccggattcgagaacgacagcgtaatagctgaaggctgggaggaaaatggtctgaaactgttgaactctgcaaattatccagcacaattgggatgtttggcggtcaaatgattgctgttgttgcgagaagactgccattgttttttgttctggctgtcatatgatcacatggttgttgtgatgaggagattgccaggatccttctgaagatgctatatatatatggagataagttaatagtttatagataagcaaaatgttcatacggaaacgatgttaataaagttattcaagccttgaagggaactatgt

SEQ ID NO: 21951 - DNA, 2270 bp, Oryza sativa
  ref <308>: DATABASE ACCESSION NUMBER: AK072172
  ref <309>: DATABASE ENTRY DATE: 2001-12-06
ggcagggccgtgctgctcagaggcgcccatggcgtggatcgactgctccctcctcgcctggctcctcttccgcgtcgtcttcttctcctgccacgccaagcagttcagcatcttctaacactcgatctcagctaggctgaaaccacatatactccagcatatatacacagcaactgattaagtaagctgttgctcgccgacggtggccgagcatgtccggtgcacggcggtgcggtgaccggaggtcggagagaagttcggtggtgggcgacaacaggaatggatacgtcgagactgacccaactggtcgctatggccggttgtcggaggtgctggggaagggtgcgatgaagacggtgtaccgagggttcgacgagctgcggggggtggaggtggcgtggaaccaggccaccatctccgacgtcctccgcaccccggacgccctccaccgcatgtacgcggaggtgagcctcctcgccgacctccgccacgacgccatcatcgccttccacgcctcctgggtccacccctcccgccgcaccttcaacttcatcaccgagctcttctcctccggcaccctccgctcctaccgcctccgctacccgcgcgtcagccgccgcgccgtcgccgcctgggcgcgcgccatcctccgcggcctcgcctacctccactcccgcggcgtcatccaccgcgacctcaagtgcgacaacatcttcgtcaacggccacctcggccaggtcaagatcggcgacctcggcctcgccgccgtcctccgcggctgcacctccgcccgcagcgtcatcggcacgccggagttcatggcccccgagatgtacgacgagtgctacggcgtcggcgtcgacgtctactccttcggcatgtgcatgctcgagatgctcaccaacgagtacccctacagcgagtgcgacaacccagcgcagatctacaagaaggtcaccgccggcaagctccccgacgccttctacctcctcaccgacgccgacgcccgccgcttcatcggccggtgccttgtcgacgccgcccaccgcccctctgccgaggagctcctgctcgaccccttcctctccccgcctcagaaccacgacgatcacaataccattgctcatgccactgcgccgccaccgccattgccattggcgtgcagtaattccagtgaggagcaagaggaggaggaggcgccggcagcaaagacgacgggcatggcgatcaccgggaagctgaacaaggagcacgacaccatcttcctcaaggtgcagatcggcggcggcggcaacgtgcggaacatctacttcccgttcgacgtggcgaacgacacggcgatggaggtggcgacggagatggtgaaggagctggacatcgccgaccgggagcccacggagatcgccgccatgatcgagcaggagatcgtgaggttggtaccagggtacaagcagcacgagtattcgtacgcggatgacgacgacgatgatgacgtcaacggacaacctaatcccttctactacctctcctcttcgccgacctcctctcagggatctctctgcggagtggggcccacatcgtcagaggggtttcctggcccacatggaaaagttgactggtcaagagattactgttactaccctccaagcagcgtcagcgtgagcgacgacgatgacagcagcacgagctcactctctgctgcagtcagcaatcagcctgcagcagcagcattgttcggcctcttccagcagattggggccagcatctgcatcagcatctgaagacggaggaggacacgccggacggccacggcagcgagagggggaggaggagcggcggcggaggaggatgagtcggaacaggtcgatggtggacatgcggagccagctgctgcacaggacgctggtggaggagctcaacaagcgcctcttcttcaacaccgtcggcgccgtccacgacatcggcttccgcgaccctactacttacggatcgtcgtcgtcgtcttcttcgtcacagcatcgccggagaagcagcagcaaggtcgaccacaagcaccactacatgttctgaataaactttttcagagcaaattagtactctaatttggtatgtacagaatgatcgatcagatgcagagtacgtaagtgtgcagctagctatctagcccgcggccacaaaattgtgtatatttggagagaagtgcatatatgagtgttgttcatgacaattttgccatgcgacatgtgaatgaatatatgagtgatatttgt

SEQ ID NO: 21952 - DNA, 1814 bp, Oryza sativa
  ref <308>: DATABASE ACCESSION NUMBER: AK072173
  ref <309>: DATABASE ENTRY DATE: 2001-12-06
gctaggcggacatggtgtaagctgcagtttggggcaattggagatttccaattcacaaaggttaggaaacataaactcgctcacactatcctcatcgcaagagtacattgtgttccacacttctaggcttggcatgccttctatggtaaacttcttcagtcgaggaaatggccctgggccgccacaaaaatcctcatcgattttcaccacgctcttcattctttcaagacacaactcttccagattaggtaattggccaagtggtggtagcctgacgcacttgggcatttgtgccatggtaatttgaataagattagggagataaagggaaatgtccattaaccaggatggatatttggtgtctttataaccttccatccgaaacttctttagagatcttggaggaactagctcacgcaacaaatctatgtcctccatagacctcttaacatgttgagtccaatgcaattccaactctttgattctttgcttttcaatcagttctatcttctggacctctttgaccgacctcacattttcaagacatcttatcagcaagttaggaggattcacatcattaagcagaacaaggttgctagaagatccatcatcattaggttgcaccacaaagcgtggtaatgtgagtaaatttttgttccattgtggcaccttggacaggtcactaccattcagattaacaaacttcaggctgtcagctttacctatacttgctggtaaactactcaaaagtgggcaatccgagaggtcaagtgtatgtagctttttgagtgtatcaaaacagtcaggtaagacgacgccattaagatatatgttcttcgacaagaccaaatgctctaggttgttcagacaaccgaggaaactgatatctattgaagaacccaagtaattcagcgagcctgacaagttcaaatacttgagattgattaagctgttcaaaccttgagctagcctttccgtataaaagtgttctgtagacagattcaagtattcaagtttggtgagggtacccaaaacttctgtttctaacctccctttcatataggagcaacttgataagttcaaatataccagtttcgagaggttacccataacttcaggtagttgtccaatattccggcagtatgataaattcaaatatttgagattgatgagactctccaaggattctgatacaccagtaacattagaacaatttgataaatccagatgaatcaatttttttagtttgccaaatgactctggcagttctttcaatccagaacaacctgacaagtcaatgtacatcagactctccatttctccaattgactttggcagtgtcaagattgccgaagacccagaaatgctgaggaaaattaattttgagagcttagttatacaattagggatcattttatccttgatcccaagagctttaagatatctcaattgcttcaagtgaccaatggaatctggcaacttctgtatggagcacccgcttaaatccaagacgcgcatgtatttagcagatgaaaaagaagcatctcggagcacattttcttcattttccagataacgcaccgcccttacctgggtaggagaatgagtgagtgaattcaatggcttggtacaatcattgagcagcgcaaagcggcatctgcacctcccagtaatattgccttgtttgctagcatctaaaatttcgtcgaccatgacatatcttgctaagtcatgcaccaggtcatgcatggtcagcaatgtaacatcctcttgatgcacttgaacaatctgcaacagaagaacttgtcagaatc

SEQ ID NO: 21953 - DNA, 3194 bp, Oryza sativa
  ref <308>: DATABASE ACCESSION NUMBER: AK072174
  ref <309>: DATABASE ENTRY DATE: 2001-12-06
gactcaccctgccatggacgggtagaaaggtacagtggcggcgcgacacgcggtggaggaggaggcggcggcggcggcggcgatggggctgctgtcgaacagggtggagcggtcggagatcaggccgggggatcacatctacacatggagggcggtgtacgcctactcccaccacggtacgcgcgcgcccaccccctccatcctcttcctcctcggatgccatcccggttgcttgaattgttgtcgccactcgccaatggtggcggcggcggcggttgcgggtttaggtttgggaactaatccggcggcggctctgtggctctcctcctccggcgctgcttcgaattttctcgtgcgattgacgtctgatcaatggttgttgacttgaccgggaaattctggctcggcgagtcaacgggggatttttttcccccttttttttggtctgtgcggctactggatcggaaatttcactgcgattgctgggtcaggaacaaatgcgatcgaaattgcctagttggactggaaattttgttcggccggctcaatggggggaacatttgcgatctgaattttcgagttggggttgtctcttgcttagttcatcggtaactgaagggcgtgtcttcgtctcagttttccattctgtcggatttgggatttctttcgcctcatacttcctgcgtgatgttctcttctcgagcaaacccctctgcttgaagtacggatcacgtggttggttggacaagtgcgtcaatcatccaactctctgattgagtgattgttcagacttttaactgtttacagattcgtagtagaactcagcagtaacacgcaaatcatcgtgcatttgtactatcttcagttcataattaattctgtaggtgtagagttgacaacattagtatggtagaatgatggctgtaaaatagtggcaaaatgggtacatgcatgaaaaagatcgattcaatgtttctacttctctgtgtgggttatgcgtagaattgagggttcaactgaattgcccaaactctatccggaaatccttccagatggatctgacgccacatgctgtgtttgttgcttcccatgtagaacaaatggcacttgttgctgctcacctactgctgaccaacttgtctgtttgtatctgtgctttttttatctccgtgtggaaattagcctcttgtttttttataggaatccctcttgttaattcaaggttgctcgcaataaaataagtactgtaaggttggttctataatgtactgaacctgacaaatgacttgtttagtacactattgtactattagtgattcagtagctgaaaactcaagtcaccatagtatcctatgataagttgataactactttgattaacagttgatgtcaaacttatctacgtggctacgttcattttttatccttaccttcaggtgtatttaccacagtaattttgctatgcatctttgttcttttacagcagaggtctttcatctccattcagttcaggtgtatttaccatgggtattttgcaatgcatctcttttcttttacagtagaggtctttcatctccattcaggaagcgtaaaggacacttctgctctgtgttgctatgcactctgtagttctcctaaatggacagtatgtcccctcaagtgcattttattggcggatgtagagctccttttattgtagtggtcctgtgtggacatttgatcagggccacatctagggaggacatgctgtgggttttgctgtttttgcacatgacagcctggatgaaagggctgcaatatacaagaaaaactgtcttgtctgcattcaactccttaaaacactattttcaccatcaaggtgcatttttcatgcatcgataaagggattgacaggttaacagcatgccgattcattcagttatcatctagtgtttttttaaccttttgggatgataactatcatccagtggatttaattgttcaccttaaactttatagccttggtgttcccttaattgcatattctttgaaatgttttcaagaacttactcttctgttggtcatgttctactggcaaacaggcatttatgttggaggaagtaaagtggttcattttactcgaaagaaagaagcagaaggatcagattcatccaattccacctccagcctattattagagccttcatcagagtgcccaacgttcccagattgtgggtttcagctgcctgatagtggtgtcgtcctcacctgcttggattgcttccttcggaatggctctctatactgcttcgagtacggagtgccatcagccgttttccttgcaaagctgcgtgggggaacctgcaccattgcccaatcagatccatcagaagttgtggtacacagagccatgtacttacttcaaaatggctttggaaattatgacatatttgagaacaattgcgaggactttgcactctactgcaaaactgggcttcttcctgttgaggaacctggcattggaacaagtgggcaagcatcttccgccattggagtgccattggcagctcttctgtccactccacttaagctttttgctgctggtccacttggaatggccactgtcacagctgggatgtactgtgctggtagatacatcactgacataggagtaagaaaggatgtggcgaaaattgaagtggagaatttatcatcacaccttggtagacgcctgattgaagatgaaggatcagtgaacgtacggtcagagaaaccgaaaaccttgctgcctatgaagagaaagcgtgagaggtgatggcgactatataccgctcttcgtcgataattggttcagaactgtgcataatttaaactttactcttcgccataataagtttgatatagatatgtacctctgaagcgtgttctgattcagttaagaccacacttcacatgatcaattgagctacattccaaactgaatatgtgatggaaatgtgataattgaatcgttggagtcaaaagtagatacttactgttctttgaatatgatacctcacattctagtgcttttattttctgtttattttcttttatcaatattttttcttactggtcacaatataatgtaataagtttcagtagtggtgaagacttcttttgtatgggctgttttctctatgatgaaatccatagactgaatagtgcagagaggc

SEQ ID NO: 21954 - DNA, 1487 bp, Oryza sativa
  ref <308>: DATABASE ACCESSION NUMBER: AK099250
  ref <309>: DATABASE ENTRY DATE: 2002-08-28
gactctctccgccctcctaaaccctacgaccatgccgaccctcgccgccgccgccgccgccgcccgccgcgccggcggggcactgcgatacgccgtgctgggcggggttcggtcgctctcatccctccagccgtcatcctcctcctccgccgcagccgccgccagcgaggaggtgctggtggaaggcaaggccagcgcgcgcgccgccgtgctcaaccgccccggccatctcaacgcgctcacgaccaccatgggagctaggctcaataagttttatatgtcatgggaggacaaccctgatattggctttgtcatgatgaagggcagcggccgagcattctgtgctggtggggatgttgttaggttgcaccagcttataagtgaaggaaagttggacgagtgtaaggatttcttcaagactttgtacagttttatttatgttctgggcacatacttgaagccacatgttgccattcttgatggtgttaccatgggtggaggtggaggtgtttccattcccggaacatttcgcattgtcactgatagaacggtatttgcaactccagaagtacatattggcttccatcctgatgctgctgcctccttttatttgtcccatctgactggtcatgttggtgaatatttggccttgactggtgaaaaactcaatggagtggatatgatcgcacttggccttgctacacactattccatgagtgatcggttgaatctggttgatgaacgccttgcaacattgttaactgatgatccatcagttattgatacttcccttacacattatggagatcttgtgtatccagataagagtagcattgttcataggctggaggttatagataaatgtttcagccttgaaacagtcgaggagattgtggatgccatggaaattgaagcagctaggttaaatgaagattggtctaccttggccctgaaacggttgaaagaggcttctcctcttgcgttgaaagtttcactgcgatcgatacgtgaaggtagataccagacacttgatgaatgccttgtgcgtgaataccgcatgtctatcaatggaatctcagagaaattttctcatgaatttcgtgagggtgtcagagcacgtcttgtggagaaggacctagctccaaagtgggatccacctgcccttgagtatgtatcagcggacatggtcgattcttactttgctcccctgggtgaatttgagcctgagttgacactgcctactgaatcgcgagaggcatttgtatgatgactctgcatgacaattccaagtagcgcttttgtttgaagccttatagatttttgagcccacactgtcgaccgttggcagcacataataacagataggattctcaatctattcttgtaccatatatgccttggtgtattgaaaggaactgatctccaaggtgaactcctaccattctcactttcataaattaatgccttcgcttcatttcatttatact

SEQ ID NO: 21955 - DNA, 1456 bp, Oryza sativa
  ref <308>: DATABASE ACCESSION NUMBER: AK072175
  ref <309>: DATABASE ENTRY DATE: 2001-12-06
gagctttctctttgatttctagccaactcgacgaatccaatcccttctttaataatagagctgctccccgttcgcgcgatgatgctgccgcggctgttcttgcgcgccgcgaccaccagccaagaacacgcgcggggctcccggcggcagcatccctgagggggcgaaaaccgaagccttttcttggattccagagcgagcgtgcgcgcgcgcgaattccatctcgcccaggtgcatttcttgatttgtcaggaaggcgaattcccggctattttagggctggaaagggttctggtacatgtggccttgatgctattcgtcaggactacttcggattcaactcactgaaacttttttttgctgcacggcaactcactagaacattggagcaatagtaagcatttgtatactcggatgcctcacttggatcgatgattgcttctagaattttgagtgattgaccaagatggggagaccctgtgtgtcaaaacattaggttactcagtatggatcatggaaggtgaagtctaatgccaattgcagttatttttctatttcctgtgttctgatactgattagattatgacagatccatagcactgtttcgtgcaagctctgtttggtagaggttcagtagtagttctcatgagtcatctgtaagttcatttcacctggattatacttcagttctactcgatatcgagatttgcaaatgcagtttttacatgtcgtcatattaggattacgttaagcagactatttacattaagcctaccattctgaccatgtcaaatactgtactatctagaaatacatcttctgtcaggttgtccggttttgtatagtaagcatttctgttagtactagtattttatagtgtactagtggcttttgacttcttgtcatcattggatcaggccatcgttataaaacaagtgtgttcaacagaagcttaacttagcttaaagctgactagtgataaacaatcagtcaaattgcttagtagcttcatcagcttcaaagtaagcacgctgtctctcatgctgtgagctgtttcgtcactgctgatttctttcccctctctctgcttgtgtcatttcttacctgacacactttctcagatcagcggcagtgctgcgagtcagaaacatgttggaaaagccgaaaaggccacggctgcagattcggaggttagcaggtttcactcctactacagcactgtcgaaacagtagaagagaatttacaacagccatcgaattattgagccttactactctgtccgaacctgaacattctgccacgctcgcattattgcgctcgttcaggcataattgaagcaatttgaaatattgcattgcactgagcaacagctcattttgcagcatggtgatctgtaaatagtactagtacatcaaactctcttcagtgattttttagcaacaagaaattcagttt

SEQ ID NO: 21956 - DNA, 1319 bp, Oryza sativa
  ref <308>: DATABASE ACCESSION NUMBER: AK072176
  ref <309>: DATABASE ENTRY DATE: 2001-12-06
ggctgctaacctcgccccactttccccgcctcgggtcgcgccgccgcgtccccgccgcgccgcgacgcgacgcaacgcatgccccccaacccgactccgccgcggcgcgcgacgacgacgacgacgagggcgaccagcggcgtccgccggggggaggaggagcaggggggcatggcggtgtcggcgtcggcgggggaggaggaggaggcgttcgaggaggtggacccgacggggcggttcgggcggtacgccgacgtgctcggcctcggctccgtgaagaaggtgtaccgcgggttcgaccaggaggaagggatcgaggtggcgtggaaccgcgtgcggctgcgcgcgctcgccgaccgcgacccggccatggtggagcgcctccacgccgaggtgcgcctcctccgctccctccaccacgagcacatcatcggcttccacaaggtctggctcgaccgcgacgccggcgtgctcaacttcatcaccgaggtctgcacctccggcagcctccgcgagtaccgcgaccgccaccgccacgtctccgtcaaggcgctcaagaagtgggcgcgccagatcctcctcggactcgaccacctccacacccacgacccctgcatcatccaccgcgacctcaactgcagcaacgtcttcatcaacggcaacaccggccaggtcaagatcggggacctcgggctggcggcgatcgtggacaagacccacgtggcgcacacgatcctgggcacgccggagttcatggcgccggagctgtacacggagacgtacacggagtcggtggacatctactcgtacgggatgtgcgtgctggagatggtgacgcgggagatgccctacgccgagtgcgacagcgtcgtgcagatctaccacagcgtcacccggggcgtcccccccgccgcgctcaagcgcatcagggaccccgagctccgcgccttcatcgagcgctgcatcggtcagccccggaaccggccctccgccgccgagctcctccgcgaccccttcttcgccggcatcgacgacgacgatagcaccggcacgctcggctagcctgttaaccagctgggtagtactagaaattattgtatgtgaattcgattggaaacaaataaacgttctaaacgaattaagctccagcgagtagcaaatgtttataggttcatgtctcaccggcgctcgagctgtagcctgtagctttggatgtggttaattagtggctagtactgtagtatttattgtactgtttgttctttggtttgtactgatttgattcatgagcttcaaagaaatggaagatgaggagctgt

SEQ ID NO: 21957 - DNA, 2433 bp, Oryza sativa
  ref <308>: DATABASE ACCESSION NUMBER: AK072177
  ref <309>: DATABASE ENTRY DATE: 2001-12-06
cactcgccgcggcacaccctcccacccccacctccgcctccgcctccgcagccatgcagatgcaggcggccaccaccaccaccgccgcgcgccgcctcgcgccgaagccgcagccgcaggccaaccggtgccgcccctcgagcgtctccgtcgtcgcggcggggaggtcccggaggaggagcgcgcgctcctccctcagggcctccgcctccctcgaccaggaggtcaaggagcgcgcctcccccgccgctgggaagagtggtcaagcaactagaagagatgtgaggaatatagcaattgttgctcatgtcgatcatggaaagacaactctggtggattcaatgttaaggcaagccaaggttttccgagacaatcaagttgtacaggaaagaataatggactcaaatgatctggagagggaaaggggaatcactatacttagcaaaaacacttcgataacttataagggtactaaaatcaacatcatcgatactcctgggcattcagatttcggtggggaggtggaacgcgttctcaacatggtggaaggagttctcctagtggttgattctgtagagggacctatgccacagacaagatttgttctgaagaaagctctagaattcggacatgctgttgtagtggttgtaaacaagattgacagacctactgctcgtcctgagtttgtggtgaattcaacatttgagctatttatcgaattaaatgcaactgatgaacagtgtgattttcaaacagtctatgcaagtggtattaaagggaaggctgggttatctccagaaaatttgggtgacgatcttggacccctttttgaggcaatccttagatgcataccagagccacgtattgagaaaggcggtgcactgcaattgcttgtgtctaatactgaatatgatgaacataaaggacggatagcgattgggcgactgcatgcaggagaactgcagcgaggcatggaagtgaaggtttgtacaccagatgatgcttgtagaattagcaaaataagtgagcttttcgtttatcagaacttcagccgagttccagttgataatgttagtgctggtgacatttgtgcagtatgtggaatcaatgatatcatgattggggaaaccatagcagataaagtttctggaacacccttgcccaccatcaaaatagaggaaccgacagtcagaatgtctttttccatcaacacttcaccttttgtcggtaaagaggggaaatatgtcacaagccgtaatctccgtgataggttatatcgtgagcttgaaaggaacttagctatgaaagtagaagacggggaaactgctgatacatttcttgttagtggcagaggcacactgcacctcactatattgatagaaaacatgcggagagaaggatttgagtttatgattggacctccaaaggtcattaacaagacagttgatggaaagctgcaagagccttatgagatagctgctgtggaagttccagaggaatatatgggttcagttgttgagcttttggggaaaaggcgtggacaaatggttgacatgcaacctagtgggccagagggaacaacattactaaaatacaagattcctactagaggcctcattggactcaggaatgcagttttgacagcatctaggggcacagcaatactcaacacaatttttgacagctatggcccatgggctggagatcttagttcacgtgatcaaggctccttggttgcatttgaggatggaagtactacatcgtatgcacttcttaatgctcaagaaagaggtatactatttgtgagtccaggacaggatgtttacaagggccaaatagttggtatccatcagcgaccaggtgatttagcaattaatgtgtgcaagaaaaaggctgcaacaaatgtccgctccaacaaggaaactacagtggttctcgatgaagcgttaagctacagtctggacgactgcatagagtttattcaagaagatgagctagtggaggttactcctgcaagcatccgcatgtgcaagaacccgaaagtttcgaagaaaaaccgataatgcagtggaggttactcaagcatcctgcaattttttggagctgctttgctttgcaagagcagactcagatataagattactcaattttgcaatgattataagttgccaaattattatctggattcctcattggacagagaagctttgggtagtattctaggctgcagatacatattctttcacagcgatatcagctgtgttacatgtttgtaggccacatagataccatatatacaagattcatgcaactatactccttgcaatgatctttacaaccaattaatggattacatatattactttactgaatgctcttgtgtacaatttgacattgtcaaactaataaagaattctctactcttctgattgc

SEQ ID NO: 21958 - DNA, 2753 bp, Oryza sativa
  ref <308>: DATABASE ACCESSION NUMBER: AK072178
  ref <309>: DATABASE ENTRY DATE: 2001-12-06
gagttgcttgtcgcgagtagggacgaatctgtgctaggggcgagaggtgtgtgcgcgctctagggggcaatggaggggatgtggaggaaggccaagaaggcgctgggcgccggcctctgcgttcgcctccccgccgtcgccggcgactgggaggacggcgtcagcgagcgccgcgcgtcggatgcgctctcccacgacgcgtcttcggcggcggcggcgcatgtgtcggcgccgaatacgccggccgcggcgttgccgggagcaggcccgctccggaggtccaagtccgggaccaagtccgccaagggaatgtgcgcaatatgtttcgatcccatgaagtcaggccatggacaagcacttttcactgctgaatgttctcacatgtttcacttccactgcatctcctccagtgtgaaacatggaaattatgtatgcccagtttgtcgagcgaagtggaaagagataccctttaaccgctcgttatcttctattgtacctcgtggtagaagtgggttgaatgtgaatcaagctcgattaccccaacaaggcacctacatggctcttctacgccaggttccaagtcaccatcgagaagcttctggttcccatacttctgagccagttgatttcaatgacgatgaacctttgcagctgatagagtctggtgacagtcgtgatgctagatgcagtagagctgtggagatcaagacatatcctgaattctcagccattccacagtcgtcatctgaagatgattttgctgttttgatccatctaaaagccccttgtgctaacccagaacaagtcacaggcagaccattcaatgccacctcaattggataccctacatctcgcgctcctgttgatctggttactgtgcttgatgttagtggcagtatggcaggcaccaaactagcactcctaaaacgagccatgggttttgttattcaacaccttgggccttcggatcgcctttcagttattgctttctcatctactgccagaaggttgtttcatctccgacggatgtctcactctggcaggcagcaagccttgcaggctgtcaacttgcttggtgctggtggtggtacgaacattgctgatgcattgaagaaagctgccaaggttattgaggatcgcaattataagaatccagtctgcagcattattctgttatcagatggtcaagacacatacaatatttcctcaaatgttaggggaacccgtccagattataggtcacttgttccatcttccattctgaatcatactatctgcacagtgcctgtccatggctttggttttggtgcagatcatgattcagatgctctgcactcaattgctgagtcctctggtggtacattttcctttatcgaggatgaaagtgtgattcaggatgcatttgctcagtgcattggtgggcttcttagtgttgttgttcaggatatgcgactaactgtggaatgcgtgcatcctagtgttcagcttcatactatcaaatctggtagttacttgagtaaggtggctggagatggacgaaatggatcaattgaagttggtcatctttatgctgatgaggagagggacttcttactatctttgagcttcccacaatctcgtgatcagaccatgcttttgaaggttgcatgtgcctatagagattcagtaacgaatgaagccatcaagattcatgcagatgaggtaaaaatcctaaggccaaagtcacctacgtctgagccagtttgcatggaggttgatcgtgagaggaaccgtgtccgtgctgctgatgctattgaggctgcaagggcagcagctgagaggggtgctctttctgatgcagtggctattcttgagcattgtcggaggatactctcggaatctttttcaagaaagagtggggatcgcctgtgcatttcccttgatgcagagctaaaggagatgcaggataggatggctagccggcaacgatatgaagcttcggggagggcatatctgctatctggattgagctcacattcttggcagagagctacaacgcgtggtgactctacagacagtaccacacttgtttactcctatcaaacaccatccatggttcagatgctgcagcgctcacagaaccaatgcccttcacctccgggcctgaggccgcagctccgacaaactaggtcactcttggagaaaccccatccaaggtagaaggcagtttgccattgtctcttgcgaagcaagtgcaaagatgatggtgtagaaatttcattggtgtcattgcttagtaggtcagtagtgcagtagcttagcattcatcctttgttcttctgttcaagtcaaggatggcggtataccggaaatggggaggtgagcttggaggtaaatatgtttttgggggtatactggagaaagtgaatgggggcttggtggtaaatacattgtgaagggggcctgggaagaaatagtagagaactggagcagtggtgtaattgctacaaggagtaagattgtgtaggttggtaatttagattgtcaggatgtttctaattgatgaacctcttttcattttgccttttggtgatgtaaagggtctggtatgggggaggtataccatagaatcttggggaattttgatttggggtggcaatgtaattccatggatttcttgtttttattcaccagttattaattgctggtgttctgctgtcgccttgccgtgaattgcaagtattatccactacatgcacgtccttacttttctg

SEQ ID NO: 21959 - DNA, 1413 bp, Oryza sativa
  ref <308>: DATABASE ACCESSION NUMBER: AK072179
  ref <309>: DATABASE ENTRY DATE: 2001-12-06
atgagagcaggaagggttcgtcagatcactaatggaggtttgcgccgcccgcgccccaggcaagattatccttgccggcgagcacgccgtcgtccatggctcagccgccgtcgccgccgccatcgacctctacacgcgctgctccctctgcctcatgcccctcgctgacgacgaggcggccgccacgttggagctggacctcaaggatcctggcctcaccttctcgtggccgtgcgggcgcctccgcgaggtgctgctgacagatgaggcggcgggggcacgggaggcgaggccatgctccccggaccggctggcctccattgccaggctcttggaggagcacgagatccctgaggccaagatctggctctccgccggtctctctgccttcctcttcctctacacctccatattggggtgtagacccgggaaggtgacggtgagctcggacctgcccatggggtcggggcttgggtcatcggccgccttctgcgtgtcgatgtcgggggtgttgctgacagctgccggcgtggttactgcagtcggcggcatcagcggcgagggcatggggtgggagttggtcgggaaggatgatcttgagctagttaaccggtgggctttccagggggagaagattatccatgggaagccttctggcatcgacaatgctgtcagcactttcggaagcatgatcaaattcaagaaaggggaattgacaaaccttaaatctagcaacccagtgaaaatgcttattacggatacaagagttggtaggaacacaaaggctctggttgctggtgtctctgaaagagcctccaggcattcagatgctatggcttctgtattcaacgcagtgaactccattagtgaagaggtgtcaagcattgttgagttagcagctaatgatgagatagctatcacctcaaaggaggaaaagctggcggaactcatggagatgaaccaaggtttgcttcagtgcatgggtgttagccattcttcaatagaaactgtactgcggacaacattgaaattcaacttggtctccaagttaacaggagctggaggtggtggttgtgttttgaccctgataccaactatgctatccaacttagttctggagaaagtcattgcagagctggagtcgcatagttttcgctgctttaaagttgaggttggtggacagggtcttcaagtttgccaaggaggctgctcctattttaatggagatgttgtataatactttgtagttatggattagtcaacggtttgagatttgttcttcacactgtttcttctagattaatccattagttatgtccttattttagccccgggcagttcctgtatcaaataatcctaccgtcgcatgattgcccttggggtttgtatcaaatacaacttttttgctgatgc

SEQ ID NO: 21960 - DNA, 1571 bp, Oryza sativa
  ref <308>: DATABASE ACCESSION NUMBER: AK072180
  ref <309>: DATABASE ENTRY DATE: 2001-12-06
ggcaggttaagccaaacacacacgacctttgttatcggcatcgccgtcgcggcagtgaagaagggagatgaggaggtttagggtttggcctccatctccatcgccatggccgctgctcgcttcccgcccttgccctcactcccaccaccatcgcagtcccttccacgcctccgccaactccggcgcccgccaaggcaattttattctacctggtgcaacggcagcaactcttgtcatgtttggtattctacatgctaggcgtatgtacgaagaccaaaaagttgttgaaaggaaggagaaaggaattgagccggaattctcaccagatttcaaggcttcatttctcaggcttctgccattgcgttcgatgtcacgtttatggggatccttgatggaagtggaacttccagtgttcatgcgccctgccatctataaagcatgggctagagccttccactccaatttgcaagaagctgctatgccactagaagaatacccttctttacaggcattcttcatccgtagtctcaaagaaggttcaaggcccattgatgcagacccaaactgtctggtgagtcctgtggatggtaaagttctgcggcttggagaacttagaggtccaggaaccatgattgagcaagtgaagggcttttcttattctgctgcttctcttctcggtgcaagttcatctcttcatggtgctgaagaagaagatttttctagagagcatacagaacaaagtaatcccgcagattcaaatgcaaaatcatggtggcgagtatcagtggctaaacccaaattatgggatcaaactctgctgagcccaaagaaaggcatcttctattgtgtcatttatttacaccctggtgattatcatcgagttcactctcctgttgattggaacattataaagcgccgacatttctcaggtcatctcttcccccaaaatgaacgtgccgtgcggaccatcagaaacttgtatgttgagaatgaaagggtagtacttgaagggcagtggaaggaaggctttgttgcaattgcagccattggtgctactaatgttggctctatcaaactatatattgaaccagagctaaggacaaatagggcagggtcgaagatactgaactcccagcctgagcctcctgatgatcgagtttatgaacctgtaggcaccggtgtgatggttaaaaagggggaagagatagcagggtttaagatgggatcgacggtggtgatggtatttgaggcacctgtagtgtccaaggcaagatggagagaggatggcagtggcacggtaacgtcagatttcgatttctgtatcaaggctggcgataggatcagggtaggagaagccattgggcgatggacatcgcgggaatgaatgaatgaaggcatggcatggcatctctctctatatatcttgtgttaacatgatggatgatgagtatcgtcgtcgtatcaatgtctctttcgtttttatttttgagctgcggtgccggtgcatgctactacaaaaagacttgtatcttctgtagggaagtaaaggaaactattgccattttgacttg

SEQ ID NO: 21961 - DNA, 1630 bp, Oryza sativa
  ref <308>: DATABASE ACCESSION NUMBER: AK072181
  ref <309>: DATABASE ENTRY DATE: 2001-12-06
gtggaccatcgatcgatctgtctcttttgcctgctctgctcctcttgttttcttttgccttgtttgcctcctctgcaacgaacgcagacctagcagcatgcatattcagtcaagagtttaattgcaagaagaagaagaagaagaagaaatctactactagtccagttgcagttgcagaggcatattgtggttggataatggagacggtgtcggtgtgcgggctccacccgggcgtggcggtgacggggttctgcccggcctgcctccgcgaccgcctcgccggcctccacccgccatccgacctccgccgctgcaagtccttctcctactacgcccgctcctcatcctacttggagccgcacccgcagcaggatgctctagtcctgcccgatgctgctgatgctccaaccaacaccaagctcgccttgggctccctgggcaagcgctggcaggaatggcgtcgcaagtccaagctcaagcaccaccacccgccccccgccaccgccaccgaccccgcgctgctggcccgccgctcctgcgacgctttctccacccgcaccatgctggacgagccccgcgcgtcctaccatcccacgctcttcgttccacgctccgacgaccagatccccgtggaggaggaggagcgagcttacgtgcccggcggctccgcccagacaagggactactacctcgactcctccagctccagcaggaggcgccggagcgtcgaccgcaagtcctcctccgacgccggcgaccaaatccccaggatggtggccgcggctgccaatgccagggtttcaccggccacagagctgtaccaccagccccacacgttccactatcaccagccaagcttcgagccgccgccattattggcccgggaacgacaagaggcaaagagcaagcctaagaacaaggggatcaaggggtggagcatctggggcctcctgcacaagaagagcagcaccaccaacagtgtgggtgccactgccagtgcgttcgccggcgaggcacgggcggcgccaccggagctccgggcaaggggttacgacggccagatgctccggtgcaacagcagcgtcagcgcaagaagctcattcagtggaattggaagctcattcaatggcggcaggttggggatgaggagggcagatgaagttttgcttgagaggaatttcagcgccaggtactcttcgtcttcctcctgcaggtatcagtttcacaaggatgattactccaactccattgccaacaattctggagctggagctggaagcaggcctcctcgttcctccaccttgccgaggacctcacttggactctactactactgaactcaattttattattattacccttagccgccctaaatctcatcaatcaaaaattattagtgtgcatagcatagcagcttatatatacttgttgcagttttacaactcaactggtgattgcctccaccacgtacgggtgcattataccttacttaatttacactagtacacccttttgtttattaatctcctccaaccacgacatatgcatgtttcttctttcatccattcagtcccagactcaagcctgtctcataatctcatatgcttcaaatcagccatgtgttggattg

SEQ ID NO: 21962 - DNA, 4631 bp, Oryza sativa
  misc_feature (3524)..(3524): "n"=any one base of a, t, c, or g
  ref <308>: DATABASE ACCESSION NUMBER: AK072182
  ref <309>: DATABASE ENTRY DATE: 2001-12-06
gaagagaaaaaaaaaggaggcgcctttgctgctttgcagttgcagagcagctcgcgccgcgcgcgtacactcgctttgctttgcttcttcgccggaaaaaacccaatccaatcaagcggagctcgagctccaatccagctatagttgggaatctcgaggggggaaggaggaagaagaagaagaagaagcagtgagctttggagtttgagctggctagctccatacttcgggtgacgtcctcttgatccaagaactcgtgggggggttggttcttggattggattgggtgcatatcatgtcggtgtcgtcgtcgtccatgggcggcggcggtggcggggacgccggggggaggacggtggtgtggttcaggagggacctgagggtggaggacaacccggcgctggcggcggcggcgcgcgccggcggggaggtggtgccggcgtacgtgtgggcgcccgaggaggacgggccgtactaccccggccgcgtgtcgcggtggtggctcagccagagcctgaagcacctcgacgcctcgctgcggcggctcggcgccggcaagctggtgacgaggaggtcggccgacgccgtcgtcgcgctgctccagctcgtccgcgacaccggcgccacgcggctcttcttcaaccatctctacggtttgcttttgctagctttgtgcgttttttattattatttttatacaagaaaaggagatatgccttttagattgtttctggcatcaaagtcttcacatgtggcaaatctttctgttagatatgttgatcgaatctcatggcaagtccatgcttttaggggcaattctagcttgaagttatgatttgattggatgacatgataacaatgcaacttctctgtttcgcttgcatcttcattacagttttcatcagattcgcgtcaagtttgagctagatctactccatcattttaacagtattatgtggcactacttggatatattaatatactatacctccatctccatggtccacatgccaactatgttccagtttagctaccattgttttagagcaaaacttcagaagttcccagttttagtaatctgcctttacactttgatcattaagaacatttcgccatctactagtactacctttttattatttctgaaagctcttgctgccaccaaccgactaatttaaagaggcaataatcatatgaggagatcaatgtcgtgttggattttcctctttgtagtcttaccccccaacctatataaggtgggcagggagcccttcaagctaagccacaatcagatcgtcagattaatacaacacccatataatccttgaaacaggagtagggtattacttctaattgagaaggcctaaacctgtctaaacctttgtccctttactcatccactttaggtctcatgcgctaccccatttcttgttgccgatttctagaatcaacatcaaccaaccaatttaaagaggcaataatcacatgccagctccatatttagttaacactcattcactcaacataagcacttgtacggttgtactttctagtatattgtctaaaattcagtatctatcaattgttcgtgttgagactagaggtttatgctttgtaaccttgacactcatgacctcgcataactctatactcattggtcacggctgtcttttcagacccgatctcactggtcagggaccaccggctgaaggagatgatggcagcggagggcatcatcgtgcagtctttcaatgcagacctgctgtacgagccgtgggaagttgtcgacgacgaaggccaatctttcaccatgtttgcgcctttctggaataggtgcctcagcatgccgtatgatcctgccgcaccgctgttgcctcctaagagaatcaattcaggtgacttatcaatgtgcccatcagatgatctgatctttgaggatgactcggagaggggaagcaatgcacttcttgcccgagcatggtcaccaggctggcagaatgcagacaaggcactgacagctttcctgaatggtcctttgatccactactcagtgaatcgcaagaaagcagacagtgcaagtacctccctcttatcaccgtacctgcatttcggtgagctgagtgtgcgcaaggtcttccaccttgttcggatgaagcagcttgtgtggagcaatgagggcaatcgtgcagctgaagagagctgcaccctgttccttcggtccattggtctccgggagtactcacggtatctgagtttcaaccacccatgcagccatgagaagccccttttggcacacctcaggttcttcccctgggtgatcaatgagtgctacttcaagatatggcggcagggaaggactggttacccccttgttgatgccggcatgagggagctatgggctacagggtggttgcatgatcgtattcgtgtggtagtgtcaagtttcttcgtcaaagtccttcaactaccatggcgatgggggatgaagtacttttgggacacattattagacgcagatcttgagagcgatgcactaggctggcagtatatctctggctctcttcctgatggccgagaacttgaccgcattgacaatcctcagctcgaaggctacaagtttgatccgcatggtgagtatgtccgaaggtggcttccggagcttgcaaggttgccaacagaatggatacaccatccatgggatgcacccgcatctgtgctgcaagctgcaggagtcgagttaggctccaactaccctctccctatagttgggctagatgcagccaacgccaggctgcaagaagccctgtcagaaatgtggcagcttgaggcagcatccagggccgcaatggacaatggaatggaagaaggccttggcgactcctcggaggttccaccaattgaatttcctcgagaactacagatggaagttgaccgagaaccagctcgagtaacagccaatgtgctgacaacagctcgaagacgcgaggatcagatggtgccaacaatgtcatcttcactaaacagggctgaaactgagatttctgccgattttatgaacagtgtggacagtagggcagaggtaccaacccgtgtgaattttgagcctcgaactgagcgggaagaaaatttccgtaccactgcgggaaatgttgctagaacaaatggtattcatgagcacaataatttccagcaacctcagcaccgtatgcgaaatgttctagcaccatctgtatcagaggcatcaagtggctggagctgggagagagggaggcgtagtcccagtttggtcgcctcctgcagcatcagaccattcagaaacttttgcctctgatgaagctgacatttctagtaggagttatttggataggcatccacagtcgcaccggttgatgaactggagtcaattatcccagtcattgtgagttcagatgcacggtaactgattggtctcagtaagttggattgatgttgcacttgctcacaattttgcaacactttatcatagtatgggaacttctcgcatnataccaatatagtatctaaaaaatgtttgttttatgcatgaagccacacaagattatgaatggctggacaacttttgatcgggttttcatttttcgtggctagacaacttgttttatcttgttttctgtatatatgtatttgtatttaacttttatttatttatatatacacgctgtaggagcctctcctacagtaattttcctaacaaagaaatattacaatcatgtatgtagacctataaacaaaaaggtcattagaaattgaaaggtagcttcttggttatattggtatgaccatgtaaaagcctgagtcctatgggaattgacatataaaggaacggaggtctattttacctaaactttgaccaaggaatttcccccctcattttattaccagaattactacctaacatttcacatttaggtcaactctcttctatctattctcctccctctatagattcttttgcggcgtataaaaatcttattctatgttattcttgcatgataacatccacatctcatcagggattcacaagcctgcagacaccgcttctgtacaagccgattacttggctttagttatatattatatagtccaacttttggttgtacaagccgattacttggctttagttatatattatatagtccaacttttggttgccttcaactaactgttcactaaaatataagattgatgtgccaacatttctaacatcatctaatattttatgaatcttggattgcaggacaacaggtcgggaagtggaaaattccatgcaaccaaattggatcggttagggttttctccgccccagattcatatgtaaattgtccacctatgtgcttatctatagtctgatgagcatgcaagccaggcaatttcctgagtgtgacaatagttgtgtaaatctaatcctgtagaacctattctgttgtaacagcattgttagagttggctgaaagggatatgtaatattgatcagacaacgagggttttcctagtgtcacgcgtatagtatttttagggggagtcttgtctatacctgtacattcccttgtgctattggcaatctattatcactacttttgtgttgaagtacc

SEQ ID NO: 21963 - DNA, 2120 bp, Oryza sativa
  ref <308>: DATABASE ACCESSION NUMBER: AK072183
  ref <309>: DATABASE ENTRY DATE: 2001-12-06
ggttttaagtgtcgccctagctgctataaaaccagccgagacgaggcgagctgaggccaaccacggcggcggcggcgaacgatccatcagttcatcggcatggacaagaacggcagcagctacggcgagagctcgtcggacgacgtggaggcgccgctgctgctgccggcgtcgaggggcgggacgatggcgaagggtgatcgtcgacgtccggcgtcgtcggcggcggcggcgtgggtgcgcgctctgctcgcgcacaagtacccggcgatcgcggcggggccggcggcgtgcgcggcggtgtgcgccgccgtggacctcggggacgggcacggcgaggcgcggaacatgctgggcgtgctggcgtgggtgttcctctggtgggtcaccggcgccgtgccgctcgccgtcgcgtccatggcgccgctgttcctcttcccggccctggggatctcctcctccgacgacgtcgccagggcgtacatgggcgacgtcatctccctcgtcctcggcagcttcatcctcgccctcgccgtcgaccaccaccgcatccaccgccgcctcgccctcaacgtgctgtccctcttctgcggcgatccggtgcggccgtcgctgctgctcctcggcgtcaccggcacgaccgcgctcgtcagcatgtggatccacaacacggcgtgcacggtcatgatgatgccggtggcgacggggatcctgcagaggttcccccgcggcgacatcgacgacggcggcgggcaggaggtgcggcgattctccaaagcggtggtgctcggcgtggtgtacgcgtcggcgatcggcggcatggcgacgctgaccggcaccggcgtgaacatcatcctggtggggatgtggtcgtcctacttcccggagcagaggcccatcaccttcagctcatggatgtccttcggcctccccatggcgatcatcctcttcctcgcgctctggctcaccctctgcctcatgtactgctccaacaacaccgccaaggccctctccgcctacctcgacagaagccatttgagacgagagctcagcttgttaggtccaatggcttttgcagagaagatggtcttggctgtgtttgggggcctagttgtgctgtggatgagtaggaacataacagacaacatccctggatggggagttcttttccacaataaagttggggatggcacagttactatcatgatggccacccttctgttcataatccccagcgggaagagggagggtgagaagctgatggactggaacaagtgcaagaagatccagtggaacatcatccttctcctcggcgcaggattcgccattgccgatggcttcaagacgagcggcctcaccgacatcctctccaacggcctcaggttcctgaaaggggcgccgacgctggtgatcgtgcctgtcgcctgcgttttcagcgggatcatgacagagttcacttctgacgactcaaccacgacgctggtgctgccattgttcgctgaacttgccaaatccattgaggtgcaccctgccttgctcatggtttccggcgcaatcggggcccagttgtcatacttgttgcccaccggatcgccgtcaaacgttgtcggcttcagcaccggctacattaccatcaaggatctggtggccactgggttgcccctgaaaattgttgccattgcagctctgacagtcttactgccaacattaggatcaacgatttttggcatggacatcaagtcataggaacataaatatgaagtttttgagaatgtacagtagtttctgtttctgtatctcatgcctgaactattgttgaggggtcagatggcatggtttgtataagagtaaccatagggatttctcagccgttctgtattactgtatctgagacgtgccccgggagatcagatttcttgtcaagacagaagcaaggaagacaagcagacaatagaagaatgatcaaaatgaaacgtattcaaacaatccatatccttcagatgagcgtacaatatgcaggtcttatcctctagaggtgctatagcttattgttcttcacaaaatatgtaaagttaaaagagtgtcggcatatatattaaattgaacagaatatgtggtac

SEQ ID NO: 21964 - DNA, 3544 bp, Oryza sativa
  ref <308>: DATABASE ACCESSION NUMBER: AK072184
  ref <309>: DATABASE ENTRY DATE: 2001-12-06
ttaatacgcaacctgcacactgcatttggtgatcgccctgatgtgcttgaaatggttgttgcattgtctcagagttttgagtcattgtacaagacagaggtgcttgaccttgttgagaaatttgacaaatacctctcggacaagaatgctggttcagaaatgcacgaggagctacatgatattctaactgcagcgaacagcttacctaaagctccatgggaagatggcgtttgcaaagtatgtggtattgatagggacgatgatagtgttctgctatgtgacaaatgtgactcagaataccacacttactgcttgaatcccccactagcccgtataccagaagggaactggtactgtccatcatgtatgttaggtcaaacgaaagcacatcatgatcagggtgttcaaaatgtgaaacggcagcaaaagaaatttgttggggaggaagcccatgcctttcaagaggaacttaataaattagctacagcaatggaagagaaggaatattgggaccttaacatgcaagagaggatatatttactgaaatttctatgcgacgaaatgctcaacactgctctaattagagaacatctagatcaatgttcagataagttaggcgatcttcagcagaagttccgtgcttcaaattttgaattgaaagatttgaaatataaggaggagatgaggacttcatatgctagacaaagtagatctagtaaaactgaacagcattttaacaacagttctggacccgtggaaaatcaacagcagtgcacgcccacagcattggaccatctggaagaggctgaacagggtaatgttggagttaacctaaacaacccagctgatggggttcctgatgggcaattgaatgtaggcaagccttacaaaagtgacaaagacatatccagtgcatctatggttgaagaacgcaaatcttcaggactttctgaacaaccatcaggaatggctattgaccagattgatggggatgctattgatgaagggtcccagagttgtgagaagaggtcattaggtgccaagagcagtacatgtgataacttgaacttgaaagacactgaatttagcacacctggaagagagttgcctgatgaaagagccagcacatcattccaagataatcttgaagcatcatcaactaaatcaattgagcttgatgctgataataatgaaatggatactttatcggatgacatttcaaaattgcaggattcaattagcttactagagtcacagattaatatggcatcatcgagaagagagtgtctgggtaaggattccattggtcgattgtactgggttataggaagaccgggtaaacgtccttggttggtggctgatggaagcatgctgaaacccaaggagagagatatcagtatggttaacagttatcccccatctgcttttgattgcaaaggttggaattcagcatctattttcatttatgaatctgatgaggaaatccagtgccttcttgactggttaagagactatgacccaagggagaaggaactgaaagactctatcttgcagtggcaaagacatttctgtcatcaaagcagttctcctctcgttgatcctccaatttctggtccaaagggtgaacagcttatggagcttccaaataccaaggctgcagtaattttggaacaaaagtatggtctgcaattggaccaggacacaagtgatctaccgaaaaagcgaggaaagaagataaagttaagttctgaagatagaacatatcgctgcgactgtttggaacctgtatggccttctcgataccattgtttaacatgtcatgagacttatctcatatctacagagtttgaggggcataatgatggaaaatgcagtaaaatccaccagtctcctgatgaaagcagagaaaatgatgagccaaaagtgaaggttaccaaatctgatacgaaggaaaaagattcccttgaatgtagctctgtcattgaaccgtccagtgacagaaaattgatgcaatgcccatatgactttgaagaaatttgcagaaagttcgtcacaaatgattcgaacaaggagacagtaaagcagattggacttaatgggtccaatggagttccatcatttgtgccttcacctgcattttttcttgaacctgcaattgtacaaagtcaaaacagaaaagatgatgaactcaaggattggacctcctctttagaggaatgcaatgcaatgtctgctcaaaagctagttcaagaggtttccaaatctggtcaaagttgtcctggcaatgtgggtgatgagaaggtgcaaaaatctaaaaagcccacccctgataatacttctggtgaggaagcacattctacaacaggcaagccaacacgattgctagctgttaatggggggttggttccagagtcatccttgaggcctcttataggacgaaactctcacatacttaagcagcaaaagataaacttgcttgacatcgaagcagccttgcctgaggaggcactgagagcctcaaagtgtcagcaaataagaaggcgttcatggcgtgcatttgtcaaagatgcagaatcaatatcccagatggttttggcggctaacttgttggagggcatgataaaagctgagttcttgaagaacgattggtggtactggtcttccttcacagcagctatgaagacatcaactgtatcctcactcgcgctcagggtctacactctagatgattgtatcatctacagtaaggatcaagttccaagcgttgagccagctgacaatacaaggtctggaaacagaggtgggaggaggaggagagagcttgaatccttagcatcataatgtaggactctccgttgtagactccaaagttagaagcctctcgggcagcaaaagaatattatcctgctgtcaagtagatcgatgatagatgatacaaagtcttctgttatgtcgtcgcttaaggagggtagcgtggtagacatcgttccggtacccctgcaagagttcaaccctgactgtgttttcttttacctcgtatctaccagcctaccgtttttcgacttctgttgtggttttaggttccagaaggaagaattggtactccatgtgcgagcattcgatcttgatgccaccatgtaaattgtttgaggcacctgcaagtgctggcattttgatctgatccgccaggagtacccggtgcaattttctctgttggactaaccctattcattgtagaggttattccataggagatagaggagacatgtcaggtagggaggatatgtctcattttctacccactttcactctattagccgcagtgggtagtgtagcgggtgttagtttcccattctcatggtctgtacttatgtcgtgtttagggggggcgctctggggcgttgtattgatcatttgtttgatgtttctggcaagtttgcaacatctgataggaatgtagattcatcttgcgacagatataattttgattgtaactaaactgaactgaaaccaataatgattagtcaacaatgattcggctgcc

SEQ ID NO: 21965 - DNA, 1523 bp, Oryza sativa
  ref <308>: DATABASE ACCESSION NUMBER: AK072185
  ref <309>: DATABASE ENTRY DATE: 2001-12-06
gaggggaaagcaaacaagccctagttccgccgatggagaggagcgccggcgaggaggttggccgtggcgtcgcttgcgattagggtggaggcgccggacagcaggagggtggaggcgccggacagcaggagggtggcgttccgatgggtacaatctgttgtctccgatgccggccaggagggcggcgttccgatgggtgggaggaggggcggtggtgaactggtgacgccggcgtcggccagaagggtggcgttccaacagaagatatcctagctgttccaggaagctcgcgagcactgcttctctcgcttctctctgatttcgagaacgaaagacaatctttactaccatctctggtgccactgggcgacgttccgatgggtatgaggaggggcagtggtggcgctggcgctgaccaggagggcggcgttccgatgggtgggagtaggggcagtggcgatgccggcactaacaaggagcacggcgttccgatgggtgggaggaggggcagtggtggtgccggcgctgaccaggagggcggcattccgatgggtgggaggagtggcggtagtggtgccggcttcggcttggattgggtgtgggactggcgtaatcccaacaggtctgtgccgccaccaccaacagaagatatcccagctgtcccaggaagctcaggagtactacctctctctaatctccagagcaaaagacaatatttagtatcatctctgatgctgctatcatctctgcctctctctgatctccagaggcattctgagaaattatctgatacacatggatcagataaggaagatgaagtggtggattcttcagacgatgattgtgatccatattttaactatttggttgatagctttatgactgcaactaaagctcaaccaaaacagttgtatggcaatattgatcttgttgcagctgcacaacgtcagtctaatgagtatgcaagtagtgctttggattactataacaaggatgaaaacaataagattcaatacagcttaatcaaagccttaaaaagcagtacaattagagagaagggtgagaaatatggacatgtcaacttcatagcatctttagattcaaaggaagagctatttttcgccgaagtttgttgggatcccaagaactatgatatggtgccgacctgcattgtatctcttgaggagaaaaggagaattgggggacgctcctttattaatgacgagtatgtggtgtgtctggatctccaaaatccgcctatagatggcaagcactgctatggatgtagcgaagagattaagcacccagaagatggatctacgtttaaggccgggcatgtagccgccaccggtttttatgattctttcatgtagctgccatcagttactattctttcttccgagtttgtataaaagctcaactaatctacccttaacagctgtttttactgttctatttattttgcatcttgtctacactagcagacttattttgtggctatgaatggatgaatatgctgcgtt

SEQ ID NO: 21966 - DNA, 1869 bp, Oryza sativa
  ref <308>: DATABASE ACCESSION NUMBER: AK072186
  ref <309>: DATABASE ENTRY DATE: 2001-12-06
gagtgacgagagagatcgagagaacactcgccttagctcttcttcttctcccttctctacggggagttgcggctccggcgggcgcgcgacgagaggatcgccgaagagtgcccagaactgagattttgagtttctaatatcgattttcattccaagggagaattgatatacatatgaaactctgagaaggatgggttatggcatgagtaggatggaggaggaatacagcgagcatgaagatcagaataatggtggatctaattcacaagtgaataatgagttcttaaacacacataatgatattttccatatgactcaaataagatcaggacctagtgaaagtcttcgcaagtctattggtacaagcaaagatgtgatatcgacaaccaggttattgtctggaagggaaattaattcttcaggaaatgggaagttctcttcagttgatcgtgcgtttcttcttggtcgttatcttccagttgatggccctgaaatagtggacaggatggattcccgagcttatgtttcacagttttctgctgatggatctctttttgttgctggttttcagggaagccacataagaatatatgatgttgataaaggttggaaagtacatagggacattcatgctagaagtttgagatggaccattagtgacgcatcactttcccctgatcaacagtttcttgtctactccagtctagcaccgattatccatatcgtcaatgttgggactgctgcaaaacaatcatatgctaatatcactgacatccacgatggactagatttttcacagcatgaagatgttcgatatacatttggaatattttctgttaaattctcttctgatggccgagagcttgttgctggcagtaacgatgattcaatatatgtttatgaccttgtggcaaacaaactaacgttgcgtttgcctgctcatcattctgatgtcaacacagtagcatttgctgacgaaactggccatctcatatattctggaagtgatgataatttatgcaaggtctgggataggcgatgtttatccacagaagaacctgctggagttttgactgggcatttgcatggcattactcatattgatagccgtggagatggtcggtgtttcatatcaaatggaaaagaccaagctatcaaaatgtgggacatcaggaaaatgacatccaatgctgatagttatgaagacagaacctcaaattgggactatagatattcaagatatccacaacagtataagcaactaaagcatccccatgatcagtcaatagctacatactggggccattcagttcttcgtacattgatccgttgctatttttctcctgcatatagcacaggacagaagtacatatatacaggatcctatgattctagtgtttgtatctacgatgtggtgagcggatcacaagttgcaaaactcaaaggatatcatcagctggcaattcgagactgcagttggcatcccttcgaccctatgcttgtcagctcatcctgggacggccgggttgccaagtggtccaggtcttcctgtcagcaagaagagactactgatctcgattgattcggtgcttgcgatcttccattagcatatatgcagataatggcacgaaacaaatgggtttaaacagattacacagtttggctagatattagatatattgtgaagaagatggcgcgtcgtaaaaaatggatactcgtagtcagagtcatgcgctcgtccgggaatacacagagttttctttggttgtctgtacagcgtttcccttggtggagctttacatgtggtccgtatacatgtcaatctgtatatgtcactgatttatggagcatgagctgggagttaatttg

SEQ ID NO: 21967 - DNA, 2237 bp, Oryza sativa
  ref <308>: DATABASE ACCESSION NUMBER: AK072187
  ref <309>: DATABASE ENTRY DATE: 2001-12-06
ggccatgcccccacacctctcctcctccctcttctcctcctcccctctccccaccaccctcctctcctccctcacccgccgcgcccgcgccctcctccccctccccctccccctccccgccgcctccacccgccgccgcctccctctccgccgcggcccgctgctgacgcgtggcatcatggcctccgccgccgcagaggcaccggccccgtcgccctcgcccaccgccgccgcgaacagccgaccgcggcgggtgctggaggagctctcctgggacgactccttcgtccgcgagctccccggcgacccccgatccgacgccatcccccgcgaggtgcttcacgcttgttacacaaaggtgtcaccctcagcgcccgtggacaaccctaagctggtggcgtggtcccagtccgtggctgacatcctcgatctggatcacaaagagtttgaaagacctgattttcctcagctgttctcaggagcaaatcctttggttgggagttcaccttatgcccagtgctatggtggacaccagtttggttcatgggctggtcagttgggcgacggacgagcaataactcttggagaggttatcaactctcgaggtgagagatgggagttgcagctcaagggctgtggaaagactccatacagccgatttgcagatggccttgctgtcctccgcagcagcattcgtgaattcctatgcagtgaagctatgcatggcctaggcatccctacaactcgtgctctttgtctagttgaaactggcaaatctgttgttcgagatatgttctatgatggcaattcaaaggaggaaccaggtgccattgtatgccgtgtagcaccatcctttttgcgttttggttcatatcagatacatgctacaagggacaaagaggaccttgaaattgttcgtcatttggcagactacacaatacgtcatcactacccacatctcgaaaatattaaaaagagtgaaggtttatcttttgaagcagctataggggactctccagcgatagatcttacttcgaacaaatatgcagcctgggcagttgaggttgcagagcgcactgctttcttgatagcaaggtggcaaggtgttggttttacccatggtgtgctcaacacggataatatgagtgtattaggactaactattgactatggaccctttggctttttggatgcttttgatcctagctatactccaaatacaacagacctccctgggaagagatactgttttgcaaatcaacctgatgttggcttgtggaatattgctcagtttacctcaccattgacagctgccgaacttatcagcaaagatgaggcaaattatgtgatggagaggtacgggacaaagtttatggatgagtatcaatccataatgaccaggaaacttggtctacccaagtataataagcagctaataggcaagctgcttaacaacctggctgttgataaggtcgattatacaaattttttccgtcttctttcaaatgtcaaagcagaccataacattccagagaaggagctacttgttccacttaaagctgcactcctagatattggaccagaaagaaaggaagcatggattagttgggtacaaacttacattgaagagttggtttcaagtggcgttcctgacgaagaaaggaaagctgccatgaactctgttaatccaaagtatgttcttcggaactatctctgccagactgcaattgacgcagctgagcaaggtgattatgatgaagttcgtcggttattgaaagttatggaacatccatatgatgagcagccaggaatggagaaatatgcccggttgccaccagcctgggcatacaggccaggagtgtgcatgctgtcctgctcatcatgaaaccaacattccatcacgtcaaatatgcaaacttgttttttttatattatttttttctgtataggaggtttaattttgagctactgctatagtgtctaaagcatcacatgctattttactgccgatgcatatcagaaactggtgttgttaatcttcgagttatcatattgttgacggtagctaagcgttcatagcagttgggaaatagagccaccaaactcatccgattttcttagatatagtgctttgttgttgtgaacagattatattttcgcagatgaacatgatgtgcatttagttttagctgtccatctaattatgtccagcaacatgagaggtgtttatttacttc

SEQ ID NO: 21968 - DNA, 1561 bp, Oryza sativa
  ref <308>: DATABASE ACCESSION NUMBER: AK072188
  ref <309>: DATABASE ENTRY DATE: 2001-12-06
gatcgtcccacgcagaacgaaaaacttaatcacaacagagtttcatcgagcaccatgtacaggaatgaatgaacgaatatgaatgaagttgtcggctgaggaaaaaggtagtgttagaccttaattagaagcatcaatctcctgagatggcatggcggatggagaggaggcaaagccatgataaaggaagaggaacatccctgctttcatatggctggagcagcagatggtgagggtctgaggccgatgccatcccgccggagcttaccaccctcttcgtcagacctggtgcctgcaacaacagtgagctgcttctggctcccggcatcgacgtctcccacagctcgttcttcaaccgcgccgacgccccaggcgcccacggtgcccctgccggcttcctcgacactttcgacgtcgccatcaacggcgcgctccgcgccgctcctgccgcggcttcaccggctttcctcctgccgaacctcaacgatgacgcgactgcgactctccacgcccaagccgtcgccgttctgaaccacgaccgcagattcgggtggcgctgccatggaaggtggagaagaaccgggggtggagccgtcggcatcggcgactacagaggaaccgacagcgaggtggagcagaagtcagcgaggacggagggagtgggtggttaagccgtggtgcacttccgacgggggcgccgaggcaacgggtggttggtgcatgtgtcccagcctccggtggcagcagcggcctcaaccctcagatctggggcggcacagaggaagttacatgccagaagccggcggcgacaagaagcagcatggcggagatggaggctggtgataaaaagaacagcgaatggtggaggccgtggcaatgtgaaacaatgtggacagcaaaatctggagatggaatcaacaaatggaccattacctcgctagctcccttgaggcttcttccattgtcaagatccaaatcaacaacagcccccccaaccttccaattgagccattgaggagtgaaacgacggccgacatgcaacgaaacggagcggccaagatacactacgaactccaccacggccggctagcttctgatctggccactgccacgacgccacaccagcacacgctctcgtgaaaccctaggcccctctcccgcaggtgtggccttccccgacaccgagccttcacgcgacggcggaagagatgaccggcggcctgcggccactacttattaggggaggatgtgcgcactggtattcaatgcgcgaggaggcgcatcatccggtgtcattgctctgtgcgcgggaataacgcggcaagcggtggcggggatagcgctcgaggcggtgttactgcgaaaggggttctcgcgctcgcccggtgggatgaggaatcggtgatttcaccgctacacagagggtggggacatggggattgatttcacctgtaggattgctagtcacaacttctcctttttatattagtatagatagaccataaaacctgtgattatttgccacgcttcataatacatgtggttttgtgcaaatttaacc

SEQ ID NO: 21969 - DNA, 1770 bp, Oryza sativa
  ref <308>: DATABASE ACCESSION NUMBER: AK072189
  ref <309>: DATABASE ENTRY DATE: 2001-12-06
ggtaaagtttttgcaaatctactgcaaaggaagcacgatacagatggcgctctctcgctccgtcgaggtggccgtgcccgccgatccggccggcgatggcgatcgagataaaattcggctgcggcagctcggctacaagcaagagctgaagcgcggcctctctgttctctccaacttcgccttctccttctccatcatctccgtgatggccggtgtgacgacgacgtacagcacggggctccgctacggcgggccggtgtccatgacgctcgggtggctcgtcgtgtccgccttcaacggctgcatggccctgtccatggccgagatctgctccgcctacccgacctccggtggcctctactactggagtgccaagctcgccggcaacgactgggctccctttgcttcttggatcactggctggtttaacatcacgggacagtgggccgctaccacgagcgtggacttcgcgttggcgcagttggtccaggtgatcgtcttgctcagcaccggtggagccaacggcggtggctacatggcctccaactacgtcgtgctcgccatctacggcgccatgctcgtcatccacggcgctatcaacagcctcccgatccagtgcctctcttggttcggccagcttggagctttttggaatgcggcaggtgtctttgtgctggtggccttgatcccggctgtcgccacggaaagggcgagcgttgagttcattttcactcacttcaacacagaaaacggcatggggatacgcgacaaggcttacattttactcatcgggttgttgatgagccagtacgcgatggccggctacgacacatctgctcatatgacagaggaaacgaagaatgcagattggagtggcccgatcgggatcgtaacctcggttgctctctcgaccgtgttcgggtggatctacatagtgtcactcacgtcggcggtgacggacattccctacctgttgagccccgacaacgacgccggcggcaacgcggttgctcaagctttctacaccactttccaccggagatacggcagcggcctgggagggatcctctgcttgggagtcgtcgctgtcgccgtcttcctctgcggcctcgcctgcatcactagcaactcgaggatggcgtatgcgttctccagggacggagcaatgccgttctcgaaagtctggcaccgagtgaacaagcaagaggtgcctataaacgccgtatggctctctgtggtggtggcgttcatcatggctctgacatcgctgggaagccaggtggcattccaagcaatggtgtccatcgcgacgatagggctctgcatctcctacgcgctgccgatcttcttccgggtgacgacggcgaggggatccttcgttccggggccgtttcaccttggcaagtacgggatcgtcgtcggctgggccgccgtgctctgggtggccgccgtcaccgtgctcttctcgctgccggtggcgtacccggtggcggaggagacgttcaactacacgccggtggccgtcggcggcgtgctgctgctcaccgtcggcgcgtgggctctccgtgcccgcttctggttccaagggcccattactaacactaatgacggcccgctgtgacggcccataactgtatgggccgatgcatgtgtgctacggcccatggagttctacggctgacaaggaagcccacgtacatgtagccttgttgggcggcccagtaagaggccgttctttattttgattcgtattcccatgtccttggatgg

SEQ ID NO: 21970 - DNA, 1004 bp, Oryza sativa
  ref <308>: DATABASE ACCESSION NUMBER: AK072190
  ref <309>: DATABASE ENTRY DATE: 2001-12-06
gttcagcggcaggcgccctccatctccgtccctccccccatgtcggcgttgttccccgtaccccccagtcggcagcgccctcccccgagctgacgacgccgttccctcgagccggcgactcagccgtggcgcttcctctctccctatccctctacgtgcgaccccatgccaaggcagtggtccgcgacgagccggggagctatggccgagagcagcgacgggcggcgacgcctctccgcccctcgcctcctctcccctgccatggggctgcgggagggctcgaccgtggcgggcggtggcagcaggcgacggcgccctcccggcaggaggggagggggcgaacaagggcggtgcccttccctccgccggatccagcgggaggggaggcggcggcagcccgtcggcgtcccagcggcggtggcgccctcccctccgttggatccagcgggaggggagccggcggcggcccggcgtacctgcgacggcggcaccctccccttcgatctagctgtatgggaatttttggataaaatttgtgtgtatatgcttcagtttttcttgtctctgattctatttgtctgattccgagtgggatttagggaggggggatttgtgtaatgtgagatttggggagggggggggggacggggacgggcgattgaatcggacatgtgagattttgggagggggggggacggggacgggcgattgaatcggactttcttttttttggctcgcgattgggattcgagggcgggggctgctggtgcgcaccgccgacggacgaaggcggtcctgtgacgattgtgatgatgtgggatttgaagaggaggtgtgctcaatgtgggattctatttgtgtgatatggaattccgactgggattttagggggggaagggggtgtcggacgaaaaatcaccgcaaggatatgtatgtatgaagatattagcagagttctctcttttataaatcatcccttggattgaataaatacgataccttgg

SEQ ID NO: 21971 - DNA, 1987 bp, Oryza sativa
  ref <308>: DATABASE ACCESSION NUMBER: AK072191
  ref <309>: DATABASE ENTRY DATE: 2001-12-06
ggcccgtttccccaccaccaccaccaccaccacctcccctctcccattcgaccaaatcggcgaggggaatagcccccccgcgcgccgcgcctcctctcgtcgccggcgatggccgacggcgaggcctcctccggcgcgtacagggagttcaaggcgctgacggaggcggcggaccgcaagttcgcgcgcgcgcgcgacgtgccgctctacggcggcggggtggaccaccacagccggaaggcgttcaaggcgtacacgcggctgtggcgcctgcagcaggagcggcggcgggagctcgtcgcgggcgggctgcggcggtgggagatcggggaggtggcctcccggatcgggcagctctactacgcgcgctacctccgcaccgccgagccgcgctcgctcgtcggcgcctacgtgttctacgaggccatctacagccgcgggtacttcgccgccgcggcgcaggtggtggtgggcggcggctacaggcaccagggcctcctgatccggtacaaggagctgcggttcatcgcgcgcttcctcgtcgtggccatgctgatgcggcgggccgaggcggtggaccacctcgcttcccgcctccgttcgctcgtcgaggagaccaagtcggcataccccaaaaccaacttcaaggaatggaaacaagtgcttcaagagcttgggagattcttgaaagctgatggagcatacaagggatctagatcactgagatatgacaacttgtttgactcttttccgtcgaaccttgcacctattgcacgattccattcaaaaagagtactgaaactgaaagaagctgtattgacaagctatcacagaaacgaggtgaagttcacagaactaactctggacactttcagaatgctacagtgtctggagtgggaacccactgggtcttatcagattgctgccaaagagcttacagaaaatggcactataagtgatcagagtggaccctctggcctgattgatatccacctatcatcagaaatatctgatggaaatcttcctgcaaatcctcaaaaggcaatcatatatcatcctacagtatctcatcttctagcggttctagccacagtctgtgaggagctttctcaagatagcatcttacttgtctatctatcagcatcaggtttttccgagcagaacattacttctcaaaagtatgcctcaagctcatcatatgcaagggcaacttccgtgtatcccatcgataagccaaattccaatggcaattcagataatcatctatggcttggtccccgtggaagtggaggtccaaacaatctttatccagaagatctgattccctttacaagatatccactattccttgttatcgatagtgaaaatagtcatgcattcaaggcaggctatacataatgcagagaagggagagccagctgccttgctactttcacctaggatagcatcagcaatgcctggtgtggaatccacgagtaatggaagccaatttacgtacttcctcacagctccaatgcaagccttctgccaattagctgggataacttctgacatagacagcgatacatatgctaacgcggaaatcatacttttctccgctttggaacaatatgaaggaatcctctgcacatctgttggattgaacaacgtctggggacaaattttaccagatccttttctcaggcgcctgatcgtcaggtttattttctgccgagcagttatattctattttcaccctgaggagaatggtgaacatataccaatctgcctacccagtcttccagaatcagtcgcgccaaatgctgaagccatcatggcccccatccttgagtttgcagaaaaccttgttgtgagcgaccggtttcatttccgacattctgtccacaacaataagaaatgatgatcaggagcaacaactcaatccttctgtagatacctccatggtatataatcaagttatttgttgatttgttcgtatttatacagc

SEQ ID NO: 21972 - DNA, 2244 bp, Oryza sativa
  ref <308>: DATABASE ACCESSION NUMBER: AK072192
  ref <309>: DATABASE ENTRY DATE: 2001-12-06
tatccttctcttctccgtttgcttcgctgctgctgctgctgttctacgcgcgcgacacggaagagagaaaagtggttttttattgggttcctaagccctttttgtttccagaggcttctggattgatcggttgatctctctcccttcccctctagggtttcctgggggtggatctgaggagcggcggcgctccttcgtcccggtttatgtaaatctgatcgatccagaaagtttgtgaaaaaagagtgtggcacatacctaaagctggcttaaagtttgcccatagctaatatcatgggcgctctttgtgatttctgcggggagcagaggtctatggtttattgccgatcagatgcagcatccttgtgcttatcgtgtgaccgtaatgtgcattcagctaatgctctttctcggcgccatacaaggacacttctgtgtgatagatgtgcttcacagcctgccatggtccgctgccttgtagaaaatgcctcgctttgccaaaattgtgattggaatgggcatagtgctgggtcttcagctgctggtcataagaggcagaccataaactgctactcagggtgcccatcatcttcagaactttcaaaaatctggacatttgtttcggatattcctaatgtagctcctgagccgaattgcgagcaagggataagcatgatgagcatcagcgacagtggtgtcagtaatcaagacaatgctgcaggggacagcagtttgttagatattgctagtgcaacccttatgagtgatcttggcactgctggcaagccaaagtctttgataggctcctcatctgaagctggcgtgaaccttcttccacttgctactgatcagatggctggatccgtggattcgacatcagctaaggtgccctatacggcagaccaagatatgttcagcaaagacagtatatatgaagatttctgtgtggacgatgttgatcttagtttcgaaaattatgaggaactatttggcacctcccatattcaaacagagcaactgtttgatgatgctgggatcgacagttactttgaatcgaaggaaataccttctggaaactctgatgagcccaagctgatgcagccagtgaccagcaatgcagtatctgctgattcagggatgtcgatcccaggagccaaaggtgattccagtctttgtatacctgtgaggcaagctaggtccagtatctctctttcattttctggtttgactggtgagagcagtgctggagattaccaagattgtggggtatcaccagtgctccttatgggtgagcctccttggcatcctcctggccctgaggggtcatttgctggagctaccagagacgatgctatcacacgatacaaggagaagaagaagagaagaaaatttgacaagaaaatcaggtatgcatctcgcaaggctagggcagatgtgagaaaaagagtcaagggccggtttgttaaggctggtgaagcatacgactacgatccactctgtgaaacgaggagctactgaacacaataaaacattatccaagtgttaggttagcaagcatcaaccaatgcttgttgtggctggcaggaaggcactcatactacaaacaatgtggcaggcctgcctctaaaaacaacaaaaaaaacagagcaatcaaggggacaaaaaggacaaaaagatttgaatttgggaaatttttcagatgctaccccctcctttttcttctgtacagtggagggaatttgcatctttctgttgctttcgggaggagcgatttgagtcgctgcccaccttttgtgaattaatcttgatacagctgaacaaacttcacttgcatttttatctcctttctactaaccagagcatccacctacccttgctgtggtgtttttggtggtatgcttccagattggactattagcaagacaaggatggatgtagtcgtgaaatcttctgctgctctatttattgttatgtaaaatctgctgtaatccggagtttattctgcaactctgcatgtgtaaataccagatcagaataaactggtagatgtaaagttttctttattttctcaagtcgatgacattggaacccatgtaaccggccaccaacttttttgtttcactatgctcaaatattcgaaaacttcagactggcttaatgctattatttgtactaagcatatgcttgaatatgcggtcccttttgttacaagtaatattctttttgtggttgatttgacctttt

SEQ ID NO: 21973 - DNA, 1517 bp, Oryza sativa
  ref <308>: DATABASE ACCESSION NUMBER: AK099251
  ref <309>: DATABASE ENTRY DATE: 2002-08-28
gaatcagtgagagagcaacaggcgtttattgagtctcacgtacttacgtagtgtatagtgatagcagtagtagcattcatggcgtcgtcgtcgtcgtcatggctcgtgctgctctcagccgcgctctgcatcggcgcgctcccggcgtcgcacgccgccggcgccttcttcgtcttcggcgactccctcgtcgacaacggcaacaacaactacctcatcacgtcggcccgcgccgactcgccgccgtacggcattgacacccccgaccaccgcgccaccgggaggttctccaatggcaagaacatgcctgacattatcagtgagcacctgggagctgagccggtgttgccgtacctgagcccggagctggacggcgacaggctgctcgtcggcgcgaacttcgcgtcggccggcatcggcatcctgaacgacaccggcgtgcagttcgcgaacatcatccacatcgagaagcagatcaggtacttcgagcagtaccaggaccggctgcgcgcggtggtcggcgacgagcaggcgaagaaggtggtcgccgggtcgctggcgctcatcacgctgggcggcaacgacttcgtgaacaactactacctcatcccgtactcgccgcggtcgcgggagttctcgctgccggactacatccggtacatcctctcggagtacaagcaggtgctccggcacatccacgcgctgggggcgcggcgggtgctggtcaccggcgtcgggccgatcgggtgcgtgccggcggagctcgcgctgcacagcctcgacggcgggtgcgacgccgagctgcagcgcgcggcggacgcgtacaacccgcagctggtggcgatgctggcggagctcaacgcggaggtcggcggcgacgtgttcgtcggcgtgaacaccaagcgcgcccacgacgacttcatcgaggaccccagggcgcacgggttcgagacctccacggaggcgtgctgcgggcagggcaggttcaacggcatgggcctctgcaccctcgtctccaacctctgcgccgaccgcgactcgtacgtcttctgggacgccttccaccccaccgagcgcgccaaccgcctcatcgtacagcagttcatgcacggctcgctcgactacatcacccccatgaacctcagcaccatcctcaagctcgaccaacaagctcaactccgcaactgatcaatatctcgccaccatgattacaacctgcatgcattattgcaatcaatcagaatgatcgtcagatcgatggattgatctctctccgtaatttactgtcatttggatttttcaagtgttcgacgtacgtactctacgtacgtccgtgattagttttagtttttgctagatatatagcgtccacataaaccatatttgagcttagctcgatcatcatccggtcagatcgattgctcatcagctagtgtgtttaattactcctacatatgtactgtgttgtgtatgtacgtggtgttcttgttttgaatcacatatcattattgataggt

SEQ ID NO: 21974 - DNA, 1639 bp, Oryza sativa
  ref <308>: DATABASE ACCESSION NUMBER: AK099252
  ref <309>: DATABASE ENTRY DATE: 2002-08-28
gtcgtcgctgcattccggttgagtgagttggtgattatctgtagggggtgaaaatggcgcaggcggtggtgccggcgatgcagtgccaggtcggggccgtgcgggcgaggccggcggcggctgcggcggcggcgggggggagggtgtggggagtcaggaggaccgggcgcggcacgtcggggttcagggtgatggccgtgagcacggagaccaccggggtggtgacgcggatggagcagctgctcaacatggacaccacccccttcaccgacaagatcatcgccgagtacatctgggttggaggaactggaattgacctcagaagcaaatcaaggacaatgtcaaaaccagtggaggacccctcggagctaccaaaatggaactacgatggatcaagcacagggcaagctccaggagaagatagtgaagtcatcttatacccacaggctatattcaaggacccatttcgaggtggcaacaacatattggttatgtgtgatacctacacaccagctggggaacccatccctactaacaaacgtaacagggctgcacaagtattcagtgatccaaaggttgtcagccaagtgccatggtttggaatagaacaggagtacactttgctccagagagacgtaaactggcctcttggctggcccgttggaggctaccctgggccccagggtccatactactgcgctgtaggatcggacaaatcgtttggccgtgacatatcagatgctcactacaaggcatgtctttatgctggaattaacattagtggaacaaatggagaggtcatgcctggtcagtgggagtaccaggttggacctagtgtcggtattgaagctggagaccacatatggatttcaagatatattcttgagagaataacggagcaggctggtgtagtgcttacccttgaccccaaaccaattcagggagactggaatggagctgggtgccacacaaactacagcaccaagagtatgcgtgaagatggaggatttgaggtgatcaagaaggcaatcctaaacctatcacttcgccatgacttgcatataagtgcatatggtgaaggaaatgaaaggaggttgacaggtttacacgagacagctagcattgacaatttctcatggggtgtggcaaaccgtggatgctctattcgggtggggcgagacaccgaggcgaagggaaaaggctacttggaagaccgtcgcccggcatcaaacatggacccgtacgtcgtgacagcgctattggctgaaaccacaattctttgggagccaaccctcgaagcggaggttcttgctgctaagaagttggccctgaaggtatgaagaacttggacgatgaatcggggcaaataaatcccagcaaaatttgtttgctgcccaccagtcttgatcttgtatttcttctgtctggggattggtctgtacaaatctgcagtttctagaaaaccacgccaccttccattcgccagttaacattttggttgaacaccacacttgatctgggtctgtattttgagtccatttgtgagtgacagaacggatgatgaaacacatcagggacacttttaagtttcttcagtcctgcgtccttccctcgaaataaaaatgtttccttgtttttt

SEQ ID NO: 21975 - DNA, 3373 bp, Oryza sativa
  ref <308>: DATABASE ACCESSION NUMBER: AK072193
  ref <309>: DATABASE ENTRY DATE: 2001-12-06
gggagtatactgcagcccgagtggctgacaagcttcgtctccgatatgatatgatgtgcccctgtcctggcgacagcggcgccatctccaccgagctcggccgtctgccccgctcatctcgcagccccaggtaccacacatccttttcctcctctgcattctccttttcgacctttctcttcattgtggcacgcttgctggtggattgtgctgtgcacaccagctgtttgtgggaatgtctaagccattgtgctgtgatgatgtgacagtttatttgtgcagtaattcttttgagagggatctccctaaggcatccgtaatattaatgtcgttagtgtgagaatctagtctttttcttggatgacggaggttcatatcaccagaaaataaatcattttgtaatagcttcgccgctgaaaaaaaaagttacaataacatgtgccgtttgttttcagccagagtttttgaaaacatgcttatgtgttatccagtcagttattacaggagccaaagatgaataggagtagattacaaggtagttaaagttgtcatatttatccttgcagctgcccaaacgggaaaacatgagaaccatgtactaaccatttaactattgcaaagaaatttctattttgtcctccatttcttgaaagatctgccacatgacagaataaaaaaaacatcaatagttgtgttgtcttccaattgcaaaagaaatattactcataaatcacacaagccttcaactgaaggcaccgatatacagaggaccataatgcatgaaagaaatttgggtttaactccgttatttgtgagcctgttgagccatattccttgttgatttgtaacacatatgaaatttgaaccacgcgtgtcttcagaattttttctaagcatctgtccgtgtgggacattcatatactgtaaggtggggcctaattttctctatgaactcctcgagctccttactgacactattcaatttgagcacagtaaggtttggtcgcaactcacagatgcccaatgcaacttctggtgagtagttggaagtatttgaagaattatctgcccatttaatatccccatcaagaactaagctctcaacatagcgaaggcttggtgcagtgaacacagatgatggaatcttgtccccagtcaatttcaaatgcccaaggagctctagcttctggagagcacgttccaatgctactccatggttggcatcattaaatccatgcaactccaaagactgaagattggtcatcatgtccaatggacatgtcagtccaccccaattttccgcaggttttacaccatgtagagtttgtaggttattcagttcaccaacggagtttggcagttgaagctgtgcagcgatcacgtgccgcaatgtcttaatcctccagaattttggcgcaataattttgactttgctgttccttatgtctagggtctgcaagttgaggagccttccaatgcttgatgggagattctccaaatcacagctggtaacacctatgtaccgtaagtgaatcatatcgccaatcgcatcgggcagctcagcaagatgtattccacctatggagattacccgaaggaattagagccacacagaaactttaatgggtctttccttggtatgttctttgggtcattcttcaggtccggtgtagcgctggcaccttctccctcttcgacacgacatatgaaggaacgcagcttggggaatctgtttccaaaaggaatatagtttccactgtcattctgaatggaaaggcggcgcactgctgctggtgcaagaacatcagtgttatcatgaatctcaatgaagctagcttcacgagcctctgattgcaggaaccgtagaagtcgattgtgaacctgcactaactcaatcttttcgcattcattcctatatttaacctcaactaggaaccttgagataagctccttgagatattcttgggctaggtcctccatgttcttgcccttttctggcttgatgaagccctcggctatccacatgcgcattatctgatccgcagggtgagtgatatttgtagggtaagcagcaaagtagaggaagcatgatttgaggtcatgcgggaggtcatcaaaacttgttgagaagatcctctcaattgtcattctattggacagtttagcttctgtggttggcatcaactgctggagcaaggcatcccactcaaagggcttttctttcgtcaagagaacaccggctatcttgttaccttgactctctcccgcttctacgccaggcataagctgttgcagcactgaatcccactcgacaggcatctcttttgaccgtaatagtcctgccaaaaccacaatcgctagaggatgacccccagttatcttaaagacttgttcattgtaactgactttataccctcttggcttcgtgtagttgtaaccatagaccctgcgacagaacagttctgcactttggctttcattcaacctgcccagctggattgtacttccactaatgtttttggaatcagcatctacttttttgttgagggtgtcagcatgctttgcaacttcctggctctcaggctctaagataagcaccactctgctgccatttctgttgtctggcaagcttgccttcacacaattaagcactgttatagagtttatgccacccaggataactagatacctcttatcatgcagaaaagaacggagcttcttggtgatatcagtatcttccccttctgatgatagtcaacatgagtgtgctcttcccaataccagtctcccccaatatggaaatgaatctttgctgtggagtatgttcatgagaaaggagatgattctccagtgccctcaagtaaccatcaaatcccaccggagcgtccccaatgttgtccctggaaattgagttgcatgaaggattaaatgattgtggaatcggtaatgacttcactagataattcaaattcaattatagtcgcataccatgcagcaacttctgtgatggaagatgtccatgccccagagatttgcgtggtgcagccggttaagtatctgcgccagattctccaaccacggtaaccctgggcctctagatcgacctgcagtcatgtaagagaaccaccaatcatttgtaacccaatgacgtatatcacttctttgaacacatagcatcacatcgtgttgttaccagtagctagaatttctggcataggaggtacaagtacagtgggaaaaattcacgaacctgcagccatccacatatgcatctacaccagatttgcatcatttacttaccccctatgtcctagtttgtactgaaaaaaactgcctcctccctatctgttcacaattatcagcattgacaacg

SEQ ID NO: 21976 - DNA, 1325 bp, Oryza sativa
  ref <308>: DATABASE ACCESSION NUMBER: AK072194
  ref <309>: DATABASE ENTRY DATE: 2001-12-06
gtgagtaaactagataagcaaccatatcctgcctagttcactacctaagagatattgagctagtaaaatgttgcacgtttgctgccaaacatacggctattctctccttccttggtcaccaggatgacacaggtgctggaaccttttatgtaccaagcataccaatgaccaatgtggaatcaagaatgagtttatccagactgggattcctccctggacttgtgaactgacccctgcattgcaccaaggtgtgtatggtgattgtggtggtgcatgggttgatgaggagtaagataagtggctttctgtaagtgcttctgcaataattgtttaactgaaagctgaagaatctgctattcatgcagtcatacggtgaatccgaagaccgagtctgtgaaattaagatatgctgccgaaaaaggatggttgaatgttatagatgacttagatctatcagcctttgtatttcgtttaggtggaatatatgggccaggaagaaggtttcagtctgctaaaatttcaatccattttattttgtagtctttgaaccaaaagttatatttactccagaactgcatgacttggctactgaaattctgaattccaccaataaaatcaaccttttaaaattaaagatttggagcactttttatctgatttcaaccaatacggtgtacaacttgtgctacaaacttgtcaagtatgtaatggatgaaaatgagaactttttcatgggaggcttttgttacagttcccaatacttgctttctaaaagtgccactattatgaccctttgtgttgattattgcagtgcagtggacacaatagccaagagcaaatcttttcacgaagacagaaatcgagggaatccaaacagtacactgcacgaattcatgtggctgacatttgtcaggctatcctggctagcatgagcatcagaagtgcaaggaggatatacaacgtagtggatgacgaccctgccccaagatctgaggttttcgcatttgctcggagcttggttgagaggaagcatcctggcctgataatggattctgtagtactaccagctactcaggacagaatcgtagctgctgagaagcgggtctctaatgctcggctaaaagaggaacttggtgtaaagcttcttcacccaacctataaatcaggcctgcagagtattttggattcttggagtgtcgaatcttctttttcaaataggaatgttgacgtttagcatgtgtatataactatgtgaattgttttgattttgtgctttgctggaactatgaacccaaaaaattatatattccattatgtcctcttcc

SEQ ID NO: 21977 - DNA, 3262 bp, Oryza sativa
  ref <308>: DATABASE ACCESSION NUMBER: AK072195
  ref <309>: DATABASE ENTRY DATE: 2001-12-06
ggtagtaagccgcagtgaggccgagctatccttcctctccttttcctcctcgcacacagctctctcagatccaaagccgtggagaaatcgcgcgaatccctcgcctagatgcgcgacgccgcttgctgctacagctgccgccgccgccgctgctgctagggttcttgcggagatgcggggtgtcgagtcgggtggcggaggcggcggcgcgtcttcttcctcccccgccgccgcaggtaattttgatgctgggcagtacgccttcttcgggaaggagccactggagggactcgagctcagttgcttggaggatggcggcggtgatggcaatggcggtggattcagcgggccagaagatgggctgtaccggctctcttctgttggagaagagattgataatctgagtaacttgtcagaaattgatgatcttgcgagcacttttgcaaagttgaaccgaagcattagtggaacacggaatcctggtgttattggtgacagaagatccatctcaagaggaagttctctaactgttgattgggctgaagatgctgagtttcccaactgggtagatcaagacatattagagggtgaggaacttcaggaaagtaaaagatggtggtcacagtcacgttctctggggcagcaaggggatgccaaaccattgagccgaacatcttcatatcctcaacaaccattgcagcaccgcgcaagtgaacctatcattgcaccacaatctcctccatttacatcctttccacctccaggtgctagatcaccttatactgctcaaggccttacacgtcatgggagcattccatcagttggtgctggtctacaaatgggttctccaagcatgtcacttccaagttcttcatatcatatggctggactatctcatggactaccatatggagggagcgtgtcctttggttctccaaatcttcctggaagcaatccaatacaaaatgattggccaaaccaagccaacccgtatgctgtggatcaatttaatctacttccgaacatgttacagaaacaaatatcacttccaaatagcccaatgtcatcactgctattttctcaacagcagcagagattggcacaagttcaagtccagccatcccatcagaattacctaaatttaccacctcacctattttaccaacatcactccccagagttaacaggaaggtttgattctatcaacaatgttccttcattgagagacaagaggtcaaggtcaggaaggggaaaacacagcacacgtttttctcaaccattgactgatactggtagtcaaaatggtgatagtggtggactaaaattcaggtctaagtacatgtcatctgaagagatcgaatctatcttaagaatgcagcattcagcaagtcacagcagtgatccttatgtagttgattattaccatcaagcttgcatagcaaaaaagggtgccagttccaggcaaaaggccaattttgccccaacatcaatgaaagacttaccttccaagtccagatctagcagtgaccatcatgcatatcttcaggttgatgctctagggagggtttctttctcttccatacgtaggcctcggtctcttcttgaagttgaccttccttcatctggtgatggttctcatgatcagaagtcttctctgaggcccctggagaaagaaccaatgctggcagctagagtcactgttgaagatgccatctgcctacttcttgaggtggatgatattgaccgtctattgcagtctagccaggcacaagataacagtttccaactgaggcgaagacggcaggtcctccttgaaggtctagctacatcacttcagcttgttgaccctcttggtccgagcaaatcaagccattcatctggattggcccctaaggatgatcttgtttttcttcggattgtttctcttcctaaaggacgcaaacttttgtcacggtaccttcgacttcttacccctggaagcgagttgacccgtataatatgcatggctatttttcgacatctgaggtacttgtttgggggtttaccatcagattctagtgcagcagaaacaacagttgctcttgcaaagactgtttcatcttgtgtgctccatatggaactaggtgctcttagtgcttgccttgctgctgtcgtatgttcatctgagcagccacctctgcgtcctcttgctagctctgctggtgatggggcttctcttattattaaatcagtactggaccgagcaaccgagttgctgactgaccaccatgctgcagccagctatacagtgtcaaaccgaactctctggcaggcatcatttgatgctttctttggactcctgacaaaatactgcctcagtaagtatgaaagtattaagcagatgtttgtcatgcagtcaccatgctctgtaactggatctgaagtctcgaaagcaaccagcagggagatgccagttgagttgctacgtgcaagccttcctcatacaaacgatcagcaacgccagctgctgcttgattttgctcagcgaacaatgccagtgaccggtattaatcccactggggcaaatggtgggtacatcacctctgagtctgttcctggttgatatagctgaagatgccaaagggtcgatcgcaaatgcttaaaaggactcgatgcacttgtcttgcagatggcaattcatatatatctggagacatgcatgcccttcataagatgtgagcttggaagaaagttccatttgctcagggaaaaactagccttcttcagattgtgactttaggtttcagattaatctcgtagaccaacgatctcccctttctgtgggtcatttatatagcacccacctgatatgcatatgtacgtacactgttgtaacactatgctgtgatgaactagccaactcgttgggggcaaaatttagtttttaacattcatattccccagcgaagaagacgtccaagattagtgggcttagcagcagtggttgtacaggtactagggccttcctgtctgtcgttttactggtgtggaaggtgcctagcgtcaagtaaacactagtctggtcttaatctattttagtcaggaccaaagtgtgttggaataatgaagttctgtttattaggtttcttggaaggatacttaaaatgtcatggagatgcctgtatttccaggtgcctactgacactatatggtggggtactggaaactgggggtatatctcttaattgtaaatcgttacagtttgttgtcatttcatttcttc

SEQ ID NO: 21978 - DNA, 4146 bp, Oryza sativa
  ref <308>: DATABASE ACCESSION NUMBER: AK072196
  ref <309>: DATABASE ENTRY DATE: 2001-12-06
ggtcagccctacccactgctgacctccatcacggggcttcagcaacaccccccccccccccccgcctcgttgccctctgtcgtactcctacccaaaaccataaccttcatccatagattctctactaaagacagggaattgtcagcgacggcaaaggataggtgaggagctcatcgtcgtcattgccgttgatggttagccctggttgccaccttccccttaaacaccgttggtaaagttcgggaatatatcctatgcacataagcttccagtgcacactccatacacaccaactagcaaatatcacagaaaattctagaaaaaaaatagacacatactcctaatagtattacacatatatgcaaagtctcatattcaaattcattatattttatccgtaacaaaaaagtgaaaaatctgacagtttttatcgtaaaaatctgtcagaattttatcctttttgttacagctaaaatataatgaatttgaagttaagatttcataggttggtttaatactattagaagtatgcgtccaatttttttacaattttctatgacatttgctaggtggtgtgcacggattgtgcacaggaagctcgtgtaaataggataggatatgttcccgtaaagtaaagttcaacgttacaaaaccagtggacttcttcaatcccgttgcaatcaacttaggaaccattatttagatatgattagctgtaggttacacagacatgaatgggcagcagtagactagacagtggtccaaatcagtgcaactacccatctgcacggtgccaaaaggcccccatgcaaataaatggccaattcgaaacatgtactagtagcatatctcatcgtagcgcccccagacgctgtactgcacacgcacagtgccacggagagagaaaacagccttgacacaccggacaaatcatttaaatgcacacagggatgttacacaggacatgcatttgtcacatttttttattttatttatttttccttgatggtgtacatgtactggtggtagtagtactacaacccatgcttttccttctttttgcaaacatttttctcttttttttttggccctctcctttgtcagatactgagcaaaagggccgacaaagtaagcattgtgaatgacatcgtttgtggggacatgcattggaccactgaatgattttgcaatccattgctttatgattggagctgtttctttcttttttatttgttttttgtttattttttattttctcctctgctagctggtactcatgtttcagtgttattttttccccctagcttggaacagttctataccattgttgcctggaaacaatgtatagtatgtgtagtactacattatattctttcttgcaagtaatgtgttactgtaactactttgttgttgacaacacatagctgtcgatatatgtacagtagtatatatggtcctgcctgctttcaacatcagtgaatttttatcttactgtaaagatctaaaataaatcatcatgcatttcaatccacaagtaaacttaaactcatgtatggttgtagccaatattcctttttggaaagatggtactattagctacaaggaataccttagtaaattccaaatatattagaggtagtaagtagtcggtgtcctggagggagagttgagaggtaagtagactacacacataggtgtcaaggaaatactccttcaggcttcggtcataagtttaggacatagacatagatgtctccgaaatacagaccttaatccttaatttcaatcgtaaaacatttaaaaacctgataaagtataatattgtgaaagttgttttcgaggtaaatcaacatgtatatatgattttcgcacattgaatctaaatgtgttaacaaatatattgatatgatttttaaaagtttgatcatttgaaaaacctttacgaggtaatcaacacacataaacatgattttcacacatctaatctacatatttaaaaatatattgttgcaatttttaaaagttttatcacttgaaacaccactgacattaatacacgttatcatgcatgatgggtctaattaaattagaagctagcttgactatattatttagaaaaccaatttaggtgttctcatatcatgatcgatcttcccactaggctttagatgaacaacaccgacatcccttcaaacctcagaccaggtcccattttgtattattatattatatatccaattggatctagcttttatactacttcattagagacccgtacgtatctaacttattgaccaccgtgtgcataattgtatgacaacctcttaacgatagtaacacttacttgcacaagccctagttgaaaaggaataaaatagcaataatatatatgtgaaaaactagttaattaaatggctgcccaactacacacatatttattgtgaggtggcaaaaatcttgcctttgctaatcttgacctcatataaagttagaacccaccagacatctcaatctcaacatgcaagcattatttattagtacttttaaaacttaccatgtaagcatgccacatcaatctactaaacacctaaagctcaacatgcaagcatagtaattatatttacaattttattacattctaaactcaaatgtatacacacacgctaaatcatcatcctcaaatcatttttcaaattatttcaatccaaattcaccaatcatttatacaacattcaacacactttcattcatatatcccacgacaaagcgcaaggtgtcatctagttatatatatgtaccctgtcaataataacagttggatgtggcttacgttttgttatgtgtgccacaccattccaactaatcttaaattaaggacataattaaagactagaaatatagatctggatttggtggcaataatccgagttgtcacatgacaatatatatagactagttatagcgcagtatggccccatttgaatcttctatagatgaagattaaaagcgggcacgcaaaacgagaaagtcattaacgcatgattaattaagttttaattattacaaacttggaaaatggatttatttgatattttagagtaacttatatatgtaaagttttcgcataaaatacaccgtttagtagtttgaaaagcgtactaacggaaaacgaggaaaaatctatatctttatgaagttagaacgggccgtacatagtccttgttgctctgctaaattatgatcaacatatatcggtttttatgatgcagtcacttacattctaaatctgttacatatgtttggcaactatgggcatacaccacctttttttttaaataataggcatcaatatttgaaccctgatatatgaagtaattcttacaactttaccaccacatgtatttgaaaaaaaaaaccagaacacgtataatcggctaggtggaacaagtagagagttgaagctaggtagagactggagaagacacatacttatatatatgcatcacaagaagaatataatcattgtcaggttagatattttctctgtttttttttcatgtgcaaatgatacattacaccggtcaccaagttgcaaagaggcattacaactttcaagcacccctagtgtcatgtagtgcatgagaatataatctactgcacttacacattgagaataaatacaaaaatgtaatgaaaaactaagaaaaaagagagcaaagtgaaagaggggactatcgtgttgtttcgacaaaacaaacaaaccactcctaattaattttttttcatccatgtcttgtttcatcgcgcattgctgatatcgcggcgacgcaggtatcgatctgagtatggtcataaacagtatatctgaatgtgcaatgcatgggtccatatatatagcaagcaagcaagcaagagcttgctagctagctagtcatgatctatgctgtgccagctcggtcttcctagcgtgaactcgaggctagggctgctcagttcatggctggatacttgcaagctgcttgatctacaaggctccatgtcctgatccaattgtacaaatttatgtgtgtcagtgtagtttataaaacagtaatatataccatgtgagttataaaggaaagaaattaaactgaatgtcagtgtagt

SEQ ID NO: 21979 - DNA, 1755 bp, Oryza sativa
  ref <308>: DATABASE ACCESSION NUMBER: AK072197
  ref <309>: DATABASE ENTRY DATE: 2001-12-06
gggtccgggtccaggccagcacgaactacgcccacaacgaacttttagctgtgtttagcttaagccacccaccactcgcactcgcgtacgtactcgtcgcatgtgagttagctttggtcgccggcatggcgctcacggcggcggcggcgagcggcggcgacgcgcacgacgacgagtacgcgaagctggtgcgggggatgaacccgccgagggtggtggtggacaacgaggcgtgcgacgaggcgacggtgatccgggtcgacagcgtcagcagccacggcacgctgctcgccgtcgtccaggtcatcgccgacctcggcctcgtcatccgcaaggcctacttctcctccgacggcagctggttcatggacgtgttcaacgtcaccgaccgcgacggcaacaaggtgctcgatgaccaaaccatctcctacatccaaacggtactagtgctgttcttgatcgaaatttggggattgaattaatttgtttgttgatttgtggtttggttggttgattgatttttagacgctggaggcggatgactggtactacccggaggtgaggaacacggtggggatcgtgccggcggaggagtacacggtgatcgagctcaccggcaccgaccgaccggggctcctctccgaggtgtgcgcggtgctcgccggcatgcgctgcgccgtgcggagcgccgagctgtggacgcacaacacccgcgtcgccgccgtcgtgcacgtcaccgacgacggcggctccggcggcgccatcgaggacgaggcccgcatcgccgacatcagcacccgcctcgggaacctcctccgcggacagagcggcgtgcgcgccgccgccgccgccgctccgggcgggctcacccacaaggagcgccgcctccaccagatgatgttcgacgaccgcgactacgacggcggcggcggcgccgcctcctcctcgccgcgggggcggtccccgaccccggcgacggaggtgtccgtgacgccgtgcgcggagcgcgggtacaccgcggtggtggtgcggtgccgggaccggcccaagctgctgttcgacacggtgtgcaccatcaccgacatggggtacgtcatccaccacggcgcggtgagcagcgagccccgcggcggcgcgtaccaggagtactacatccggcacgtcgacggcgaccccgtccgctccgaggcggagcggcagcgcgtggtgcagtgcctcgaggccgccatcgagcgccgcaccgccgacgggctggcgctggaggtccgcaccggcgaccgcgccggcctcctctccgacgtcacccgcatcttccgcgagaacggcctcaccatccgccgcgccgagatctcgtcggagcgcggcgaggccgtggacacgttctacctctccgacccgcagggccaccccgtggaggccaagacgatcgacgccatccgcgcgcagatcggcgaggccacgctgcgtgtcaagcacaaccccttcgccgacggcgatggcgccggcggcggcggcggcggcgccaccgatgacgtcgctggctcgacggcgttcctcttcgggaatctcttcaaattctaccggccgttccagaacttcagcctcatcaagctctactcctaattaatttactccaacctgggttaattaattagctgtaaataattacttagttagttagttttatgtttttttcttctagattttactgtaaatatgatttcagatttatgacgacgacgaagatgatgtagg

SEQ ID NO: 21980 - DNA, 1219 bp, Oryza sativa
  ref <308>: DATABASE ACCESSION NUMBER: AK072198
  ref <309>: DATABASE ENTRY DATE: 2001-12-06
gaaccggtcaaaccctagcttctcccttcctctcccctggcggcgacggcctcaagcccgggaggcgcacgggtggcggcgttcggcggttcagggagcggtgtccggcgccggagcttgcagctgaagaggcggtatcttgctgaggctacaacatcgattttctccatccactcatctcccaaaaccaaagggaggctcggtgtgtagtcaaaaattgaaggagagggagggagagggtcacgggacagtttgcatggcatgatcatattttgctaaggttctattagagtgtcattcaatggcccatttcatggatttacgggctttcatcctgcgtgcacgtgttttaaagctttataggcaggccttgcgcatgactcgccgagctcctgtgcatgcatgcgatgagttgaggcaaactgtaagagctgagattgaaaaaaatcgccgttgcgacgataaacagaagattaagttcttgatcagtgaaggtctgcaacgattaaaaggccttgatgagatgcttgacatgacaggaaatagttaacctgagtttcatgtcggatatgaggttcaatttacacggaagctgggtttgcatgagctcctgcaaaacattcattgctctgtgacctcctacacctgatatttccagaacccataaggcatcaggccacatgaacttgtggcctcctggattagagtttgttagaacggacccattcagattctttgcctcgttctatccaggggataggaaagatatcaggctcagatatattatcatggtagatcatcgatggtgtgcgtgcatatgggacgaaaatgcagttaccgaggcatcatgcttgattttgcacacatctattcagtcaagatatgctagcgagctttagaagcaattgggatttctttagatgctatcttgagaccctgaatttccaggtgttacatctgagaaaatagcagctagagatggattaagctgaagaaaggtatctgacttgtcgtttaggtacgtctgctttgaggcgatgatgttcaactttttcagacccgatggcttacttttcatatttgagatactgacctcatgtttcagtcctgatgttcttaccatttcttcgttgcaatttcttagctggtatgatgaggtcattaaacatgtactttctttccaactatttcattatatgccacaataaagatacttggt

SEQ ID NO: 21981 - DNA, 2034 bp, Oryza sativa
  ref <308>: DATABASE ACCESSION NUMBER: AK072199
  ref <309>: DATABASE ENTRY DATE: 2001-12-06
gtggcgccacttgcctcccatggctccccctctctgacctcgccggagcgccgccgggatctcgacggtgatgccgccgccgccgcctcccccaccgcccccggcggcgccggatccgccgcagctccatggcgtggtcatcatcaccctccctcccccggaccagccctccaagggcaagaccatcaccgcgttcacctacaccgacgacgacgtcaccccgcccccgcctacgcctccgccgacgcatctgccgacgcgggctctagtgcccgcgggggcgggggcgggggcggaggctaggcgatcgaggcgggggttctcgccgcggcgggcggcggcgatggtgctcgttctcggggcgctcgccgtcgcggcatactactccttctactcggacgtggccgtccagttcttggggatgcaggaggaggcgcagaatgagaggaacgagaccaagtcgttcctgctgccgctgtaccccaaggcacggcaggggcgcgcgctgcgggagtttggagacatcaagctcgcggccagaagattcgataatgacggcggagggggcgtcggcaggaaatctaggaacaaattggaggtcaagaaggcagctgcggcggggacgaactcgacggctctgctcccgatcaaggggaatgtcttccctgatgggcagtactacacatctatttttgtgggcaatccacccagaccttattttcttgatgttgatactggaagcgatttgacatggatccagtgtgatgcaccatgcacaaactgtgccaaaggacctcatcctttatataagccggcaaaagaaaagatagtccctcccaaggatttattatgtcaagagttgcaaggcaaccagaactactgtgaaacatgcaagcaatgtgattatgagattgaatatgctgatcgaagctcctccatgggtgtccttgctagggatgatatgcatattatcactactaatggtggaagggaaaaactagattttgtgtttgggtgtgcatatgatcagcaaggccagcttttggcctcaccagctaagaccgatgggatccttggtcttagtagtgcaggaataagccttcccagtcagctggccaaccaaggcattatttccaatgtttttggtcattgtatcactagagatccaaatggtggaggatatatgtttctaggggatgactatgtacccagatggggaatgacatcaacacctatccgaagtgctccagataacttgttccacacagaagcccaaaaggtatattatggggaccaacagctcagtatgcgtggggcatcagggaactcagttcaagtgatttttgacagcggaagttcatatacatgcctcccagatgaaatatacaaaaaccttattgcagctatcaaatatgcctacccaaattttgtccaagatagttcagatcgtacattacctttatgcttggcaactgattttcctgtgaggtatttggaagatgtcaaacagctcttcaagcccttgaatcttcattttgggaaaagatggtttgtaatgcccagaacattcaccattcttcctgataattacttgatcattagtgataaaggcaatgtctgcctgggattcctcaatggaaaggacatcgatcatgggtcaacagtaatagtcggagataatgctctgcgcggcaagttggttgtgtatgacaatcaacagaggcagattggatggactaattcagactgcaccaagccacaaacacaaaagggctttcccttcttcctctaacaagtattgtgcaataaacatatgtaaatgatacatagagactaccaatagagctgcttacgaatagcatatcctgttatgtgccgccctatctcctctacagtccatagtataaatcctggttgtttgttgtatacttgggtactttttgtaatatagggtgttgtatacccaagaagcagtgtatgtatattcggattaatggagtttcagatataataatcattatcgttattaagacc

SEQ ID NO: 21982 - DNA, 1363 bp, Oryza sativa
  ref <308>: DATABASE ACCESSION NUMBER: AK072200
  ref <309>: DATABASE ENTRY DATE: 2001-12-06
ggttctctcttccttttctcttccttctcaccgatcctggaatggtctcggagggttcttagctggcttttcgattggattagcagcagccgggtcagacggagcggaggccgtgccggagaagggagaaggaaagtttcaggtgaacatctaacatggatgatcacatgggaagacggacagttggtggccttctcttcaccaaggggggctcaattcttctcttcagagaagacagtgcgcgtcacaaggccaccaattgctgcacgcgacacggttgcagcagcaagcatttggccggcaaagacaagcaaacacacagggcagcaacagcagccaaggaagcatcagaaacccctgggagatcacagattttcaggaaacccagcacgaggactcctcagggaagtactgctactgataacatcagcaggaatgcagcaagctcctatagcgaaaacgacaataggccaagagaaactccagggcgtgatttaatcgctcgtctcaaagagagggtcaatgcatcaagaaaacgatcattgaacagagaaaacagtccatcatcaccaaatggattaagtgctacttcctcaagtagtagccgcacagtctcaagaccgtcgcatcgggcagcttcccgaataaggaaggcagatgaaggtgcaaatgcaggagctgtaaatgtacgcagagacagcagtggagataccaggaggaattcagatagggatgtcgatgatttcttgctagttgagcaggcagcaagagatagcactgaaggattcatatctggattcttggcaagatacagaagtaatcatcagggactactttcatctttggacgacagcatagaggatgcaaatgggtactggcgcttcaatatggaaggaagtgaagagcttgagaactacttcatattcaatgatcggtacagagggatgagaatggacattgacggcatgtcttatgaggaattgctagcattgggagatagaattggcaccgtaagcactggcctttcagaagacgcgctgtccaagtgtctagacagaagcatgtacatggccactacttcaggaactcatgaagattgtgagagaaaatgcagcatatgccaggaggaatattcagatggtgaggaggtgggcaagatggtctgcaaacattactaccacttctcctgcataaagaactggctccggcagaagaactggtgtcccatttgtaaatccgtcgctctgaataccaactagcactagcagggtgcttcttcagaaaccaaatgtacagattctccatgaatgttctacccagacacaatttgcattctttttttgatactcttttagatcgaacc

SEQ ID NO: 21983 - DNA, 1111 bp, Oryza sativa
  ref <308>: DATABASE ACCESSION NUMBER: AK072201
  ref <309>: DATABASE ENTRY DATE: 2001-12-06
gatcgcggagttgacccgtattgctgcaggcagctgctgcttttcttgcggcaaccggagctggtgctggcctcgccaggttcaggttaatggtcaaccaccaccaccactagttgcgctactgagacagagcaatggaggagggggcgaagatcgggagggagcacgagcagcagcagcagcagcacgggagggtgaacggtagcgggagggtcgcggccgtcggtggcggcagcggcggtggcggggacgagattgagattgaggtcgccgcagccgcaggggcttcgccgtcgcggcaacacggcggtctgcacggcgatgtccaggcacccacttggaagagatttcttgcacatgttggtcctggatttgttatctccatcgcataccttgatcctagtaacttgcagactgatttggtagctggatccagccacagatattcgttgctatgggtactcctatttgggttcatatttgtgttgactgtacaatcattggcagcaaatttgggtatcattacaggaaggcacctcgctgagttgtgcatgggtgaatatccaaagtatgtcaagtactgcctatggttactagcagagcttggtgttattgctgccactataccaggagttttaggaactgctttagcctacaacatgctactccacatccctttctgggccggtgtcctagcatgtggggcatgcactttcctaattctcgggttacaaggatatggggtaagaatttttctctgcttataaaataaaaaagggtaaattacactagcggtccttaaacttgtaacgaggtttcacttaggtccacgaacttgcaaaacgagcatcgagatctctaaacttggtttaatgtatcatcctagtccaaagcatcgtttgactgtggtcttgcctacgtggcatgccatgtggacgatgacatggattttttaaaaaaaatttctcccttctgccactgacaggtactggcagggcctctcttaccttacttttccctcactttcgccggcgaccgaagcggcgacgggcggggtggccgacgagaaaggagaagagcgagggagccggcaggcgggaggagaggcgcg

SEQ ID NO: 21984 - DNA, 1895 bp, Oryza sativa
  ref <308>: DATABASE ACCESSION NUMBER: AK072202
  ref <309>: DATABASE ENTRY DATE: 2001-12-06
tgatcccaaaacccctctcgctcccatttccggtgtgactctggccacgatggccaccccctccacctccgcctccggccccgcccccgccccagcgccggcctcctccgcctttcccctcaccgccgccgcgcgtttcctccgcgtctctgccttctccagcacgcgcgctttcgccctcgctgagcggcgccgcactccgcggtgccggctatccgaggtgggaggcggcgaccgctcggtagccgctggccgctcacccggcccccgttccttccacggtctcgttctctccggcaatgcagaaggagccatgcaatctcttagaagagagctaagttctgggatgcaccctttacgcgaaaactttgtggctttagtccatgtttttgccaagaatgatcttactaccaagggcatggagattcttgcagctatggagaggcagagcatcaaaagtgaagcggatacttttcgtccagcaaaaatacaagaagcttttggcatgaggagatgcagcaaatcgctgctgcaacttggtacacttccatgttgcactatggcatggttaagttttgcacaaacagcacaggctagtgaaggaacaaatataaacatggtttatgaggttggggagctatttgagcttggaattcagttgtcttatcttctcatactacttggtcttcttggagctggtacattttttgtcattcgtcaagttcttgtccgtagagagcttgatctttctgccaaagagttgcaggaacaagtgagaagtggtgatgcaagtgctactgagtattttgagcttggagcagtcatgctacggagaaaattttaccctgctgctatcaaatatctacagcaagcaatccaaaaatgggatagagatgagcaagatcttgcacagatgcaatctcttagaagggagttaagttctggggtgcaccctttacacggaaactttgtggctttagtgcatgtttttgccaagaatgatcttgctaccaggtgcatggagattcttgctactatggagaggcaaagcatcaagagagaactagagagctctaggcggaggatgttgctagctgcaggggctgctgtgtttctttcttggcctaatctggcagcaaacgcagcagaggctaagaaagggttcttacctgtaaccgacaagaaggatggatactccttcctctacccatttggatggcaggaagtggttgttcaagggcaagataaggtttacaaagatgtcatagagcctttggaaagtgtgagcgtcaacacaattccaaccagcaagcaagacatccgtgaacttggtcctccagatcaggttgctgaagctcttatacgaaaggttcttgccgcacctacgcaaaagacaaagttaattgaagcaaaagagaatgacgttgacggaagaacttactacacttttgagttcacagctcaagctccaaatttcaccaggcatgcgcttggtgcaattgccattgcaaatggcaaattttacacgttgacaactggagcaaatgaaaggagatgggagaaaatcaaggataggctacatacagtcgtcgattccttcaaaatcgaggcaagagtatgagggaggtggcgaggtgtgacatatatcgtgctgatttttcctgttggttttcttcgtttcaggtgctccaactggtgtggttcaatggtaaatgtcggaaacatggattttactgatctgttttgttttgagatgtgtgacacgacttcaatttgtacgtatatacatcttcccaatgtcgatcctgatccttctatttgtatgtactggtgaggttaagaaaatatgtaaatgatcctttgaatcgcaatgttgattataagggccatctgtg

SEQ ID NO: 21985 - DNA, 1845 bp, Oryza sativa
  ref <308>: DATABASE ACCESSION NUMBER: AK072203
  ref <309>: DATABASE ENTRY DATE: 2001-12-06
ggctaggtagctatggcagctgcttcttcctcgcgcgaacaaatcaattctcagaatagaatataataacctccctttaattgctgtattttattccctaatctcactgtttacagcgacgcaactccgattaaattcgcccacccgtccagccatttctactcgtcttcctcctccctccaccttaaacctcgaggagtcaagaatgggggtggacgctgctccggatcgcatggacgcggcctcttcttggatgaatcctccggttgaggtctcctctccggtggccggcggcggcggaggagaggatggggcagcgaccaagctgcagaaggtgtaccggagctaccggacccggcgcaagctcgccgactccgccgtcgtcgtcgaggagctctggtggcaagcgttggatttcgcgcggctgagccacagcaccgtctccttcttcgacgacccgaaaccggagaccgtagcgtcgcgatggaaccgcgtcagcctcaatgcctccaaggtgggtcagggtttatccagagacggcaaggctctgaagctggcattccagcactggatcgaggctattgacccacggcatagatatggtcacaatctgcatttctactatgatgtttggtgccaaagccaggccggccagccattcttctactggcttgatattggggaaggaaaagatgttgaccttcctgagtgtcccagagctcgcctgaagaagcaatgcataaaatatcttggtccgcaagagcgtgagctctatgaatacatagttacagaagggaagattatccataagcactctggagaaccacttgatacaagccagggtcctaaagggacaaaatggatttttgttatgagcacaacaaagaaactttatgctggcaagaaagagagaggtgtattccagcactcaagctttttagcaggaggtgctaccatagctgctgggaggtttacagcagaaaatggagttatcaagtccatctgggcctatagtggtcactataaaccaagtgcagagaacctcgccaacttcatgaacttccttgaagagaatggagttgatctgaaagaagttgaggtgcgctcatccaccaacgaagactattatgaagatccagtgcctaataaacagaaccctcttgctaccgtcatggaatccaatcctccacaattgattctccctcagaacatgatagaagaagataaggcatctgagccgttttcgcaagctgaaggtgccgaaagcgataacgttcctaaagtgcaaacaaagccaacctaccaaagaaccctctcaggtggtctgaaaagccctagagctgctgatgtcccgcgggaagcaattctcgagagggtgaaatcgaagggagagtcgaaatcctatcagctcgggcacaggctctccctgaaatggagcactggggttggtccaaggattggatgtgtgaaggactacccaatggagctcagaatgcaagcactggagatggtaaacctgtcaccaagggcgtcgactccatcgccgtcatggaggctgccagcatgcctctcacctacacccaacttaccatcatctcctcttggaccaatccagacttcactgccccagccaagttagaatagcatatgagtatgtaactagtatgtgcagcagcgagacaccattgcagaattgcagttaagctcttggtgtagaatgcattggccagagtcagatgctagaggttaatgcctgctgcttttcaaaggttatgtggatctatttgtgccatgaatgaatcaataagattagtaatataaatcctccatgtttgaattttgttt

SEQ ID NO: 21986 - DNA, 2641 bp, Oryza sativa
  ref <308>: DATABASE ACCESSION NUMBER: AK072204
  ref <309>: DATABASE ENTRY DATE: 2001-12-06
gaggtgtcacaggtttcttctcctcttatccttcctttccatcggttcttgtacttggtggtatacccctagctgctcgcctttgtgttaatttggttggattgggagtttcttgttctctctttagccttgagcgatcttggtttcttgcaattagcctttgactgcttcttcttcttccacttgccgccggcagctagaagtggtccatcgtaccaaccctttcgtcctcattgaaccattccgcctcgctcccagctccattactagaagcactagagctagcgtgaatgcgtgatccttgatgcgtagttagcagctagctcctgcccccaatctgccatctccgcattgcgattttgagtttttgagattgtaatttgcgaacgatctcggttgtgctgagagcttagcgttgacttcgatgggtgcatcgcgttcgatcgccgattctgatttggtcgcgtgatccgggggtgatcggtgattactccgagcgggaggggagatcgtctcttggcgcggttgcgcttcgccgcgcggagggagagacattcgcggcgtaatccgaaggtgtttgttggatcgaggcgtggtgtccgagaaagattcggagcggcggcaatggggaacacgtgcgtcggccccagcatcagcaagaacggcttcttccagtccgtctccacggtgctctggaaggcgcgccaggacggcgacgacgcgctgcccggcgccaatggcgcccctgacggcggcggccagggccggttgccggcgccgccgccgccgacttccgacgcgccgctcgccgtccaaaacaagccccccgagcacgtcaagatcgtctcgaccacggacaccgcctccgccgagcaggacgcctccaagtcgagcgccggctcggactccggcgaggccgccaggccgcggccgagggtgccgccggtgaagcgcgtctccagcgccgggctgctcgtcggctcggtgctgaagcgcaagacggagagtctcaaggacaagtacagcctggggcggaagctcgggcaggggcagttcgggacgacgtacctgtgcgtggagcgcgccaccggcaaggagttcgcctgcaagtccatcctgaagcggaagctggtcaccgacgacgacgtcgaggacgtccgccgcgagatccagataatgtaccacctcgccggccaccccaacgtgatctccatcaggggcgcctacgaggacgccgtcgccgtgcacctcgtcatggagctctgcgccggcggcgagctgttcgaccggatcgtccagaaggggcactacaccgagcggaaggcggcggagctcgccagggtcatcgtcggcgtcgtcgaggtgtgccactccatgggcgtgatgcaccgtgatctcaagcccgagaacttcctcttcgccgaccagacggaggaggccgctctcaagaccattgactttggtctctccattttctttcgcccaggtcaagtattcactgatgttgttggtagcccttactatgtcgcgccagaagttctgaaaaagaaatatggtcaagaggcagatgtctggagcgctggtgtgataatttacatcttgttgtgtggtgtgccgccattttgggcagagaacgagcagggtatatttgaagaggttttgcatggtagacttgactttcagtcagaaccatggcctagcatctctgaaggtgccaaagatctcgtaaggagaatgcttgttagggacccgaagaagagattgacagctcatgaagttttaaggcatccatgggtccaggttggtggtttggctcctgacaagcccctggattctgctgttctatctcgtatgaagcaattctcagctatgaataagctgaaaaagatggctcttagggtcattgcagagaacctatctgaagacgaaatcgccggcctgaaagaaatgttcaagatgatcgacacagacaacagtggacagatcaccttcgaagaactcaaggttggtctgaaaaaagtcggtgctaacctccaagaatccgagatctacgcactcatgcaagccgcagatgtagataacagcggcacgatagattacggtgagttcatcgctgcaactctgcatatgaacaagatcgagcgggaggatcacctgttcgcggcgttccaatacttcgacaaggacggcagcggctacatcacggccgatgagctgcagctcgcctgcgaggagttcggcttgggagacgttcagctcgaggagatgatcagagaagtcgacgaagacaacgatggtcgcatagattacaacgagttcgtggcgatgatgcagaagccgacgatggggctcccggcgaagaagtccggcgggctgcagaacagtttcagcatcggcttcagggaggccttgaggatgtcttgggaaacagccactagagtcagtcacacacttgtagaggcgacgacaacgagatcgatatgttgtcttccatagggctggtaatttcgaaacggggaaaaaaatggctggaggagatgtgcgtgtacgtacaggcgtagaggggggtgggtcactcttgggtcattggttcgattgttttcttctgacgttaaaaatacaagagaggtttttcgttccc

SEQ ID NO: 21987 - DNA, 1880 bp, Oryza sativa
  ref <308>: DATABASE ACCESSION NUMBER: AK072205
  ref <309>: DATABASE ENTRY DATE: 2001-12-06
ggcacgcacgcacgctcccctcctccttcgcgccgcgccgccgccactcgccaccaatccccctcctccaccaacccctccacgcctcacctcctcgcgctcaaatcccccacgataaatcgaacctaatcattcaccggattttgttcggagttttccgcgatccgtcgcctcctcgtcgagccgcaatcagtggtgcgtgggtgggcgagcatgagcatggcgttctcgtgcgcgggcgcgcggctgcagcaggggcgggtcggcgtggggaaatgccggggtggtggtggtggtggcggtggcgccgcggtggtgaggcggagcggctgctgcctctacccgggcgggaggagggggctgggggttagggggatccgcgccgagctgccgccgcgggcctgcgcggatgggggcggcggcgccaccacctccggttcgaccgtcgccgtgcctgatgctggggaggttgctgaccacgtgaaggaggtcggcgcggttgcacctccgagcgtgctcccgaagggggagcgtggcgaggtagctgatgttgacggctcgggtgggaatgggaagttaccctccagtggcggcggcggagatggggataatggtggtggcggcggtggtggtgatggtggggacggtggggatgaaggggatgatgagtttgggccgatcctgagttttgatcaggtggtccaggaggtggagaagcgaggggtcagcttgcccagcttgcccgcggatatgattgaggccgcaaagagcgtcgggattcagaagctactgctgctgagatacttggacatgcaggcatcggcttggccgttgggtccagccattaggtcctgctcacttctccggaacaggatgctagttgacccttcatttctctttaaaatcgggactgagatagtcattgacacatgttgcgcgacattcgcggaggtacagaagagaggggaggagttttggtcggagttcgagttgtatgcggcggatatgttggtaggcgtagttgttaatgtagctttagttgggatgttggcgccatatgctcgatttggtgggggatctgcatctccaggtcttcttgggcgtgttaggcatgcttatgactctctcccaagcagcgtgtttgaagctgaaaggccaggatatagtttttccattcaacaacggataggaacatacttttttaagggtattttatatggtacagttggattcttttgtggtcttgtgggtcaaggaattgcgaacttgataatgactgccaaaaggagtgtaaagaagtcagatgatgatgtacctgtcccacctctgctcaaaacttctgcattgtggggtgcattccttggtgtgtcttccaacacccgttatcagattattaatgggcttgagcgtgtggttgaggcttcacctgttgccaagcgtgtcccagctgtttctctggcattcactgtcggtgtgcgctttgcaaataacatttatggaggaatgcagtttgtggactgggctagaatgaccggttgtcaatgaggtgaaggcattcttattttcatgttatcattcacagcgatgtggagtgttgccagccatagactcccaaaatttgtcgaatttgctccgtctctatttaaagatgtgatgctattaccaataattgcattgctgcagagctccaaaataaatgaggtcgtatgttctgtttagaatgcaacaggattcattgtaaaatcaggaaagtttcagcatgtcatagtgcttagccttccatatgcgcaaatcagtagctccaagatttagaagattggatgtatattgaattcggttgtttctcttgtcgaataaattcggtcatcttggtttgggct

SEQ ID NO: 21988 - DNA, 668 bp, Oryza sativa
  ref <308>: DATABASE ACCESSION NUMBER: AK072206
  ref <309>: DATABASE ENTRY DATE: 2001-12-06
ggtcgagtcgccggattggtagccgccctgctcgtgctgcattcgctagccacgccgtccgctcaggccgaggcgcatcgcgcagggggaggaggggaggagaagatgtcgagcgacggagggccggtgcttggcggcgtcgagccggtggggaacgagaacgacctccacctcgtcgacctcgcccgcttcgccgtcaccgagcacaacaagaaggccaattctctgctggagttcgagaagcttgtgagtgtgaagcagcaagttgtcgctggcactttgtactatttcacaattgaggtgaaggaaggggatgccaagaagctctatgaagctaaggtctgggagaaaccatggatggacttcaaggagctccaggagttcaagcctgtcgatgccagtgcaaatgcctaaggcccatctcgtatcctatgtgtatcaagttatcaagaagatggggaataatatggtgtggatatagctattggacatgttaattatccacatgataatatggcttggatataaggatctcacacgataatatggcttggatatatagctattaaagattttacctatggcatatttcaatgtgtattagtactaagtaagaatgattgcaaggtgtattaactacaaatattgcaataaaagtccctgttact

SEQ ID NO: 21989 - DNA, 1686 bp, Oryza sativa
  ref <308>: DATABASE ACCESSION NUMBER: AK072207
  ref <309>: DATABASE ENTRY DATE: 2001-12-06
ggcaacaaacgcacccacacatggatctcctccggcgagtcgccgtggtagccgtgctcctgtcgctgccgtcgcgtggccgctccggcggcggcggcagcgatctgcacccggtcgtgctcgtgccggggtacgggtccaaccggctctacgcgcggctgactgcggcgtacgagccggcggcgcctcgctgcggcgcgcgagaggggaaggatgagtggttccagctgtggccgatcgacgcggcggcgagcgaacccgcccaggccccctgcctcgccgagaagatgagcctcgtctacgaccccgtcgccgacgactaccgcaacgtcgccggcgtcgtcaccagggtcccctccttcgcctccacccgcgccttggttgggtgggacccactggtgcggcagctggaggcgatgggccaccgcgacggcgggagcctcttcgccgcgccctacgacttccgctacgcggtggcgccgcggggccacccgtcggcggtgggcgagcgctacttcgctcgcctcacgcgcctcatcgagagggcgagccggctcaacggcgggcggcctgccgtcgtggtggcgcacagcttcggctgcgcgctcacgtaccagttcctgcgcgcccgcccgctcgcctggcgccaacgcttcgtcaagcacgccgtcctcctggccgccgcgctcggcggcttcgcggaggggatggacggcctcgcctccggcgccggctccggcctccccaacctcgcgccgccggcgagggccaggcttgcgcggagccagcagagcgcgctctggcgcctgccgacgccgatggtgttcggtgaccggccggtggtggtgaccaagaactcgacctactccgccaacaacatcaccgagttcctcgacgccatcggcttcacggaaggggtccagccgtacgtgacacgggtgctgccgatgtggcgggcgctcccggcgccgatggtgccggtgacaagcatgtacggggtcggtgtcaggacgccggagacgttcgtctacggcgaagctgggttcgaggggacaccggaggtggtgtacggcgacggcgacgggaacatgaacattgtgagcctgatggctgcggaggagtggtctggggtggaaggccaaatcttgaaggtggtcaggttgccaggtgttagtcacgttggcttcttcagcgatcttgctctcaagaaagtagttgctgaaatacagaaggcagttagcagcatagagtgaaggatgttgatgaagccgaaagatgcacgctaaggctggggctctttgatctcggtattgcttgaagctgctgagaacttgcactccgaggtgggaatggaatgatgctggcttaccttgcgaaggattctgatcttagtgttacctatagtgtgactgtatttagtttctggtgttgctgcttagttgtctaggtaggctagttgcttaagaacctcctgtcttttgggtgacctatgtgcccatggtgcttaataggtaaagctggttttgcctaggtgggacttatgtttctgtgagaatgactaaagtttagtccctccttcccaaacactaccctagtatccatcttttttgctttctaaaaaaacagggctatgtaagagaactcttttaatcacttgaattaacatccacacgtttattacatatt

SEQ ID NO: 21990 - DNA, 2795 bp, Oryza sativa
  ref <308>: DATABASE ACCESSION NUMBER: AK072208
  ref <309>: DATABASE ENTRY DATE: 2001-12-06
gactcttctcgctcgctcagccgcagccactccactcccatggcgtccctcctctgccctgccgccgccgcctcctactcctccctactctcctcctccttcccctccaggcggcggccccagcccagcgccccactggcgtctcccgccccgtcgtctcctccccgccctcgctccgtcgccgcggccgccgcctacggttacggcggcgacgtgctgatgaggcccttcgacacgcagacgctcctcatctccgccgccgtcgtctccgccgtctccctctccctcgtcctcggcctcaaggttgtcgcccgctcgctcgcgctgtctgctctgaattttctctctctctatatatatactatatcgttagccaaaccatgtgctttgctgcaatttttctttttcttttcgtgtttgtttgtttgtttcagggtgatccggtgccgtgcgaaaggtgcgccgggaatggtatatctcatttacaaattctccttgttattttcatcgtctttgttctgatcttctcatgataattttctgaaactgtcacaatatggcaagaacatgaatactgggtctgaacttgtgggaatgccattcgaagttcgttataattaaagaaattagtcaatatatgagcatgcatgcttcacttattgacatgaatgttcattcatcagtcatcacatacaccaagtattttgcacaattcagaagcgtcttgtgcatgcatagtttgctgatggttcttcaattttggtaccttaggaggcacaaagtgtgtcttttgcaacgacggcaagatgaaggttgaaaatggagtagtcgagtgccgtgtatgcaaaggagcaggttatcttcttcatttcatgatccttggtttatgaatgcatagccgcatcctctttattctaaaaatctacaagtttgaggattaattattttgccctgcatatcctagcttaggactgatacaaatttgcaaaccgtatacgaagttatgtatgaaatgtgcatgccttctgtcctctctgactgcgtttttcatgcagggttaatactatgcaagaagtgttcaggttctggttactctaggcgcttgtagccagtgccactgaacatttctttcctttttgttaactatggacgacagggtgatagcttgcatctgattatctgaaacaagctttgtacagatgaatggagaaatcttctatgtctcgagttttaggtacggttaatttttcagtcctatttgtattttatatatttcttctgctattacatgtacaacatagctcacaaggctgactatgcccaaacatacgaacaaagttttttttgaacgactcgcacgagacgatgcgaagttctattaatagagcaggaaaaaattacaagattataaccctggagggtcataaccaagagaaagaaaaaaatataccaccacccacacaccggcagcaccaacacacacgaccaggagaaggttagcaccggaccggccgccgctagaccaacaaaggaacacagatgaaatcgccctacagcaacggggtgccgaaacgacgtcttcaagaagagaagcgacggaagaccgccgccgccgtccatcagggctcaaaggagccaagactgggctttcgcccggcaatcacccttgaggggtgagacagcacgacaacgcccttaggagggggaattcatcgttgtcggtccggccaaggccgggctgggttttcacccgccgctcaccacctgcgaatctatggctgatgcaccgatgctccaccaccactcaaactctgccaacatgtggggcccttgcaccgacgccgccgccggccagccttcgtgtgccgaagaccgcgccacacccaccggcagctccaccacgcaccgaggtcgcctcttccaccgccggtcgcgcctctcgcgccaagccggcctcctccaccagacgtgcctctcgcgccaatccggcctccctccatcggctgcgcctctcgcgccaagccggcctccatctccgccgcccgcgcctctcgcgccgagccggcctccgctgccattggctacgccactctgcgtccagccggtctccgacccctcctccaaacgatgctgcgccggtcgatgcagccgtctgccacgccctcggcaagccgtccgaggctgccatgcctcctcccaccaccgtcacggtcaccacctcaccgtcgtcgcgcggcgagggcgctgcggacgtcgtcgcggtgggtgcgggaccgcgccgtggagctgccggagatggtggcgctggccggggggcggcggaggaagccgcatctgcagcatcatcagcagcagcagctggccggggagttccgctacgaccccgtcagctacgcgctcaacttcgaggaggacggcgacggcgaggcccagccgttcaagtacatggccttctccgcgcggctgccggcgtccccgccgccgccgccgccgccgacggcgctgcccgtcgaccggggttcttgaattgattgttaggccgttcggatgtacatacgtacgggagattaaagtttgggtttctttctcttttttttttgttgtttgattccttcgatttttgttggcgactacgagcgctgatatgtgtacaggaggatttgaatcgtttcttcttttggtttttttaagcagagatttccttttctattacaagttatcttggctctgaagaacgttgtttttttgttttagtgctagtatatgcttctgagaagaatgttgtttattggggt

SEQ ID NO: 21991 - DNA, 1502 bp, Oryza sativa
  ref <308>: DATABASE ACCESSION NUMBER: AK072209
  ref <309>: DATABASE ENTRY DATE: 2001-12-06
tgggcggcgagccgagttccccatcgccatcggtggcggcatctccgtgaccccctgctcaagtggcggcggcggagcgtgcggggaaggaggaggtggaggatggactggtcgaaccttggcggggaggggccggccggcctcatcgccgagcgcgtcctcgccaacgacgtcgccgactacatccgcttccgcgccgtgtgccggctgtggcggctgcgctcggtggatcccctctcccgcgccctggactgccgcttcctcccccggcggtggatcatgctcgacaaggcggcgcccccccgctgccgccgcttcctctacctctccaccggcgagtgcatccgtacggatctcccggagctcgagagccacaccctggtcgcgctcgccccggagggcctcctgctgctgctccaccagcgcaccctcctcctccgcctgctcaaccccctcacccgccacctcaccgacctcccgccggtcaccgcgctgctcacgccggagcaactgcgatcttggcattcggatggggggttagaagacgatccgctattggcgcgtggcgtcggtcttgcatccgcaaccacagtggctctcttcctctgccgccccaagttgatcgccgtcgctaaacccggcgatgagtgctgggccgtcgtcgtcgccgacaagaaccgcccctacattgactcggctttgcccttcgcagggcgcttctactgcgccatcggcggcagtgtcatggtgctggacagctctccttcttcagatcagatcatagagggcggccgcggctggtcaccaccgctcagccgagcaagcccttgcatttctcccggatgtcaggaactattcaccttgtggacaatggtggggagtttgatgctggtgtaccgtaagatccgccagagcaatgttgatgatgaatcgcggcaaggtgctgcgaaatacgagatgaagtatgatgtttacagggtggatttcgacgccggggacttgatcccggtcaaggggttgggcgggcgagctgtgttcttgggcctgtgccgctccgtcactctactacctgcagaggctcgcagctgacactctctacctgggattcgattgtcgtgaaaagactcagatgaacgaaatcgacggttacaatgttgcagatgggagtagcgagccatgccacctcgactccatcttccgtgagatgtcgcagcaggacggttacagtgttgcagatggaagcagcgagccatgccacctcgactgcatctttcttcagatgttgcagcagccatacagcttcgtcaactgcctctcccactgcatccagggaataggcgatcatcttgcctaagctcgcggatcatccggtggtcgttcggtggcgatctgaaccttgcatcctttgctttggcatcacttgtatcgttgttccttgcgatgaaacagcatctgtaccccccaagtaattaatttatgaagatgtgcttacgcgcttattt

SEQ ID NO: 21992 - DNA, 1846 bp, Oryza sativa
  ref <308>: DATABASE ACCESSION NUMBER: AK072210
  ref <309>: DATABASE ENTRY DATE: 2001-12-06
gtacctacaacgaccacgacgactcctctcctccctttctctctcttcacccgcagcacgcgcgccgccgtctccggcgatggaagttgccgccggcgcccgcggcggcggggccggcggaggagggggaggccccgcgccgttcctgctcaagacgtacgagatggtggacgacccgtcgacggacgcggtggtgtcgtggagcgacgcctccgacgcgagcttcgtcgtctggaaccacccggagttcgccgcccgcctgctgcccgcctacttcaagcacagcaacttctccagtttcatccgccagctcaacacctacggattccgtaaaatagatccagagcgatgggaatttgccaatgagtacttcatcaagggacaaaagcacctgctgaagaatatccacaggcgtaagcctatccacagccacagccatccaccaggtgctctgcccgataatgagcgtgcaatatttgaggatgagatcgaacggctttcacgagagaaatccaacctccaggctgacctctggaaatccaagcagcagcagtcgggaacgatgaaccagattgaagatcttgagcgacgagtgcttggcatggagcagcgacagaccaagatgattgccttcttgcagcaagctagtaagaaccctcagtttgtcaacaagcttgttaagatggcagaagcatcttcgattttcacggatgctttcaataagaagagaaggttacctggtttggattacagtatcgagaacacagaaaccacaagctcttatgatgaccatagcagcacttctaagcaagaaacaggcaatcttttaaatcagcacttctctgataagcttaggttggggctttgtcctgccatgacagagagcaatatcatcacgctaagcacgcaaagctcaaacgaagataacagaagccctcatggtaaacatccagagtgtgacatgatggggagggaatgtctcccgttggtgccgcagatgatggaactctccgataccggcacatctatctgcccctccaagagctcttgctttgcaccacctataagtgatgaaggcctcttaacatgccatctgagtctaactcttgcatcatgctcgatggatgttgacaaaagccaaggcctcaatgcaaatgggaccactatagacaacccaactgaggcagcaacagctaccatggaaaaggatgacaccattgacagaagcttcgatgacaaccaaaagaaatcagctgattctcgtacagcagatgccacaacaccacgagcggatgcacgagtagccagtgaggctcctgcagccccggctgcagtggtgaatgacaagttctgggagcagttcctaacagagcgacctggctgctctgaaactgaagaagcaagctctggcctaagaacagatacttccagggagcaaatggagaacaggcaggcatatgatcactcacggaatgacagagaagacgtggaacaactgaaactctgaatttactatagaattatacaatttacaagaagggatacaggcgtacagtgtaagatgtttagaatcaggaacctgctgttaaacatgacagatcaatgggtgtacaacatcacacaggtgtacatattttttttccctgaatgtttcggagggttaagattaatagttcgattaaccacaccagttgttgtaaaatcgatgtgtctgtctgtctggcatggtttctcatcttgttggtagtgatttatgttatgcagtgtcaagctgccacagcggagaatcaaaattagcatgtacattacccttaaatatccttttcgtaaaaatatttttacgatc

SEQ ID NO: 21993 - DNA, 1896 bp, Oryza sativa
  ref <308>: DATABASE ACCESSION NUMBER: AK072211
  ref <309>: DATABASE ENTRY DATE: 2001-12-06
ggctgccctgtggagcctcaaattctactcgcgttttcatgactgccctatagatcagctcctgattggaaggactgtagttccatgagatagaagggcatattgaagtagaatttggcctttggtgaatctaaatggacagtggcttgggaagaagttcagagacatccttgaaagccttgccatcaatggcaagtaatgcaacaaggaatactgatcctgaccaacagggtgttcgattcagttccatggaccagcctccatgttttgcaagacctggtcaatcgttccctgcttttcctccactctttggggttcagtcttccagcttgtatttacctgatgacattgaagctaaaatcggtaaccagttcgaatcaaatccttccccgaataatcctacaatggattgggaccctcaggcaatgctgagcaacttatccttccttgagcagaagatcaagcaggtaaaagacatcgtgcagtctatgagtaatcgtgagagccaagttgctggtggttccagcgaggcacaagcaaagcagcagcttgtcactgctgatctcacttgtattataattcagcttatttcaacagctggttccttgcttccttcgatgaagaacccaatcagcagcaacccggcactcagacatctcagtaacacactttgtgctcctatgatcctgggcaccaattgtaacctgcgaccaagcgcaaacgacgaagccacaattcctgacattagcaagacccatgactatgaggagctgatgaatagccttaatactactcaggcagaaagcgatgagatgatgaactgccaaaatccttgtggtggggaagggtcagaaccgattccaatggaagaccatgatgtgaaggagagtgatgatggtggtgagagagagaatctcccccctgggtcttatgtagtattgcaattagagaaggaggagattttagcaccacatactcacttctgcttgatctgtggcaagggttttaaaagagatgctaatcttaggatgcacatgaggggccatggagacgagtacaaaactgctgcagctcttgcgaaaccttcgaaagattctagcttagagtctgcaccagttacaaggtactcgtgcccatatgttggctgcaagcggaacaaagagcacaagaagttccagcctctcaagacaatcctgtgtgtgaagaaccactacaagagaagccactgtgacaagagctacacctgcagccgttgcaacaccaagaagttctcagttatcgcggacttgaagactcatgaaaagcactgtggccgcgacaagtggctatgctcgtgtggaactaccttctcaagaaaagacaagttatttgggcatgttgctcttttccaagggcacacgcctgcactccctatggatgatatcaaagtaacaggagcatcagagcaacctcaaggcagcgaggcgatgaacaccatggtggggagcgctgggtataacttccccggtagctcatcggacgacatcccaaatcttgacatgaagatggctgatgatccacgctatttctcgccattgagctttgatccttgcttcggtgggcttgatgacttcactcgacctggatttgacatctctgagaatcccttctccttcttgccctcaggatcatgcagcttcgggcagcagaacggagacagctgatcgaggccaacgttaacgatgacggcaatggccttgcctacctttgtgtaccttgtctagccctattcttcctctgttgaaggagccattttaggtcattccttcttcctgaagtgtactttattttatgatcatcagtaatgatcaagtactttttatctttccttatagattgagatagcccaatcttggt

SEQ ID NO: 21994 - DNA, 1349 bp, Oryza sativa
  ref <308>: DATABASE ACCESSION NUMBER: AK072212
  ref <309>: DATABASE ENTRY DATE: 2001-12-06
ggccggaagtcgtcgacgtcgaggggacgaggagcccaccggcgagcggtggcgccacgggggaggaaggcggcgagctgggcgtcggcgagaactcgaggagaccgacgagaggccagtccaccaccgcgcagccacacaggcacggggaagagtggcgcgcgcggccgccggagaaggctatggcgtggatctggatgctcatggcggcgggggccgtgctcctgtgggcggtttctctggggcgggtgctctcctcctcctcgccggcgtgtctgcctgccaactccaccttcctctcccctcctcgcggcgacaggatgagccggaatgtcctcctcgttctcgcccaccccgacgacgaatccatgttttttgctccgactattcttttcctcaagtcaaaaggtcacagcattcatatcttgtgcttgtctcaaggcaatgctgatggccttggaaatatccgcaaagaggaactctaccttgcctgtgtcactcttaagattccagctgagcaagttaaagtcttggaccactcagaactgcaggatggatttcataaaaattgggatcatggactaatagcagaacttaccctggcacaatcccagttatggaatatcgacacgattgttgccttcgattcccgaggagtatcaggccatccaaatcattgcgatgttcatcatggaatctgcaagcttctgcgtgacaacgggcaaggacacattgaagcatgggagcttgtaagcttgaacatttttcgcaagtacagtggtccagttgacatttggctatcttccaccctctcctcaagctcaaaacaaccaacttatactcttgttaataatagcccttccagaagctttgaggcaatggcttcacacaaaagccagtgggtttggttcaggagattgtttgtcctattctcaagctacacatacataaatgtgctccaaaaaatttgaagtttgttgtcgtgccaaagcaagcaccttccggctcagattgtcaaatgcctgtacatgcagagtgccagagtgtaagcgggaagcttctctgaagaaagacaacaatgttgacattggatcaggaattcgaaagatactgaaatgtgatgatgaaatgcaacagtttaggaacctttgtgattatatgccctttatacttgtgttgtaggccatcgattgtgttcatagagttagattggacctctgtatcctcagctagtttctcttgcttgaagagttattgccgttgttggacgatcaatctatattgcagtgttacacaaggtaactgatgaactgatattactatgctgtcgctcaagctgtattcaagcc

SEQ ID NO: 21995 - DNA, 1500 bp, Oryza sativa
  ref <308>: DATABASE ACCESSION NUMBER: AK072213
  ref <309>: DATABASE ENTRY DATE: 2001-12-06
ggtgctgctcccgaactccaaggaccccgccttcgcgagctttgtctgcgacctgcaggcccacgtcctcgcctcgtcctccgaccaggctgcagaatttactgatatggaaggcgaatcatctgcagttacttcaccatttcctgctctgacttcaaccacaccaaatgaattggagatgactaacaagaattccaatgtggtaggcggaatgactcacagcaacagtatgcccacattgactgctgcaaaagatggaaataccaaagttttacccttcgaattccgagcacttgaagtgtgccttgagtcagcctgtagaagcctagaagaggaaacgtcgactctggagcaagaggcgtatccggcacttgatgagctgacttcaaagataagcacactaaatcttgagcgagttaggcaaattaagagccgcctggttgcaatctctggtcgtgtgcagaaggtgagggatgaacttgagcatttgttggatgatgaaatggacatggctgaaatgtatttgacagaaaagcttactcgacaagaaataagtgagacttcatctagagttgaggttgatgacccatctcaactggaggtggatagggatgaagattatagaagtgaggcagatgtaagcaatggtacctttattggctataagccacacattgaagaactggagatgcttttggaggcctactttgttcaaattgatggcacacttaataagctatctcatctgagagagtatgttgatgatacagaagattatatcaacatcatgttggatgacaagcaaaatcaacttctacagatgggggtcatgctctccactgcaactgttgtcattactgctggagtggccgttgttggtctttttgggatgaatatcggtatatcgctttatgctgatcctacaaatgaggaggagaaacgagcatcaaacatgaaattttgggaaaccactttgggaaccattgctggctgcacggttatgtacatagtagccatgggttgggggaagagaagtggactgctgcaataatgagggtgccacgatgaatcacacaagttgacgattgctagcctggtcagacaaagctctataaacaagaagacaacatagggctcgactgtatacctccttgaacatatataactgttgctctgatggcttgcatgtgcaaggaacagagatgaaaaggaagcgatctttttagcaactctgcgcggcgatgcatgatgtaactgagagatgtataacaatgtaactcggtttttgatatttcggatggttgcacgattgcttgtctgcaagccgtcgtactaatagtttgtgctgttgtcgtatgtatctgtaagcttcttggaagctgtaaatgaactattacatcatattcataaggaagtactaagagcatgtcttatctgaagggttagtatgagctgtaaatgaacatgttattcatagggaaatactaagaactgtgaatg

SEQ ID NO: 21996 - DNA, 1452 bp, Oryza sativa
  ref <308>: DATABASE ACCESSION NUMBER: AK072214
  ref <309>: DATABASE ENTRY DATE: 2001-12-06
tgttcgattcgacacgacgacactatcccctcccacttccccgactcatcgtcttccacggcctcaccgcgaagccgccggaaaaccaccaccgccaccaccgccaccgctacactcgcgtcgaggtgatcggcgatgttcacctgccggccgctggtgtcccctccgctgccgcggcgcctcgccgtcgcgtcccctctggcgcccgcgcggccgcctccctcgtcggcgtcgtcgctgcgcgtggtgcggtgcatggcgaaggagcggcgggtgcggatggtggcgaagcagatccagcgggagctcgcggacatgctcacccgcgaccccgtcctccagcgcgccgtcctccccgaggccgcgctcggcgccgaccagtacctctcctccctcaccaccatcgccgacgtcgagctctccaacgacctccaggtgtgcaaggtgtatgtctccgtgtttggggacgagagggggaagaaggtggccattgctgggctcaaggctaagactaagtacgtcaggagccaaataggcaagcggatgaagctgcgcctcacgcctgagatacggttcatcgaggatgagtccatggagcggggaagcaggattcttgctatactggacaaattaaaggaggaaagggagcaacaagaaggaaatgaagaagaggaagatggagaaggtgcaaatctatcagaagaagaagaaggtgactgggatgcagatgagccagatgaggaggacatcatatatgtaaaataacctgatgtgccttcttacttgcccatgattcatccaacccccgaatgcagcagctatcttagattttagtcctacaaagatgagaactctctgctttgcaaagtgttccaaagttcctcaacactaggagagcttgtctgttgccaattagaagcagatcatatccttttttacatcgccggtcaaagctgaagctattttggcgcagagttctgaaggaagatttcccctttttctgttcactagaccatggtcttcgaccgttggtgaaagatgctttaacttaagttcatccttgtcgtatgctgactagcacctgttatatgtctgcttaccttgctgaatttcagttctcattttctgttttgtttgggaatggttgtatacctttcagtaaattatgccatacagcagtacctttagttctgtactgtgtattgataaaggcacattttctgatttacgaacttcgaactacgtacttgccattgtgaaattgtaagagctggtagtggctcatctggcaaaacaatcagctgaagaaacagctgctagagaagatgaggtgcctactctatacacatataactcaactgggtttgtaattcggtatcggattagtgtttatatgaccttctgtattttccttctacattgcaagagggatttttctttattcgggctact

SEQ ID NO: 21997 - DNA, 2000 bp, Oryza sativa
  ref <308>: DATABASE ACCESSION NUMBER: AK072215
  ref <309>: DATABASE ENTRY DATE: 2001-12-06
gagcgccggcctcccaccggtcgcgtaagatcacgcccgaaatctttattcattttctctccaccggttgccctctcgccgcacccaaccatcgcgccacgccgcgccgcgctgccggagccgcgctttccgctatgctataagagctgacgcgcagggcacagcggatgtacgtacacacagtcactagctaagctgctagccttgctaccacgtgttggagatggaggctaagccggtggcgatggaggtggagggggtcgaggcggcggggggcaagccgcggttcaggatgccggtggactccgacctcaaggcgacggagttctggctcttctccttcgcgaggccacacatggcctccttccacatggcgtggttctccttcttctgctgcttcgtgtccacgttcgccgtgttcgcgcgtctggccatgggcacggcgtgcgacctggtcgggcccaggctggcctccgcgtctctgatcctcctcaccacaccggcggtgtactgctcctccatcatccagtccccgtcggggtacctcctcgtgcgcttcttcacgggcatctcgctggcgtcgttcgtgtcggcgcagttctggatgagctccatgttctcggcccccaaagtggggctggccaacggcgtggccggcggctggggcaacctcggcggcggcgccgtccagctgctcatgccgctcgtgtacgaggccatccacaagatcggtagcacgccgttcacggcgtggcgcatcgccttcttcatcccgggcctgatgcagacgttctcggccatcgccgtgctggcgttcgggcaggacatgcccggcggcaactacgggaagctccacaagactggcgacatgcacaaggacagcttcggcaacgtgctgcgccacgccctcaccaactaccgcggctggatcctggcgctcacctacggctacagcttcggcgtcgagctcaccatcgacaacgtcgtgcaccagtacttctacgaccgcttcgacgtcaacctccagaccgccgggctcatcgccgccagcttcgggatggccaacatcatctcccgccccggcggcgggctactctccgactggctctccagccggtacggcatgcgcggcaggctgtgggggctgtggactgtgcagaccatcggcggcgtcctctgcgtggtgctcggaatcgtcgacttctccttcgccgcgtccgtcgccgtgatggtgctcttctccttcttcgtccaggccgcgtgcgggctcaccttcggcatcgtgccgttcgtgtcgcggaggtcgctggggctcatctccgggatgaccggcggcgggggcaacgtgggcgccgtgctgacgcagtacatcttcttccacggcacaaagtacaagacggagaccgggatcaagtacatggggctcatgatcatcgcgtgcacgctgcccgtcatgctcatctacttcccgcagtggggcggcatgctcgtaggcccgaggaagggggccacggcggaggagtactacagccgggagtggtcggatcacgagcgcgagaagggtttcaacgcggccagcgtgcggttcgcggagaacagcgtgcgcgagggcgggaggtcgtcggcgaatggcggacagcccaggcacaccgtccccgtcgacgcgtcgccggccggggtgtgaagaatgccacggacaataaggtcgcggttgtagtacaactgtacaaattgatggtacgtgtcgtttgaccgcgcgcgcgcacagtgtgggtcgtggcctcgtgggcttagtggagtacagtgaggggtgtacgtgtgtcgtggcgcgcgcggtcacctcggtggccttgggattgggggggcactatacgctagtactccagatatatacgggtttgatttacttctgtggatcggcgcttgttggtggtttgctccctgtggtttttgtgatggtaatcatactcatactcaaacagtcaaaactttttgatgcg

SEQ ID NO: 21998 - DNA, 1956 bp, Oryza sativa
  ref <308>: DATABASE ACCESSION NUMBER: AK072216
  ref <309>: DATABASE ENTRY DATE: 2001-12-06
gattcgagtcctaccagtagctagctaagcagccgagacggtggcggtggaggaggtggtggtggtggtagtagtagtacgccggggagagagagccgttgctgctgctgtgaggtgagggcgagatctaggagggaggcgtccatgggagctcgctgctccaagctctccgtgtgctggtggccgccgcacttcaagtcgccgctgcttgagaatggcgccgccgcggacgacggcagcggcgtgccggtgttcgccgagtacagcctcgacgagctacgggtggcgaccgacgggttctctcccgagcgcatcgtgtcggagcacggcgagaaggcgcccaacgtcgtctaccgcggcaccctcttcagcaccggccgcaccgtggccatcaagcgcttcggccgctctgcctggcccgactcccgccagttcttggaggaggcgatggctgtcgggcagctgcggagtgtccggctggccaacctgatcggctgctgctgcgagaatggcgagcggctgctcgtcgcggagttcatgccgcacgagaccttggcaaagcatctcttccactgggagacaaagccattgagctgggcaatgagggtacgagctgcattctatgtggctcaggcattggagtactgcagtagcaaagggagagctctctaccatgatctgcatgcatacagggttctctttgatgtggatggtaaccccagactgtcgtgcttcggtctgatgaagaacagcagggatgggaagagctatagtaccaatttggctttcacgcctcctgagtaccttaagactggcagagtaattccagagagtgtggtgtacagttttggtactatcttgcttgatctcctaagtggaaaacatatcccaccaagccatgcgcttgaccttataagaggaaaaaattacctggtgttgatggactcttgcttagaaggccatgtctccagctctgatggaactgagttgatacgattagcatcccgttgcttgcagtatgaaggtcgtgaccggccaaacctgaaatcggtggtgtctgctcttggaaacctccagaaagatgcttctgctccttcacatgctttactaggcatacaacatgataaggaaaatacagagcgaatttcgttatctgctatagcgaaagtttatgccagagcagaccttgatgaggttcatgagatgctggagaatgatggatattgtgaggatgaaagagcaacattcgaggtatctttccattcctggactggccaacaagtatctgatagtattcttgtcaagaaacatggagacagtgcttttcaatccaaggattttgcgactgcagttgagtgctactcaaggttcattgacactggtgtaatggtgtctccgactatgctggcacgacgaagtttcgtatacatggtgctcggcaagctgcaagaaggccttgcggatgcaaagaaagcagcagacatatctcctgagtggcctactgcacactaccttcaagggatggcatatctcgccatgggaatggagcctgaagggcatgaagaactcaagcaaggcgccgctttggaagctgaaaggaatgctagatagagatgaactgtatagccctcaaacatgatgtgatgcctcctctcttctgtacctagatcgcctgcattttgggtgtcctccagtgctttgccaccaatagggctgttttttggtcttccctaacttgtattggtatttccagtggttttacaactcctaggttggctgttatgacacctccaatatattcataagtacaaaaaatgggcaactagcattcaaatagcaaaccgtggatgtgagattgtaaagctttaatgttatttcgtcacaattcatgtatatacacaacttgcagacttttctgaggcgtcaagagttaaagactgttgtgagtaatcagcc

SEQ ID NO: 21999 - DNA, 1694 bp, Oryza sativa
  ref <308>: DATABASE ACCESSION NUMBER: AK072217
  ref <309>: DATABASE ENTRY DATE: 2001-12-06
ggccgccggtggcttacgaaacaagaacagaagcctcctcctctctcttcttctcccatcccccctccccgatcctctcgcccacctccagattcaaatcttgcgagcagtttatccctccattggatttgatccagtgacgtcctaacaacccggctggctggtggaagtggagtttgagagcttgcttgtcctgaaatcacgcctccttcgtctcgggccgggtttcgttggttggtttcttggttctcgagccaatggaggagagttcttgcagattggagtaaaaaaagatcttatgtactagtagtggtggctagtgagtgatctgggtttcgttcggtttgttttgtttcgcctccccccaatttggtgctttcggtgtctgtgcgaagcgtgttgggatgacgaaccgattggatttcttgtgagcgactactcctgattgtttcgttgttgattcgcctttatttcattgattagagtggaaaaagggcttatcgtttttattttttttggctatttgtgagcaattttttgttctcctccatctagcatgtttgtttgtttgtaattgcttcagaaggcggcgagtttgcttaatttttggtagaaaatttatcttcattggatctatagctatagcgaagatttggattcttgagggagatttttttttgtttaaattcttgttggatccggcgatttttgtccggatcaagaagaaggggagagaaatcttggctcctagcggccatggggctgagccgcttctccgactggatatggccggggagtagaaccacccggcgagctcgcgacgctccggcgagcagcgtggccttggccgtggccggcgcgctgttcccggactccccctccgggttccgggagccgacggtgggcaccctcaggggcccggcgagctccggcggcggcgctcgacgcgcccggaaggggacgagccggcggcgcagccgtgaggtggtcgacagggagcacgacatggtcgtcgtgccgctcggcggcggcggcgacgggtactcgtcggactcgggctccgacgactccgactggtccatcggctggctcgagccgcaggggccggagctccacagcgacggggattccgacggcagcttcgccgtcctcgtgccgtgttaccgccacggccgttgccgcgtcgaggagcccggccgcggtaggctcgccgacggcaacgtttccggtggcaagaattttgtagagcgctggctttcttctcttccaaactgattatttatccattcttctatggcttcgttatctttagcatttttatgtctctcgtatttgtaaatatatcgatgaagacatgaaccccagaaaacacccaacaaaaaagaagattaaaagttgaggagcagtggaccgagattccaacgttaaggtactcttgcagtgtactaagagtcatgaaaacgaaagattactgccacgtgctgacaacctgaagttgaatcgacgaattgttaagattaccattgatctacttgcttcgggatgtttaatctacctgtatatgatggcagtttacctcatttgtgtgactgaaattcttctgtacatatatgaaggcagaaacatttgagatgaactccaatgagaatatgcatttcttctgtatatataataaacgattgtccgtatgtgtc

SEQ ID NO: 22000 - DNA, 1709 bp, Oryza sativa
  ref <308>: DATABASE ACCESSION NUMBER: AK072218
  ref <309>: DATABASE ENTRY DATE: 2001-12-06
ttggcactgtcagattctgtatccagggtgaatgggtggcagtggtggttgatgattggatcccctgtgagtctccggggaaaccggcatttgctactagtagaaagcaaaatgagctgtgggtatccattcttgaaaaagcttatgcaaagcttcatggctcttatgaggcattggagggtgggcttgtgcaagatgctctagtggatctcacaggaggagctggtgaagagattgacatgcggagcccccaagcgcagattgatcttgctagtggaagattgtggtctcagttgttgcattttaaacaagagggctttcttcttggtgctggaagtccttctggctcggatgctcatatttcatcaagtggcattgttcagggacatgcttactcaattttgcaggtaagagaagttgatggccataagctcgtgcaaattagaaatccgtgggcaaatgaagttgaatggaatggtccgtggtcagactcatcacaagagtggactgagcgaatgaagcacaaacttaagcatgttccacagtcaaagaatggggtattctggatgtcttggcaagattttcagatccactttcggtcaatatatgtctgtcgtgtttatccacccgagatgcgttactctgtccatggccaatggcgtggttatagtgcaggtggttgccaagattatgactcatggcatcaaaatcctcagtaccggcttagagtaacaggacgggatgcactgtatcctgtacatgtatttattacccttacgcagggtgttggtttttctagaaagacaaatggtttccggaactatcaatctagccatgactcttctatgttttacattggaatgaggatactcaagacacggggctgccgtgctgcttacaatatctacatgcatgaatcagtgggtggaacagattatgttaactcaagggggatatcatgtgaattagtgttggagccttatccaaaaggatacacaattgtgcccacaaccatccatcctggagaggaagcaccttttgttttatcagtttttacaaaagcaccaatcaagctagaagctgtttaatgcaagattcatactagatgtgttcgctgctggtagctgtgccttgctgttgctggcccaggctcctttggggttcaagtgatgcagattccagctgtgggttcaagaggatcagataatggtgtttgctgcagcaatatgccggtacctgggagatatgaagcagcagctctgctcttgaacctgaacattctgggcttcatcagacgctacatgcaaccgcataagcttgattgcttcctaacgtgacaggaaaggcaatctttctgtcagcaggcatggtgttgatacatcagaatcatttgatcgccgtgcatgactctggatgttttctagtcgatgcttgtagatagtggtggcaactaacatttagacctggtagccccatcccgtgtataggtatcccatgtcaccgtgtacatactatagaattagatgagttaaccttgtggtgtcgtttcctgttagcgaaatagagctcttgtgcagctgggaaataccattttagcatgctgcagttttgctgatcaaggcgagcagtcgtcggccatagcgttttcattgattgcctgtatgtaatcgaaatctgatctcattcaatggaagctattttttggtacc

SEQ ID NO: 22001 - DNA, 1910 bp, Oryza sativa
  ref <308>: DATABASE ACCESSION NUMBER: AK072219
  ref <309>: DATABASE ENTRY DATE: 2001-12-06
gcgaggaaagtaaaaaaaaaaaaaggagagaagaaaaaaaaacaggttgggttatccaccatttccgcctcttagaagcagggggagggacggtgggcggtggcttgggagggaggcaggggcggggcggctcgagttaggtttcttggcggcttcagttgggcgaggaaggtgagcggctttcggtggttggttgctttgaggctttagctgaagacacaataaaggaacaccaaaaaaatgggtaagaaaggaaattggttcagtgctgtcaagaaagtcttcagctcatccgatccagatgggagggaagctaagatcgagaaggcggacaagtcgagatccaggaggaaatggccatttggaaagtctaagaagtctgatccttggacctcaacagtggcagtgcctacctctacagcaccgccttcacagccgccaccgccaccgccaacacaccctatccagccacagcctgaggagatcaaagatgtcaaggctgttgaaactgacagtgaacagaacaagcatgcgtactctgttgcacttgcctctgctgttgctgcagaagctgctgccgtcgctgcccaggccgctgctgaggtggtccgcctcacaacagccaccacggctgtgccgaaatcgcctgttagttcaaaggatgagcttgccgctatcaagattcagactgccttcaggggttatctggcaagaagagcgctgcgagcacttagagggctagttagattgaagtcgctggttgatgggaacgccgtcaaacgacaaactgcgcacaccttgcattgcacacaaaccatgaccagagttcaaactcaaatatactctagaagggtgaagatggaggaggaaaaacaggctcttcaaaggcagctacaattaaagcatcagagggaacttgagaaaatgaagattgatgaagattgggatcatagccatcagtccaaggagcaggttgagaccagcctaatgatgaaacaagaagctgcgctaaggcgggaaagagctcttgcctatgcattttctcaccagtggaagaattctggccgaactataacacctaccttcacggatcaagggaatcctaactggggatggagctggatggaacgctggatgacatcaaggccttgggagagccgagtgatatcagataaggatcctaaggaccattattcaacaaagaatcccagcactagcgcttctcgtacttatgtaccccgcgcaatctcaatccagagacctgcaacaccaaacaagtcaagccgtccaccaagtcggcaatcgccatcaactcccccgtcaagggtcccctcagttaccggaaagatcagaccagcaagtccacgggatagctggctatataaggaggatgacttgaggagcatcacaagcatacgctctgaacgcccaaggaggcagagcacaggtggtgcctctgttcgggatgatgcgagcctaacaagcacaccagctctccccagctacatgcagtccacagagtctgcaagggcgaagtctcggtaccgcagtctattgactgacaggtttgaggttcctgagagagtacccctggtccattcttcaataaagaagcgcttatccttcccagtcgcagacaaaccaaatggtgagcatgcagataagctgatggaaagagggaggcgtcattcagaccctcctaaggtggatcctgcctcactgaaggatgttccggtttcataattcagtcatattatcagagcttattattgttaggttgcttttcttcctttgtgtattttctaatttagattgcattctcgagagtcgaggttgaaccctccgtgaaaatgtatgatttgtcagggttgatttgagacaattctaactgtttacaggcagtttttttt

SEQ ID NO: 22002 - DNA, 1838 bp, Oryza sativa
  ref <308>: DATABASE ACCESSION NUMBER: AK072220
  ref <309>: DATABASE ENTRY DATE: 2001-12-06
gataacacagacacacaccaacacaagcgagagacaagcagtctcaagctagcaaccaagcaaaataggagctagtaagcaaagcaagaactagatcgatctctgacagggaatggccatgggattgttagcgtggatggtggcagcggccgcggcggcggtgctggcgtcgtgggcgttcagcgcggtggtgcacctggtgtggaggccccgcgccatcagcaggcgcctccgggcacagggcgtgggcgggccgggctacaggttcttctccggcaacctcggagagatcaagaggttccgcggcgatggcgctggcgtcgtgctcaacgtctcctcccatgacttcctccccattgtacagccacatttccgcaagtggattcccctatatggaaggacattcctgtattggttcggagcacagccaaacatatgcttggctgacgtgagcatggtgtggcaggtattgtcagaccggacggggatataccccaagaacctgacgaaccctcactttgtgcgtctacttggcaaggggcttgtgctcactgacggcgatgagtggaagcgccaccgcaaggtggtccacccggcctttaacatggacaagctcaagatgatgacgatgaccatgtctgactgctctcggtccatgatgtcggagtgggaatcggagttggcggcgaagggtggtcttgttgagattgagctaagcaggcggttcgaggagctcactgccgatgtgatctcgcacacggcgtttggtagcagctacaaggaggggaagcaggtcttcctggcacagagggagctccaatttcttgccttctccaccttcctcactgttcaaattccagggtttagctaccttccgaccatgaaaaacttcaagacatggtcgctcgacaagaaggtgaggggcatgctcatggacatcatcaagacccggcatgccaacaaggatgtagctgggtatgggaatgacctacttgggttgatgctggaggcatgtgcgccggagcacggggagagctgcccacaactgagcatggatgagatcattgacgagtgcaagaccttcttttttgcagggcatgacaccacatcacacttgctcacctggaccatgttcctgctgagcacgcacccagattggcaggagaaattaagggaggagattgcaatggagtgtggtgacaaggtgcccactggtgacatgctcaacaagctaaagatggtcaacatgttcctcctagagaccctaaggctgtacagccctgtctcactcatacggaggaaggttgacactgatattgagctcggcggcatcaagatgcctgagggtgcactattgacgatcccgatcgcgacaattcaccgtgacaaggaagtgtggggggaggatgcggatgagtttaggccggagaggttcgagaatggggtgacgagggcagcgaagcaccccaacgcactactctccttctccagcggaccgaggtcatgcattgggcagaactttgcaatgatcgaggccaaggctgtcattgccatgatcctacagaggttctccttcactttgtcccccaagtacgtccatgcacccactgatgtgatcacgctgcgtcccaagtacgggctccctatgatcctcaagagcctcaagctgtagggagaaatacgtaagaaatatatgaattgtcctttctcttctataagagtttgccacttcgctggtaggagttatttagaactaattggttgtacatgatacatcaattttgttgatgttattcagacaatgtatttgtatatttcattttaacaaaatttggatg

SEQ ID NO: 22003 - DNA, 1994 bp, Oryza sativa
  ref <308>: DATABASE ACCESSION NUMBER: AK072221
  ref <309>: DATABASE ENTRY DATE: 2001-12-06
gattgtattgggccggcacggggcggcccgtttagccaccccaactcacccgccgtgccgtccgccgtcgccgacgcaaatcgccgtcgctgtcgcttggctcggagttcaccatcgccgagcgtggaggtccacgccgctggtagccatcgcccgcccagatctggcggctgtcgctctccgcgggcggcggctgcgtccaccgcgaatcgagtccgcctgaactgaatccattccccaccgccggcagccaggatgagttcccggcggccgaggcggctgctgctgactctccccgacgaggtgctggaggagatcttcctccgcctcgacgccctccccgacctcgcccgcgcctccgccgcctgcgccacgttccgccgcctcatcaccgcccgcgccttcctccgccgcctccacagcctccacccgcgtcccctcctcggcttcttcaaacgggaaggcccatcgtgcgagttcttccccgccgcgccgccccactcctcctccgccgccgccagtgccgtcgcgcggggggcagccgacctcaccttctccttcctccccgccacgcccggcgggtggcggctccgcaacatccgccgcggcctcgccctcctatcaacccgcgacggcggcggcggatgcttcttccccgacgtcgtggtctgcgaccccttgcaccggcggtacgctcagattccccaaatccccgacgacctagcggcccccatccgccggagcggcagtttgcccaagggtttcgattacttgctcgctccagcccgcagggaggaagaggaggaggaggaggaggattcatcattcaaagtggtgtgcagacccaggttgacagaagagtgcgatatcaccgtcttcgtcttctcctccggcgccgggatctggcgcgccgccacattgggctcctccctcgcaacagctatctctgtcacctcccgcccccggtgcgtgcaccgctgcgtctactggctgaccagattcttggacagattgctcatcctggacaccgacgagatggaattgtccatgtttgataacttccccccatccacaggatttgtactgaatcacaccactgcggccattgcggaggcaggggaagacaggcttggggtgtttaaccttgatgttcacaatgtcaatctcctctctagggcgatcaggggcagcgccgacgaacagtggcggcatgacaagactatcccattgctccctggctacagtatttggagatttgtaaatcacgctgatgttgacggctacatactcctaggaggagttttgggcagcggtttgcagtctgatcccattactgatggattacagtatttctcactggacctcaagacatttcggcttgagaggctgtgtcccatgacaatctaccaagcaaggaactctccaactgagttatatacaagctttccgccaccattatcgctttcaagcatatgaaaacaggatgcaattggcacgggagttggacaggcccgccccactcatttctacaggctatagtgtccaacgggttggcgagttgaccaaccaagcaatgaagcaagtaacctaacaaacttcttagttgtacccataccaagacttgccaaggcccaaggggggacggagcagcttcggttgtgaagatttatctgataccatgcaagaccagctgctactggttgtaatggcatcgatttattgctactcttctttcttttttccccctcttatgctgcattttggaactaaagttgctagtagtttgcaaagcatagtattcaggctgccccgcccctgatgcatatgatgcatttcagtgtatgctcgttgttaattaagtttgttgttatccttaatctgatgtcaatttgagtacgggaggctctctttccttgctactagtttcagattggctacatctgcaccgtaaacagacagatttgtactatataaaagttaatttattttagaac

SEQ ID NO: 22004 - DNA, 1405 bp, Oryza sativa
  ref <308>: DATABASE ACCESSION NUMBER: AK072222
  ref <309>: DATABASE ENTRY DATE: 2001-12-06
gaatcgaaaccgtccgcatctgacagtgaaggaaagagaacagaggccatggcgtctctcccggtgccaagcgtgcaggccatggtggcggccatcggcatcgaccatgttccacccagatacctccgccccacggacgccgacgagccggtcgcttctgacggcggcgaggcggagatccccgtcgtcgacttctggaggctgcagctcggcgacggcgacgagctggctcgcctccacattgcctgccaggactggggcttcttccagctggtaaaccacaatgttccagaggatgtggtggaggggatgaaggccagcatcaagggattcttcgagctgcctgcggagaccaagaagcaggtcgttcaggagccagggcagctggaaggctacggtcagctgttcgttgtgtctgaagatcagaagctcgactgggctgacatcctctacgtgaaaacgcagccgttgcaggacaggaacctcagattctggcctgaccaacctgccggcttcagaatggcactggacagatactgcgcggctgtgaagatcacagcggatggccttctggctgccatggcgaccaacctgggagtggagtcggaggtgatcgcagagagatgggtgggtggagtccagtcggtgagggtgcagtactaccctccgtgcggtcaggcggacaaagtagtcggcatctctcctcactctgatgctgatctggtgaccattctcctccaagcgaacgaggtggatggcctgcagatcaggagaggcggggcttggcttcccgtcaggcctctggagggcgctctcatcgtcaacgtgggagacattcgtcaggtcttcactaatgggaggtacgagagcgtcgagcaccgggttgttgtggatgggaagaaagagcggctgtcgatggcgaccttccattctccaagcaaaaacgccattgtaggtcctctgagcgagatggtggagcatgaagacgatgctgcttatacaagcatggaccatgacgaacttctgaagctcttcttcgccaagaagctggaggggaagaacttcttgaacccgataaagaagctgaagaacagcggctgaccaaaggagtggaaaggagacttgctctgcttgcaacatgtgtctgtccaaaacaggacatgtccttcacttttttaaacacgtagttatcaaattgtttgaaaaattaaataagatttgtacagtatatatctattgtccgagttgttttagtagacagtcaaatgattctttaaatactcaatgtaatatttgtggtagaggttgagactttactaaaatcagtaggatgttgatatgtaacatgtgtttcacttattgttcgatgcaacatcttcaaataaggagtaaaatataattgtct

SEQ ID NO: 22005 - DNA, 2153 bp, Oryza sativa
  ref <308>: DATABASE ACCESSION NUMBER: AK072223
  ref <309>: DATABASE ENTRY DATE: 2001-12-06
gataaaaaacaaaaaagaaaaaaaatagaaacacctcgtcggcgtttagaaaggcggttggggttcggcggcggcggcggaggccggtgagtatccgcggccgcgcgaaccagtcgcctgagctcccagaagcatccggcgctgcggctcctccgtgatttgtgtatttttccccttgaatcccgcgccgtcgcggccgccgtgtgctcttgccgccggcgagaaggggggaaaacgcccgcggagatgtcggtcctcatcgtgaccagcgtgggggacatcgaggtggacctccacaccgacatgtgccccctcaccaccaagaacttcctcaagctctgcaagatgaagtattacaatgggtgcctgttccacaaggtggagaaggatttcttggcacaaactggggacccaactggaacaggagctggaggcgattctgtatacaagttcctttatggtgatcaagctcgattttttgatgatgagatccgaccagaccttaggcattcaaaaaagggaactattgctatggcgagtgctggtgaaaattgcaatgcctcgcagttctatatcaccttgcgggatgacgtagactaccttgatgataaacacacagtgttcggcatggttgctgaaggctttgacacgctgacaaagattagtgaaacatatgttgatgataaagggagaccatttaaggacatcaggattaaacatacgtatgtcttggatgatccttttgacgatcctcctcagctcagtgaacttattcctgagaattctcctgtagggaaaccacaggatgagattgcagaagagcgcttagaggatagctgggtccctatggatgaaatggtggctcctgaagaacttgaggagatgatccgctccaaagaagcacatacaaatgctgtgattcttgagagcgtgggagatattccagatgctgagatcaaaccaccagacaacgttttatttgtttgtaaactcaacccagtaacacaagatgaagatttatatacaattttttctcgttttggaactgtgacatcagctgaaataatccgtggttacaagactggtgatagcttatgctatgcttttattgaatttgagacaaaggaggcttgtgagcgggcactcttcaagatggacaattgtttgattgatgatcgaagaatacatgttgactttagtcaaagtgtttcaaaactgtggggtcagttcagacaaagcaaaagaaatgcaaataaagatggatgcttcaagtgtggcgcccctgatcacatagccaaagactgtgaccagggcactgagcagaaaaacaaaggcccaagttatgtcctgaaagatgaaaacactcagcgtggtggaaataaccgtcgaagctatgatcttgtctttgatgaagatggtgaaaattatactgatcagcaagatcctggaagtactggccgaagaaagattcaaagaacagatgatcgcaaatcagggctgccacctcggggtgaccatgacaggattagccgggagagaactcacagtgatgagaatggtagagaaggtggtaaagaaggtgatagggaccgagggattcgtaagcacgaggactaccaccgttacaataaatctggtgaacggagctctagtagatacgatgatcgtggctacagcaagcacgagagcaggggcaaatatagggatggcaatgatgattacagacgacaaccgggaggtggcagtcgatatggcagggataagtatgaaggtgaacggcgctacagagaagatgatggccatggaaggagtgaccgtcacaagagagatgaaagtgataacaggaaaagaagcccagatactggtaagcatagaagagaagacggtggtcaccgtgagacaagcaagcacagggaaaggaggcagagagatgatagataggtcactgcatcaccgtcagttttgtcttgcctgtttctcatcatacattgaattttgtcattcttaatccaaagatagcaccagaacactaaacatgtagcttagaatctgcgtgtagacattatgagagctccactggctacagattgttgtaacttgtagaccttttcttttctatacatgctcatggacgttgttctttttgggggacg

SEQ ID NO: 22006 - DNA, 1482 bp, Oryza sativa
  ref <308>: DATABASE ACCESSION NUMBER: AK072224
  ref <309>: DATABASE ENTRY DATE: 2001-12-06
gtgagaacttgtatgttgtagaccacaatagagcaaactttttttcttttgtgccctcttttgctttctattgttcctttttttcgccgcgaaaagattgcgaggaacgaaaaaaattgaggcatctgttggatggtttttcagaggccaacatgctgtatttggagggccctgcaggagtgggcttctcctactccactgacccttccttctatggtggtgttggtgatagcaggacagctagggacaacttgagattcttgcaaggctggtttgccaagtttccgcagtacaagggcagggacctgtacattacaggagagagctatgctggccactatgttccgcaattagcgcagcgcatggtcgaattcaacaagaaggagaagctgttcaatctgaaaggcattgctctgggcaacccggtcctcgagttcgccaccgacttcaactcgagggccgagttcttctggtcgcacggcctcatctccgactcgacctaccactccttcacgacggtgtgcaactactcgcgctatgtgagcgagtactaccatggctcgcttagctcggcctgtgacactgtgatgacccaggtggccagggagactagccggtttgtcgacaagtacgacgtcaccctggacgtttgcgtctcgtcggtcttgatgcaatccaaatccctcgcccctcagcgagggagcagggagctggacgtgtgcgtggaggacgagacgatggggtacctgaaccggaaggacgtgcaggaggcgatgcacgcccgcctcgaaggcggcgtgcccaagtggacggtctgcagcagtgttctggagtacaagcagctggacctgcagatcccgaccatcaacatcgtcggcggcctcgtcaagtcgggcgtcccggtgctggtgtacagcggcgaccaggactcggtgatcccgctgacggggagcaggacggtggtgcagcggctggcggggtggctgcggctggggacgacggcggcggggtacagggtgtggttcgaagggcggcaggtgggcgggtggacgcagtcgttcggcggcggcgcgctgtcgttcgccacggtgaggggggcgtcgcacgaggcccccttctcccagcccgagcgctcgctcgtcctcttcgccgccttcctcgccggccgcccccttcccgactccttccagtgacgtcgtcccgaacgacgatgatcacgtctcatgtcaagcgcggaggtgcattgttgttgcgttgcaaatgcgtacgagcgatttcgtgtgcgccaccgctatatatagtactccgtattgttgctgggaatcgaattgtttctcggagaaaatctcatctggaaaatgctgatgtggggtggggaagatgactccatgccgggtttaccttgctctttagttcaaaatggaagtaactaacgtttgttacggagagtactccctccgtccaataaaaaaccaacctagc

SEQ ID NO: 22007 - DNA, 1718 bp, Oryza sativa
  ref <308>: DATABASE ACCESSION NUMBER: AK072225
  ref <309>: DATABASE ENTRY DATE: 2001-12-06
gtctcgtccgtctccctccacccatggcggccatggccaccccgcagcaatgctggctccccacccgcgcgcgcgctccccctcctcctcctccacgcgcaccctcctccgcgtcccccgtctccggagctcccgcctccctccgcttccgtgggcgccgcgccgcgtcggcgtcggcgtcggcggcgaggaggaggaggggagcctccctgccctgctcccccaggtgcgcgttggagacggctggccctggctttgatcccctagggctgtacaacgatgggccttcgaggaatgacacgcagtccccgctgtcgaacttcttcggagtactgtcgccggtgttcgggagctcgagcggcggcaggaaggagaagtcctatggacgaggagcagcagctgcaattgaagatagttccattgacattggtgacttcttcaagggtcctctacctgggaagttcttgaagctccttggttatttggccttgtctcgacttggtatttatatacctctgggtggagtgaaccgggatgctttcgctggtaatcttgaccagaacagtctactaggcactttggattctttttctggtggaggtattggccgacttggaatatgctcccttggcattgttccatttatcaatgcacagattgtgtttcagcttcttgcacaactttatcccaaattgcaagatcttcagaaaaaagaaggagaggcaggaagaaagaaggttcttcagtatacaagatacgcatctgttggttttgcaattgtccaggctattgggcaagttctttttcttcgtccttatgttaatgacttcagcacagaatgggtcctcacatctgtgacactactgacgcttggatcggtgtttacaactttcattggcgaaagaatatctgatttaaaactcggaaatggaacatctcttcttatatttacaagtataatatcgtatttacctgcatcgtttggaaggacagttgcacaggcatttcaagatgggaattatgttgggcttctgacaatcatattatcgttccttttcttagttcttgggattgtttatgtccaagaagccgagaggaaaattccgctaaattatgcttctcgatacagtagtcggagtggagggctccaacgatctgcatatctaccatttaaggtcaatagttctggtgtcatgcctataatattttctacatcttctttggctttgcctggtactttggcacgatttactggcttagagtttcttaaaaaggctgccatatccctaaatccaggaggtgctttgtatattccaactaatgtactgcttatagcctttttcaattactattacaccttccttcaattggatcctgatgatcttagtgagcaattgaagcggcaaggtgcttcaataccgcttgtacggccagggaaaagtacagctgccttcataaaaacagttcttagtaatatatatgtcctaggatctgccttccttgctgttttagctgctggaccatctgtggttgaacaaatcactcacttaacggcatttcggggatttgctggtacatcagtgcttatccttgttggatgtgcaacagacacagctcggaaagttcaggcagaaataatttcacagaaatataagaacattgagttctatgatgtcaaccgttttgaccaatgattaatgacactgatcattcttttc

SEQ ID NO: 22008 - DNA, 1209 bp, Oryza sativa
  ref <308>: DATABASE ACCESSION NUMBER: AK099253
  ref <309>: DATABASE ENTRY DATE: 2002-08-28
gattcgctttcgcctcttctccccctctcctctcctctcctctcctctctgcgtgtgcatctctcgattccgatgccgccgccgctcgaagcgcgagactacatcgggctcgcggcgtccccggcctcgtcctcctcctcctgctgcgcgtcgacccccgtcgccgaggtcgtcggggcgcacctcgcgctccgcctcggcctcccggggtcggagtcgcccgcccgcgctgaggcggaggctgtcgtcgtcgacgccgcgctcacgctcggccctgctcctcctcccaggggcggcgccaagcgcgggttcgtcgactccctcgaccgatccgagggccgtcgtgctgctgccaccgccggtgatgatgagaggggcgtgagggaggaggaggaggaggagaaggggttgggggaagctgctgctggagctccgcgagctgccaaggcacaagttgttggatggccacctgtgcgaagctaccggaagaatacattggccgccagtgccacaaagacaaagggggaagaccaaggcaaaagtgaggtaggatgttgctatgttaaggttagcatggatggagccccataccttaggaaggttgacctcaagacctattcaagctatgaagatctttcacttgctcttgagaagatgttcagctgctttatcactggtaggagcagttcacataaaacatcaaaaagagacaggctgactgatggttctagggctgatgcccttaaggaccaagagtatgttcttacctatgaagacaaggatgctgactggatgcttgttggtgatcttccttgggacttgtttactactagttgtcggaaactgcggatcatgagaggttcagatgctgctggaatggctccgagatcactggaacagacaggtcagaacaaatagttgcccgagctttcatcatctggacagcaaatgtgtggaccaagtttgctgtagcaagtttccgctgaggggtgcagtgttttacctgaagtatctccgctattagtttatttacgtgtgtagtgaaatctgtggcgtattgtaaaacagccattttgcctacgaggttgtcttgtgtcaatctgtagatggtcgattttgtctttgaaagatcaagtcaggctgcttaatgcttcctgtgtgatactttcatcaattctctcatatatatattatctggagttgcacttg

SEQ ID NO: 22009 - DNA, 1850 bp, Oryza sativa
  ref <308>: DATABASE ACCESSION NUMBER: AK072226
  ref <309>: DATABASE ENTRY DATE: 2001-12-06
gacattgtgctaaaagattccagatatcccccttgcatacactggaagggaaattcactgaaaacaggggaaagacagtgaagatcttaactcaaggaggagagatgctagaactttgctatgagttgcggacaccgtttgtcatgtcagttgttgctaaccagatattatcctttaagcgttatgaagtatcatgggttcatcgaagagcagttggccattcaattccttatcgctttcttcagggtgatttcgacattattggaggtgcttcaccaataccagaggctgaaattgtaaaggtcactttggatgttggggcacacttttatgatccgaaggcaataattatccgtctgaatcatagcaaacttgctgaagcagtttgttcctgggcaggagttcctcaagaacggcgacaaaatgttgctgagtttttctcttcaactcttgttcagtattggccaaataaggctgatcgcaagtcacaatggagtttgattcgtgggcaactattacaggatcttcgtctttcggaagaggtggttgagaagctacataaagatgatcagagattttgtggttctgcagatcaagtacttgctagattaagagggaccctgttctatgataaatctgcttgcaaggctctcgatgagatctcagcatttctcaaatgtttgagaatatggtcaatcgaagaacatattactattgatgtactcatgcctccttcagaatgttactacacagatctgttttttcagatctatgtgaaagaaggaaaccctggatcaagttcccatgaaaagttacttgccattggggggcgatatgattggttgatagagcaagcttgggataggacatataaatccaaacccccgggtgctgttggtgtcagcattgcacttgagaaatttcttcctaatagtccttcgtctgacattgggttcccaaggattgaaccgagcatcagtgttcttgtttgttcaaagggaggtggcggtcttttgaatgagcgtatggaacttgttgcagaactttgggaagctaatataaaggcccaatttgtccctcaggaagatccaagtcttcaggaacaatatgaatatgccagtgatcatgacatcaaatgccttgtgttcatcactgaagcaggtgtctcacaaacagaacttgtgaaggttcgacatctggatgcaaaaagggagaaggaagttaaaagagaggaacttgtaaagttcttatctgatgcaatatgtttacaattcaaaaatcctacaatctggagctgattggcagcctgctctttattcacttcagtcttggttgcccttctgtgaaccaagattacgcaccgtggcttcggttcaaggttcaaggcagtgaggcgattggtggcttgatgtaatctgggctgtcctcttgtggaggtgctcctgtagtcctgtgcagctctcggtggtggtggcggcggcggcggtggtaacctgcacagctttttccccctgttggtagcgaaaccgctacgcaacaaattcacccagttttgctatattcaattttgcttctcaattttatcaacaaagcctgctatgtatactacatagttcagtatgttctctagcatgtataggacaaaagttgagttttgtagataggtgatgccaattttgcaactaggcaatcaatctggcggaaaacaagggatttgtaattttgcttcctcgtaagtttgtcagatgagcgagccagggtgcccaatgtttccgttttataagagtattcctgtcacatgtccaaggactcatatttcatcgtctttcactgccttttatgattgcagc

SEQ ID NO: 22010 - DNA, 2470 bp, Oryza sativa
  ref <308>: DATABASE ACCESSION NUMBER: AK072227
  ref <309>: DATABASE ENTRY DATE: 2001-12-06
gaaaggcaaaacacacaggaggaggggacacacgcctccgcctccacctcctcccgaggcgatagcgagctcgcctccgcctccgcctccgccgcgccgccccgccgacgacgaggaggaagaggcgacgccaccgccgccgccgcaggaggaggaggaggcgacgcccgtggggagctcgcgcgacgccggatctcgcgatctgaggggcccccgcgccaattcccccgcagggttttgcggcggtggagacggagatgagcgtggagagccctggaggagcccccgggagctagggtttcgcgcgacgggaccgggacgacggccgccccgacaagctcctaggtcttccatgggagatggaggtgtcgcgtgcgccgtcccgccgcagcgtgcagtggagggcttccgcgccgggggcctcgtgaggagaccagggggagaagccatgccggacaagggggagaggggacaccacaccaccagcaacaaccaccacagccacagccacagccaccggaagcatcatgccgagctggaggaaggggagctgctcaatggggaggctgacaacagcagcagccgggacttggagaggagcatgcctcccaagaagtggcggaaggtgctggctgcctcctctgctgcagaggtggagccgggggagattgtgatgccctccaagaaggcgaggaagaacggggagctcgagaagggggagattgcccccgagagacagaggaaggacaagtctgataagagtgggaggaagtcgaataaggatgaggtggaaccaggggaagttgctccaccagataagaagcaggaccgggatcataacaagaagctcggctcgtcggctcaggtacgcgatgacggcagcaagaagggctcctcgcgggattcagatgaggagccaggtgagattaggccagagagcagcagcactggcagtgcaaggaagagcagggcaacagagcctgagaacagcaaccacaagcaccaagctgatacatgtgatcaaacaggttctaagagtcgcaggaagggagaggcaaagagttctggcaggcatttgtcaggaaggaatcgtgacatctcgccaatgacacgggatcgacatgagaggagcccagggatcttggggcgctttcctcatgatcgcctccgccatgacaggagcccaagccgcttggagccctccccacgggaccgcggtcgccactatgacaacagagaccgcagcccatacatttctccacgccacagaatgcgcccatcccattacagggataacacaccgagccgtggtgagatgcaccatcacagggataacacaccgagccgcgttgatagttctcctcggagatctcagcacgaggacttcagagaccgaagcccatctcgtcgtgataaatcgccatctgaacgaggacggactactgaaagccatgaagcaggcaagaagagcagaggtgctaagcttgaaaacaacagcctggaaaaggcacaacacaaaagtaaatcaacaaagcaatcaactaagtctaagagcagtagcaatggaagtaatgagaagatatccaaggaaaaggcaactgagaccattcagtacactgagttgccaccaccaccccctctacccccgccgccaccacctcctccgccgccacccccgcctttaccgcctaacatgcctcctcccctgcctccaccaccagaacctgaactgaatggagctcctgcagaagatgtctcaatggaagaagacatggacatctgtgacactccacctcacactactagctcaggctgcggcggcggctgtggcggcggctgtggcggtggcatggtcatggaagcctccaaggctggccatgtcaagtccggcgggtgcggctcaggctgcggcggcggctgtggtggaggctgcggtggcggcgtggccatggaaagctccaaggctggccatgtcaagtccggcggatgcggctcaggctgcggcggcggctgtggtggcggttgtggcggcggcatggtcatggaaagctccaaggctgtccatgtcaagtccggcggctgcggcggaggctgtggtggcggcgtggccatggaaagctccaccgttggacatgccaagtccggtggctgcggttcaggctgtggcggcggctgcggtggcggcggttgcggcgcgatgctcaacgcgagcacctgagcggcgcaggcggttgcgccggcggccgccggcgatggcgcggcgcgccattctgaaccagcaggtgaagtgtgtcgtcaattaaattctctgcaaataaaattccgtttgaaaaaaagtgaaaaaggaaaaaaaaaacttagtgctgttggtcatatgctgctatctgtaaatagtacataataaattgtaatgtggtgtgataataagataaatgaaaaaaaaaagaggagtgtatcttccctccaaatc

SEQ ID NO: 22011 - DNA, 1696 bp, Oryza sativa
  ref <308>: DATABASE ACCESSION NUMBER: AK099254
  ref <309>: DATABASE ENTRY DATE: 2002-08-28
tggccgtacaccatttcgttccgacgcgagtaattcctccccacgggcggcgactagggcggctagggttcgtcgggcgccgccgtgccggagatcgcctctcgccgccgacacccggatctccgccgccgccggtcgccccaggttatcccgctcccgcagtcaccatcccgtcttctccgccagtcgcctcacgcccggcctggacgccccggaatccattgtcggtctcgccccgccgactgccgttgacgccactggctgaaggtgtgaatatgtcggacagtgcgttgaaagatctgaatctagctcagtcagcagagctggagaaaaccaaggacagttctgccaagtcttgcatcaccaagcctgtcttgaatggcaacaaatgcaacaatacggaagaaaatgctccacctgtactccctgatgctgtgactaatgggtgtgaagctggaaatgcagatgttgagtatattgattctgagagtctgacagatcttgaagatgctggtgcaacccttagtactttagttgcaaggttggattcaaaagactgggttatgacatgtgaagctctaaataatgttcgtcagttggcaatatttcacaaggatagattgcaggaacttctagagcctctagttcctcttattgtgaaatctgtcaagaatccaaggagtgctgtctgtaaaaccgcactcatgacctgcgctgatattttcaaggcatacggtgacctaatggttgactcaattgatccactgttagtgcagctatttctgaaatcttcacaagataagcgttttgtctgtgaagctgctgaggcagccctcatatcgatgacaagctggatcgccccttctgctctgttaccaaaaatgcaaccttaccttaagaacaggaatccacgaattcgagcaaaagcatcaatgtgcttcagcaagagcgtcccacgcttgggtgtggagggaattaaagaatatggaatggataagcttgttcagatcgcagcaactcagcttagtgaccagcttcctgaatccagggaggctgctcgcaagctggctttggagctacaagcattctatgagaaatcccaagcttcgagttctggtgaagttgacgacgcacctgctacctcacctgatgctgatgctgatgctggtgctgaatcatgggaagctttctgccaatcaaagctttccccattaagtgcacaggcaatccttcgtgtcacctctacgacgaaagagggtgtggctgtgggtgtcacctctacccctccgaaagaaggcgtcactgttggttgctagcatcaggaggtagtagatgcaatgaggttgtggtttttccatccgattcaccttttgctgtacatggttatggttgttctttctctacatccaatctgggattcgttcgttaagcatcggttcgagagttgaggtgtgacctgtgggtgttaatattggtgcgagatatacctgttatagttgactgtatgatcttccttttctcccactgcttggtattgattggtcaggcgaattgtagaatttcttccactattcaatattactacacagtaatttttccatctcgtggccttgtgtttatttgctggtgttcactatttcgtgtttttgaattctaacttcttccattattcaatattatcgaatcaattctcatc

SEQ ID NO: 22012 - DNA, 2463 bp, Oryza sativa
  ref <308>: DATABASE ACCESSION NUMBER: AK072228
  ref <309>: DATABASE ENTRY DATE: 2001-12-06
gtattgtttggacaattggatcatgtgatgacatatccacactcgattgggaacggaaatcatatgagctgggacatttatacaatctgatgcccagtacttctccctagttgtataatgtccgtacgtctcgttatacgtcactgtccagtcacaagacggctactactgtaaaaaattgacgacaagatggcgcaacggaactgatggccatgtttaacgagctactccctccggttctatataataattaatgttttggataagattgatgtcaaacttttataactttgactatcaacaactttaaaaatatttagtttaaagaacatacgtagatttgtctttcaaaacactataataaaagtaaacatgcatttatttattgtgtatattataatagaaaatataaggtcaaatatatattttgtaaaccgtgtcattgtccaaaccgtcaaataaaatgaaaccggagggagtatagtgtattttcaatcatcaattaaatgcattgttgtttatgtggcttatttgaaaacataaaaatgacacctcccattaattgcaaatggccttatagccgcggcagaatttgtttagaatctctaattttaaagtagtttttttttgtcatggttgcggtaaaaattggatgaattgacgcgggcgaattaaggacgtgccggtgaattttgtgcagatttccagtacctgaacagcacgggcctgcaccttgagctgcaccacccgcggagcccctgctcgccggcgccggtcccggccgacctcccgttcacggcggtgctcacccacgacgatgcgcgcatctcgtcgctggcggcgcgcctcgccaagacgccgtcggcgcgcgccacctccctggacgccgacgccgacgccggcctcgccggctccctcgcgtccgtgccgctcagccccggcgcgtccgtgggcgtgggcaactacgtgacgcgcatgggcctcggcacgccggcgacgcagtacgtgatggtcgtggacacgggctcctcgctcacctggctgcagtgctcgccgtgcctcgtgtcgtgccaccggcagtccggcccggtgttcaaccccaagtcgtcgagcacctacgcctccgtggggtgctccgcgcagcagtgcagcgacctcccctccgccacgctcaacccgtcggcttgctcctcctccaacgtctgcatctaccaggccagctacggcgacagctccttctccgtcggctacctcagcaaggacaccgtctcgttcggctcgacgtcgctgccaaacttctactacggctgtggccaggacaacgaggggttgttcggccgatccgccgggctcatcggcctcgcccgcaacaagctctcactcctgtaccagctcgcgccaagccttggctactccttcacctactgcctcccgtcgtcgtcgtcatcggggtacctgtcgctcgggtcgtacaacccggggcaatactcgtacacgccgatggtgtccagctcgctcgacgactcgctctacttcatcaagctgtccgggatgacggtcgccgggaatccgctgtccgtgtcgtcgtcggcgtactccagcctgccgacgatcatcgactccggcacggtgatcacgcgcctgccgacgagcgtgtactcggcgctgagcaaggcggtggcggcggccatgaaggggacgtcccgcgcgtcggcgtactccatcctcgacacgtgcttcaagggccaggcctcgcgggtgagcgcgccggcggtcaccatgtccttcgccggcggcgcggcgctcaagctgtcggcgcagaacctcctcgtcgacgtcgacgactccaccacgtgcctggcgttcgcgccggccaggagcgccgccatcatcgggaacacgcagcagcagacgttcagcgtcgtctacgacgtcaagagcagcaggatcgggttcgccgccggcggctgcagctgagaacgccgagagcgccgccgaacgcgcacccaggcatggtccgcatggatacttgggtaaattaatgggcaatccatttgctattggctatactagctagcacgccattcatcaattcaaccacacaagctgttacataagcatggggatgaacatatcacaaggtagataaaaacgaattggtaaaggtgtttgctctagcgcttagataagaaaacacaactcaaaaacaatattagcgtaatgttaattaatttatgttgtcgaggccagggggtacagagtatttgaaagtggaacagcagaactccaaatatgatacactacacaaatccagtagaggtgacatatatagcttgtcatgtagtaattctttggcaagtactggccgaaatgtttactctgtaaatgtaaattaatgggtgtgtgtgtgctgcgtttgtagcttcttctttagtaagtacaagagctccaaaactgtaagcc

SEQ ID NO: 22013 - DNA, 1756 bp, Oryza sativa
  ref <308>: DATABASE ACCESSION NUMBER: AK072229
  ref <309>: DATABASE ENTRY DATE: 2001-12-06
ggttgcgcgcccttttcctccgcatttcgcctcgggattgctcgacggcgagcgattccgacttcacgcgctcccatggcaggcggcggcggcggcggcagagcttccgcgcagcggcgggcggcgctcgcggcgctgatcacgctcctcttgcttgcgtccctcgctttcctcctgtcggcgacgggcaccgcctccgccccgaactccgcacccttccggctggccgccattcgccgccacgccgaggaccacgccgccgttctcgccgcctacgcggcccaggcgcggaaactcagcgcggcctccgcctcccagacggagtctttcttgtctatctccgggcatctcagctcgctctcgtcccgcatctccctgtccaccgtcgcgctcttggagaaggagacgcgcgggcaaatcaagcgcgcccgctccctggcaggcgccgccaaggaggcgttcgacacgcagtcaagatccagaagctctccgacaccgtcttcgccgtcgaccagcagctcctccgcgcccgccgcgcgggcctcctcaactcccgcatcgccgccggctccacgcccaagtcgctccactgcctcgtcatgcgcctcctcgaggcacgcctcgccaacgcctccgccatccccgacgacccgcccgtcccgccccctcagttcaccgacccggcgctgtaccactacgccatcttctccgacaacgtgctcgccgtgtccgtcgtggtggcctccgcggcgcgcgcagccgccgagccggcgcgccacgtcttccacgtggtcaccgcgcccatgtacctcccggccttccgcgtctggttcgcgcgccggccgccgccgctcggcacgcacgtgcagctcctcgccgtctcggacttcccgttcctgaacgcctccgcctccccggtcatcaggcagatcgaggacggcaacagggacgtgccgctgctcgactacctccggttctacctcccggagatgttcccggcgctgcggcgggtggtgctcctggaggacgacgtggtggtgcagagggacctggccgggctgtggcgcgtcgacctcggcggcaaggtgaacgccgcgctggagacctgcttcggagggttccgccgatacggcaagcacatcaacttctccgaccccgccgtgcaggagcggttcaacccgcgcgcgtgcgcctggtcctacggcctcaacgtgttcgatctccaggcttggcgccgggaccaatgcacccagcgattccaccagctcatggaaatgaacgagaacggcacgctgtgggatccagcgtccgttctgccggcggggctcatgacgttctacggcaacacgaggccgctggacaagtcgtggcacgtgatgggactcgggtacaacccgcacatcaggccggaggacatcaagggagccgcggtgatacacttcaacgggaacatgaagccgtggctcgacgtcgccttcaaccagtacaagcatctctggaccaagtacgtcgacaccgagatggagttcctgacattgtgcaacttcggactctgatctttgctacgatttcaatggtaatgatcagatgtaggttcagtcgtttctgcctgccgctgttgttgcaacttgcaaaagcagacgagttaatggctctgctccgctaactgtattgtgtttgtcccccttgtcatttaggctgtctgaactgaagaaatctctcatgtattatggtactagtagatgatatcccgttc

SEQ ID NO: 22014 - DNA, 1572 bp, Oryza sativa; identical to SEQ ID NO: 18496
  ref <308>: DATABASE ACCESSION NUMBER: AK099255
  ref <309>: DATABASE ENTRY DATE: 2002-08-28

SEQ ID NO: 22015 - DNA, 2691 bp, Oryza sativa
  ref <308>: DATABASE ACCESSION NUMBER: AK072230
  ref <309>: DATABASE ENTRY DATE: 2001-12-06
gagccggagcccgactcgagcgaaagcgtactgagcacaccaccaacgaacaccagaaaaacctcggctctcgtctgctcgatcgaacaagttcctcctccccttctccccccatccatccggccctggcgtttcccccgccgtttccgcgtctcgatcgtctcgccccgctctccgcccgcgtcagccgggagtttggcctggccagcgcggcggctggctagggtttctccggcgcgcgcccgcggccgccatggagaacctcatctcgctcgtcaacaagctacagcgcgcgtgcaccgccctcggcgaccacggcgaggagagcgcgctgcccaccctctgggactcgctcccggccatcgccgtcgtcggcggccagagttcgggtaaatcgtcagtgttggagagtgttgttgggaaggatttcctgcctcgaggctcaggaattgttacacggcgccctctggtcctgcaactccataggattaatggagatagagaatacgcagagttcatgcacaatcctaccgttaaatatacagattttgctcttgtgaggaaagagattgcagatgaaactgaacgagctaccggccataaaaagcaaatatcacctgtgcccatttatttgagcatatattcaccaaatgttgttgacctcactcttattgatcttcctggccttactaaagtagctgttgagggacaatctgacagtattgtgcaagacattgaaaccatggttcgctcatttattgaaaaggtactgttgaataacctgcacaagttttttttattaccatagatgagcatatgtaacagcttcagctgaataaagggggtgatgatgcacatcttaagtaattttgtcaactgacattatcttatcctttccctctataagctattatttacccatcatttgttatgcttgtacattccataaaagatgtgcataacaaatgctctagtttactctttacagcccaactgcattattcttgcaatttctccagcaaatcaggatcttgcaacttccgatgccataaagatttcacgtgaagttgatccaaaaggtatggctcaactaaaggtaccaatttaatgaagaagagtacgagtaagtgatgctgtggctactggttagaattattgggagtgttcttatgtaattgtatgtaaagtgaacttaatgtggcaatctcatccagatcatgtttttttgatatagttgcaacctagtataccaataaaagaattgtaaaataattgtgatattctatagaatagtaactctgttgaattcaggtgaaaggacctttggcgtactcacgaaaattgatcttatggacaagggcacaaatgctgttgatatgctagaaggaagatcctatcgactacaatatccatggattggtgttgtcaatcgttcccagcaagatataaacaagagcgttgacatgattgctgccaggcatatagagcgtgaatattttgcaaataccacggaatatagataccttgctcatagaatgggatcagagcacttagtaaagatgctttcaaaacatttggaatctgtgattaaatcaagaattccagggatccaatctcttataagcaaggcaattgcagagctagaagctgaacttcatcgtctcggaaaacctattgctgcagatgccggaggaaaattgtacacaattatggaaatatgccgcatgttcgatggtatctacaaggagcatctggatggaatgcgcccaggtggcgagaaaatctactatgtatttgacaatcaatttccggttgctctcaaacgattgcagtttgataagaatctttcaatggaaaatgtaaggaagcttataacacaagctgatggataccaaccacatctcatagctccggagcaagggtatcgtcatcttatagagtcttgcctagtaagtattagaggtccggctgaggcagctgttgatgcggtccatgcaatactcaaggaactagttcgcaaggctatcagtgagacagatgagttaaatcaattccccactctccgtgtggaaataagcaatgcagcttttgaatcattggacagaatgcggaatgaaagcaagaaaagtactctgaagctggttgatatggagtgcagctatttaactgttgatttcttttggaagcttcctcaggatgttgagaagggtggaaatccaacaaactctatttttgacagatacaatgattcataccttagacgaattagtactaatgttctggcatatgtcaatatggtatgttcaagcttgagaaactccatccctaaatctattgtttattgccaagtccgggaggcaaagcgcacattgctcgatcgcttctttacagaattgggagcaagagagatcaagcacatttctaagcttcttgatgaagaccccgcggtgatggagcgtagagctaacctcgccaagaggttggaactatatcggagcgcccaggcagaaatcgatgcggttgtgtgggccagatagtcttgtcaactaccttccatttttagcgttttatggttgagctctccctccaggtagtttagttcatggatagttgcagctggaagttgctacacaaacgagttcacaaatcacgttcttaaaatctacacaaacgactaagaattaatattcc

SEQ ID NO: 22016 - DNA, 1660 bp, Oryza sativa
  ref <308>: DATABASE ACCESSION NUMBER: AK099256
  ref <309>: DATABASE ENTRY DATE: 2002-08-28
gattcaataacaccccccccccaaaaaataatactttattcctctctcttaattttatttttttactttgtttgagagagagaggatcaataatttcttgttgaaaaatggagattattagtcctagtagtagcagcaataacaattcacctgttcttgcaacatttcttgtggttcttgtagtgctcctagcatcatcacggccagcctcgtcgcagaaccagcaatccttcaccatcaaccccggcggcgccgcggcggcgaggcccggcggcggtaaaggcggcggcggcggcggcgggccgggcagcttcagcgacttcctgacccagaacgtgcagcactacgtgctgagcgagcagaagtacgccgggaaggtgaaggcgctggacgcggagctgtcggcagcggaggccggcgcggcgaggtacgtggtgagcggcgacgggaaggggaagttcaggaccatcaccgaggccatcaaggccgtgccggagtacaacaagaagagggtcatcctcgacatcaggcccggcacctacaaggagaggctgttgatcccgttcacgaagccgttcatcacgttcgtggggaacccgaggagcccgccgacgatcatgtgggacgacagggcggcgacgcacggcaaggacggccagcccatgggcaccatgctctccgccaccgtcgccgtcgaggccgactacttcatggcctccagcatcatcttcaagaacaacgcgccgatggcggcgccgggagcgcatggagggcaggcggtggcgctgcgggtgttcgggagcaaggtggcgatgtacaactgcaccatcgacggcgggcaggacacgctgtacgaccacaagggcctccattacttcaagaactgcctcatccgtggcagcgtcgacttcatcttcggcttcggcaggtccctctacgcggattgcacgattgagtcggtgacgaaggaggtggcggtggtgacggcgcagcagaggagcaagaacattgccgaggccatcgacaccgggttctccttcctgcgctgcaagatcagcggcattgggcagatctacctggggcgggcatggggtgactcgtcccgggtggtttactcctacaccaccatgggcaaggaggttgtgccgatcggttgggacggctgggaagtccagaaacccgagcatagcgggatatactacggagagtacaagtgcagtgggcccggggcgctgcctagcaagaggatcgggtggtcgctggtgctgagcgacatccaggccaagcccttcaccggatcacacttcgtctacggcgactcctggatcctgccgcctcccaagagcatgtaattctgcctgggctgggctagctaaccacaacatgtgttgtgtagggccgtgattttttccagcccattgggccgacaccctcttgactggttgcagttaagcagaggttggttttattatttgtttggaactatgatttgaagatcatatccaagcatgcatgcacatactttgcattattggggggagcatgatgttctgaggagcggctgatgagaatctggaatgagtagttctacaagcttatggcttcttttgtattcggattctgataatctgagtgagaatctgtgttgtttgagaagccg

SEQ ID NO: 22017 - DNA, 1450 bp, Oryza sativa
  ref <308>: DATABASE ACCESSION NUMBER: AK072231
  ref <309>: DATABASE ENTRY DATE: 2001-12-06
gatacagtggagagataggggaagagagggagcgatccaatcgcgtcgctaaaaccctagcggctggctgatttgggggattgctcgtcggagagatgaagatccagtgcaacgcgtgcggcgcggcggaggcgcgggtgctgtgctgcgccgacgaggcagcgctctgcacggcgtgcgacgaggaggtgcacgccgccaacaagctcgccgggaagcaccagcgggtgccgctgctctccgacgacggcggcgccgcgcccgccgccgccgccccggccgtgcccaagtgcgacatctgccaggaggcttctggatacttcttctgcctggaggaccgtgcacttctttgcagagattgtgatgtttctatacacacagtaaactcctttgtttcagtacaccaaagattcctactaacaggtgttcaagttggccttgatcctgctgatccagttccacctgttgctgacaagcatgttaagagtgctggtggttcagtggattcagcaactaaacatttgcaaaggaatcctacagacttatctggtgaaaacagtgcatctttgcccagccaaaatgtaatcaatggtaattattctaggcagagttctgttacaatggccaagacaggacaggtcaattggactatgagcaacaacacaattagatcaatagaccctccacccaagtattcatcagaggaaagtccagcacttctgctagctagccacactagcaccatggcagcgtactccagtcaaatcagtaaggatagtgatcggatctacaacttaccattcacaggtggtaatgggtcagatagtctacatgattggcatgttgatgagttctttagtaactcagaatttggctttgctgagcatggttcttctaagggtgacaacgctaagccagggagtgctggtggatctccgcagtgccgtctggctgaaggcctgtttgtcgaaggacttctaggtcaagtgcctgacaatccatggacagtgcctgaggtcccctcgccaccgacagcctctggtctctattggcaaaataatttgctttgcccttcgtacgacagcaccatgttcgtccctgagatttcctccttggagaactctcagaacaacttcactgtatctgctggtttgaagcgccgaaggaggcagttttgatctgccgatagcatcagacaccattcggtttagttggcaggtcacgttgagaggagggcttcttgcctgcctgaccaaagccacaaaacacagggatggatgatcatccagtggtcagtctaaaaatatgttgtaatgtttgtgtttcgactatacgtttgttgctgaagtttaaaggcgagggaattgttgtgagatctgggatgacagatttgttgttaccaattttgtgaatagtgaaaataaaaagagcatggataagatcatgaatt

SEQ ID NO: 22018 - DNA, 1522 bp, Oryza sativa
  ref <308>: DATABASE ACCESSION NUMBER: AK099257
  ref <309>: DATABASE ENTRY DATE: 2002-08-28
gctttttgcccccctcctctcctccgcctcctccacacacgagcgcgtcccccgacgccgcgccgagatctagggttgggcgcgcgcgacgccccccccccgcggcgaggaggatgagcagcccccatggcggcctcgacgaccagatcgagcgcctcatgcagtgcaagcccctccccgagcccgaggtcagagcactttgcgagaaggcaaaagagatattgatggaggagagcaacgttcaacctgtaaagagtcctgttacaatatgtggtgatattcatgggcagtttcatgaccttgcagaactgttccgaatcggtggaaagtgcccagatacaaactacttgtttatgggagattacgtggatcgtggttattattctgttgaaactgtcacgcttttggtggctttaaaggttcgttatcctcagcgaattactattctcagaggaaaccacgaaagtcgacagatcactcaagtttatggattctatgacgagtgcttaaggaagtacgggaatgcaaatgtgtggaaaacttttacagatctcttcgattacttccccttgacagcattggttgagtcagaaatattttgcctgcatggtggattatcgccatccattgagacacttgataacatacgtaacttcgatcgtgtccaagaagttccccatgaagggcccatgtgtgatcttctgtggtctgatccagacgatcgatgtggttggggtatttctcctcgaggtgctggatacaccttcgggcaggatatatcagagcagttcaaccataccaataatttaagacttattgctagagctcaccagttggtcatggagggattcaattgggctcatgagcaaaaagttgttaccatatttagtgcacctaattattgctatcgctgtgggaacatggcatcaatcttggaagttgatgattgcagggagcatacattcatccagtttgagccagccccaagaaggggagagccagatgtaactcgtagaacacctgactatttcctgtgatgtaaaagtggtggactgtctctgcagcaaatgtttgatagctaggtgaagttccctggttgcagatatttttttcccctcgaatctcctgtgtgttattcttactacctttgcccgtggcgcttggctatcgcgagctgctttgctgcatcatgattcaagtgtatacctacagctgggaggattcatcgtgttctcacttatctctaattggctgatgcttggcttgggggctgcagtggtgactcgaagcatcaagtagcaaatttgtattatgaaaggaaaactattctctttgtattcattttgttcgcctttcttccccacaaatttcacctaattttcttttttcttttttcatgatccttgtagagatgaacaatgtagttgtatggctccctgttgagccggtaggtctttctgagtacatcttgatttgccgtacataattgcttgaaaaacaagtattagaattctttgtgacc

SEQ ID NO: 22019 - DNA, 1545 bp, Oryza sativa
  ref <308>: DATABASE ACCESSION NUMBER: AK072232
  ref <309>: DATABASE ENTRY DATE: 2001-12-06
ggcctcaaccactacaacacaaaaagcgagagagatctctcccgagctcgatccggtccaccgcgacacgaagacgaccatggcgatggctcgctcccagcttgccgccgtgttcctcgccgtcctcgtctcggtggcgccgctcgccggcgcggcggacaacctccaggacgcgtgcaaccggacgctgttccccaaggtgtgcatccaggcgctgacgacgaacccggagagccggacggcgaacgcgcggcggctggcggagctgtcggtgtacgtggcggcggaggtgggcacggcggtggcggcgttcgcgcaccacgagctgaacggcgtgaaggaggacgccctgttcaagtgcgtggacagctgctccgacgacatcgaggaggcggtggcgcacctcagcgcgctcacccgcgagctcaccgacgccaagttcctcgaggtcaaggcctggctctccgccacgctcggcggctcctccacctgcgaggacacctgcaaggacgcccccatcagcgagatcaagaacgccgtcgtcaccaagagcctcgagttcgagaagctcctccgcgtcacgctcgacctcatcaccgaggcctccggctccatgtccgccgacgtcgccctcccgcccgccaccggcggcggcggcggcggctatggctatgaatccagcagcgccgccgccgcgccggcgccttccgagtccgactccgacgtcggctccggctcaggctccgccgccagcgcgccgggcccgagcccatccgacgacaccggctacggcggctcctccggcagcccatccagcagcccatccagcagcccctccagcagcccctccggcagcccctccagcagcccctccggcagcccctccggcagccccgccggcagccccgccggcggccccaccgccggcggccctgcatctggaccgtcgtcgtacggcgccgcctctggccccgccgaagggccgtcgtcgtccggcgccgcctctggccccgccgaagggccgtcgccgtccggcgccgccggccccgccgaagggccctcgtcgtacggctccaccgaagggccgtctccatcgccgtcgtcgtccggctccgccgacgcgccgggacccggcgccagcgcaccggattccgaggagtactgagcgacgtacggcgcatgcatggctacacagatttttccttcttcatatcaccatttctttttctccagtcttctttgaactaatccgttgacactagcgaagattatgatgggttgatcattaagcctacgtagaaaatccattgacataattattacaatggtgtatggggaaaaggggaaaaatattagtatggtttatgaggattatttcggatcaagaaatgaggcccatataggagagatggcatgtggccccaaatgggagatttttattttattttatttttttgggaaaaggagattttttttattattattgtaatattgttatatgttgtattggttttctttgatgaaattatatctgttctaagtgct

SEQ ID NO: 22020 - DNA, 1435 bp, Oryza sativa
  ref <308>: DATABASE ACCESSION NUMBER: AK072233
  ref <309>: DATABASE ENTRY DATE: 2001-12-06
gattccccaatctaggtttttcgcgatggtgtcggcgtcgcgcttcgtcctcctctcgaggctccccgccgccgccgcctcctcccgcttcctccgcccgctggccgccgcggggagcctcctgccggcggcgcttgcccccttcgccccgcccgcggcgggggccaggtgcttcgccacgcagccggcgacctcgtcgctgcgggactcgtcgccgaactggagcaaccggccccccaaggagacgatcctcctagacgggtgcgacttcgagcactggctggtcgtcatggacccgccccccggcgatccctccaaccccgagcccacccgcgatgagattatcgacggctacatcaaaaccctcgcccagatcgttggaagtgaggacgaagcacggcataagatatactcagtgtcaactcggcattactttgcttttggtgctcttgtatctgaggaactctcctacaaactcaaagagttgcccaaggtccgctgggttcttccagactcatatctggatgtcagaaataaggactatggaggagagccttttataaatggagaagctgttccttatgaccctaagtaccatgaggagtgggtgagaaacaatgcacgtgccaatgaaaggacccgacgcaatgataggcctagaaactttgacaggtcaaggaatttcgagaggagaagggagaacatgcacaacttccagaacagagatgtgcctcctgggcagggattcaacagccctcccccaccagggcagggcccagtcctgcctcgtgatgctcctccgatgcctccacctccatctccaccaaatccaggtgctcctccaagctaccagccccatgcaccaaatccgcaagcaggctatacaaactatcagggtggtgtgcctggttaccaaggtagagcccctggctatcaaggtggcaaccagaaataccgaggtccacccccacccccaccctctgcttaccagggcaacaaccctggataccagggaggagggccaggttaccatggtggcaacccacctccttatcaagccggcaacccacctccttatcaagccggcaaccctgtctttgctggtggtgcaccaggctaccaaggccaaggaggcaaccctagttaccagcaaggcagcgataactacaatgccggtgcgccggcctataagagggatgagccagggaggaattaccagtagaacaacactgctagaacaaatgatatgtagagtctagtacgagcataacgctatttgctgtctgttttggagtctatcgcatgtatactcttaccctgctttgcaaactcagtttcttatgtgtcgactaattacttcgatgtgtctgaaactggcgattgtttgaggcacttctagcattataaatgtttactcaactagtgttttttgtcc

SEQ ID NO: 22021 - DNA, 2124 bp, Oryza sativa
  ref <308>: DATABASE ACCESSION NUMBER: AK072234
  ref <309>: DATABASE ENTRY DATE: 2001-12-06
gaaacgatcaatcgattgattgctcgatcactggctctctctttgccggcgccgccgcttgccggcgaccaagtgccggtgagctccgacgagcacctccctgaagcgtggcaggtcgaggcggacgttctggcgatcgaggtagaccttcttggtgacgtcccagccgcgcttgccgacgccggcggggtcggtgagcacggggtcgccggtggggtactcgcgggagagggagctctcctcggggaggatcttgtagccgacgtagcggaggccgaggcgcgccgccggctcgccgtagtaggcgccggcggcccagtcggtgccgagcggcacgacctggacgaacaccttgcccgggcgcatgaagaggaagtgggtcatggcggcgccgtgcacgcccaccatggcgtcgctggcgttgagctcccggtatatcttgcacagctcggtggtgcgctcggggcggaccacgcgcacgtcgaagccgacgtccgcggcgagcgcggcgacgtccgcctcgttctcgatcacgcgggaccccgtgcgcgacacgatcaccagacgagacctgtccggcggcgacggcgaggcctgcttcgccggaggcgccatgatcggcagggcgatggaggtggtggtgggcttggccgcggcggcgcggcgcttgcggctgcgagcggcgcggcgctcgagccgctcgaggtactggatgcggccgcggtaggcgtcgtcgaggagcgtccggaagtggcggatgctcttgccctccggcgtcttctcgggatcgacggtgagctcgccgtggatgcgcaggccggcgatcacctccgggaagcagtgcacgcggcggtcggcggtgaagtcgatcggcgggaacgccgagaggcgggacacgacgtcgccgtacttggtcatccaccagtcgtggtactcgaggatgacgaacaccacgcggcggcggaggtggttcgacgtcacgaacagcggcaggatcccgtcgttgaactcgtggtacacgttgcccgtgtacccgcccgtggagaacaccacggcgggcacgtcgtgcacgacgtcgcaccgcgccgcgccgccggcgggcacgcgacggagccgcacctcgtcgatcgtcgccatgacgttcgcctcccacttgcgcgtgtacggccgtatcctctcctcctccaccgccgccgccgtcgcgttcccggacgacgacgacacgagctggaacgacgcgctcgccgagtgcatccgcacgtcgccgcgcgcgaagcagatgtccgcccgcgtcgacgtccggtcacagcaaaggctatcattccccatgccagagcacggcgccgcggcgacctccaccgcacgccgcgccgccgcggccgcgccaccgccaccctcgtcggagtgcacgaaggagaagaacgacacgggcgccacgaacagcgtcccaaccgagacgaacgacagcagcagcaggcccaaagaagcggcgcatgctgaacgccctaggctgcgccgccttgccgttcttgccggcgccgccgccgccgtagtcgtggtagtagtacatgacacggcggccggtgccggccttgggcggcgtcgagaccttgcatgcgacctcctgatcctgctcgcccttcctgaactgtaggatgtagattctgtgctgctgctgctgctgttgttgcaccatgcttggctttggctgtagcttggcttggtctacaaaaaaaatgagaaggttttggggttttggattgtgagaagctgcagggagagagcttaaatggctatagagaagagtataaaaaactagtggcggttagaggttgagctatgctagagcaacccggccagcaagaagcatcactgatgatggaacatcttccagcatatttggtgggaccatcgatcggtagagagcatcaaaatgtgaaaaatctgtccatatggttttgttatataactgtttagtgctatatgtctttttagcggtcggaatcatatatcgtgtgttatcatctccgtgtttctggagaagcctaatttacattcatgtccctatctatatcggttggtaagaaattatattgtgtaactgattgaagaccatttagtttc

SEQ ID NO: 22022 - DNA, 1437 bp, Oryza sativa
  ref <308>: DATABASE ACCESSION NUMBER: AK072235
  ref <309>: DATABASE ENTRY DATE: 2001-12-06
gaccaccacctcacaagctaattcaacctactaagctagctagctagtgacaattaagtgatcacaagtgttgttgcgatgggtagagtagtggtcgtcgtggcggcggcggcggtagccgtggccgtcgtcgtgctgctgggcgcggcggcgccggcggcgagcgcgatggagttcggcgacaaggacgtggcgtcggaggaggcgctgtgggagctgtacgagcggtggcgcgggcagcaccgggtggcgcgggacctcggcgagaaggcgcggcggttcaacgtgttcaaggacaacgtccgcctcatccacgagttcaaccgccgcgacgagccctacaagctccgcctcaaccgcttcggcgacatgaccgccgacgagttccgccgcgcctacgcctcctcccgcgtctcccaccaccgcatgttccgcggccgcggcgagaggcgcagcggcttcatgtacgccggcgcccgcgacctgccggcggcggtggactggcgcgagaagggcgccgtcggggcggtcaaggaccagggccagtgcggcagctgctgggcgttctcgaccatcgccgccgtggaagggatcaacgccatccgcaccagcaacctcaccgcgctgtcggagcagcagctcgtcgactgcgacaccaagaccggcaacgccggctgcgacggcggcctcatggacaacgcgttccagtacatcgccaagcacggcggcgtcgccgcctcctccgcctacccgtaccgcgcccgccagagctcctgcaagagctccgcggcgtcgtcccccgccgtcaccatcgacggctacgaggacgtgccggcgaactcggagtcggcgctgaagaaggcggtggcgaaccagccggtgtcggtggcgatcgaggcggggggctcgcacttccagttctactcggagggggtgttcgccgggaaatgcgggacggagctcgaccatggcgtggcggcggtgggctacggcacgacggtggacggcaccaagtactggatcgtcaggaactcgtggggcgcagactggggtgagaagggctacatccggatgaagcgcgacgtgtccgccaaggagggactctgcggcatcgccatggaagcatcctaccccatcaagacctcgccgaacccggcgcccaagaagatcaagaaggtcaccgacgacgacgaagatgatgatgacgaggagcaccgccaccacgacgaactctaagctcatttaattgtgtgttttacaacagtaactggctaccgtttggaggcgattgatcgacgtcgtaacaaaataagcagttcgttaatttaatcacctgtagttgatttgattgcatgctcgtattttttgcaatctagctcgattatgtttacgctgtgtaatgattattgattattaatttgaaaaagattgttaagt

SEQ ID NO: 22023 - DNA, 2328 bp, Oryza sativa
  ref <308>: DATABASE ACCESSION NUMBER: AK072236
  ref <309>: DATABASE ENTRY DATE: 2001-12-06
gacctcccctacgccctagctcctcgccccccgccgccgccgccgccgccgacgacgacgaccgcgcgtgtccctccctcgccggagtagtgaggggggcaccgcgagaatggattgctgccggcgcgtgaacccgttccgcgcctgctcgccgctgcgggggctcgggtacctcatgctggccttcgtggccgccatcgtcgccgtctcctactacgccgtcgtcgtctacacctggggccctctgctgctcggcggcggcgccgcggccggggccgcggccgtcctcgtcgccttccacctactgggatcttgtttcttctgcagcttgcaatgattatatggtgctacttgatggttgttttcaccgatcctggtgctgtacctgaaaactggagacatgcttctgaagaggatggcataggtgtgaactctaggactatatcatataattgggatgctacataccccaatccagaagggcaaagtgcacaaaaatattgttctcgctgccaaaatggcaagccgcctcgttgtcaccattgttctgtttgtaacagatgtgtgctcaaaatggaccatcattgcgtttgggtggtaaattgtgttggggcaaggaactacaaatattttctccttttcctggtacttccgaaacactttgatttgcaatttcttatcatttgcattcatgacaagttttctataaaacatctgtgttcggtgaaagagagaaggtttgtttcgttttccacgcgcacgcttcccgaacaactaaacggtatgtttttttgcaaaaattttctatatgaaatttgcttaaaaaataatattaatccttttttgaagtttaaaatagttaatactcaattaatcacgcgctaatggctcacctcgttttgcgtatcttctcaatcttctcttttcctctcctctcaaactcagcagtccatctgtgtccacatagatttcgatttttataatgctataatttgttttatccatgctcaacctatcactgaatacatacacatttagaaaagttgggcagggtgctaatttcttcctttcgtattttgtagacaacttgcttatctgaactatacatggaacataaattccttgctagaatagacgtaggaatgtactcggtagtattggtttagaaagtgtgcagtcaaaccttaaaaactttggcttctaggtatgaaaaaaaagaaacattaagattttttgtgaaaaatattttcatagcatcatatttttcatggataatggtccaatatttgtgttggagacaagtgaaacagaatggagggagaatgtcttcaaccctcttaaaatattttttccctgtaatttggggacctgaaaagtatttataaagccttaaaggcttcaaaattttactccaggttccacttttttgctgtacttttattttatagttagcatgctcacaagctaacaatcaatgtatgatatgcttggtgtgtgagcactggcttttgctactacataaattcataaatttcatatcaatgagcaagacattcttcttctctagtctcaagtgccaaaacatcaaacaagtcactgaagactattttatattttctgtttactagcatcttctatagtatatactttatagaccatttctatttagcttcattaattctttctattttctatgtaattgcattttgtctgccttttaggtatatacatttgttgaaacagtgttggatacattggtactacttccttactttattgagttcttccgagatgaaagcagacgttccagctcacctggcgatattgctattctatttgttacttttgttcttaatttggcatttgcactgagccttctatgtttcattggaatgcacgcatctcttgttacaagtaatacgacttctatagaggtccatgagcgaaggaattcagtctcatggaagtatgacctgggatggagaaaaaacttggagcaggtttttggcaccaaaaagttgctctggtttcttccattgtactctgctgaggatctgcacaacattggagcacttcatggccttgaattccctactcgatctgatgcagtcgtctgactacatgtacttccaccagcatcttgttcaaaatattccatattgccgactcacttgtagattaagctacctgatttctgtacagaaatccatcgtcgttctttcataggaagtgtgaaatgcaatatcattctttttgtatagttttgtggtacttgatccatggaccatactaaattacacaaaatcatgttaattctttggttgattt

SEQ ID NO: 22024 - DNA, 1472 bp, Oryza sativa
  ref <308>: DATABASE ACCESSION NUMBER: AK072237
  ref <309>: DATABASE ENTRY DATE: 2001-12-06
gacctccacctcacctgcgagcagcggtgcctcctctcctcctctgctgcctccgccgcgcgcatcctcctcccatccatctcttctcggcctcggcgcccgtttcctcgctacttcgccgcctgcgccgatctccattaatccatccatcccgcgagggggagcagcggggtaggggtgccgtcgtcctgccgcttccgcctccggactagggatcatgtcaggaagagatcgtctgccacgtcgctttatagaggatggcaggggctaccctgacatccgtgtagttgatgaacgtaggggctatcctgacatccgtgtagttgaggatcgtaggggctaccatggtattcgtgccattgaggatcataggggctatcctgacatccatgaaggccttgtcatgagggttgcacctcgctctcacacggctatgccggaggaagaaattgagattcagggggccgaattcaggaggcttatggcagatcaccgtgctcttgctgaagaacgtttggccttacaccgggaattacaagctggaaaagatgaggtccgtcacttgaacacgatcattgcagacatcagtgccaagaaggaaacttatatcggtgagcttgttgacaaaaggaggaaacttgaagctgaacttagagcaaatgagtctttaagagatgagattgtgcagcttcggggtgaaattgataagcaccttgtagtcaggaaagagctctctgcgaagtctgcatctatcatgcatgaactaaccagggaacaatctaataaacagcagattcctatgttgaaagcagagattgatgcccttcgacaggaacttgttcatgcaaggtctgcatgtgaattagagcagaaaggaaattttcagttggttgaacagaagaaagcaatggagaagaatatgatttcgatggcacaagaaattgaacaaatgcgagcagaattagctaattccgaagggagaccatgggccccaggtgcgacatatgggatgaagctgggcagccctgaagtgaccttccctacttcatatggagataactacaatatccatgtgggaggttccgagaaaggtcattcacatcttcctgaatcaagctcatggggtacatatgacaacaatcgccttcagtaccgttaagatcgcagctgctatgaaaaaagtccgtgaagacttctgggtcccatggtcatatcacatggtttagattatcgtatctacctccttttttgtggtacaatcaatagttatctttcttaattaaaattgaaatgcctctaatcattttcttctctgtgtgtcatataaaatatgttccaatggtaactactgcttatactttggctcgatacctatatccaagtttccttggttatatggatccatgacacagttattttaatatgacttgggtatatatatgatatagtttagttaatgactcagtcatgcc

SEQ ID NO: 22025 - DNA, 1468 bp, Oryza sativa
  ref <308>: DATABASE ACCESSION NUMBER: AK072238
  ref <309>: DATABASE ENTRY DATE: 2001-12-06
gaaatgcttctctcgcctctctcgcctctccctttccaagaaaccaccaatctctctctctctctctctttctctctcgctcgcggcggagaggaggagcagtctcccatctgcggcggccggcggcgtgcgtgcgtgcgggtggctggtgttgtggattccgtttccgatggacgacgcggtggagacggccgccgagattctggtcagcttccagaacaggaggctggtgcggtggccggagtgggttccgcggccggatgagaagggcgccgccgctgaggagaagaagttgccgggatggaaggaccggcggaagcggacttccaagtccaaaccgccgccggccattttggtgtgtggcctggagctgagggattccggcggggagaaggcggcgtcgattccggccccgctcccgccccccgcgaggaagaagatgttgttcaagatgaaggtcaaggacgagccgacggcggcgcgggggccggagacgccgccggagtacggggccggcgcgggatccggcgcgaatttcagccgggatggcgtggcgaggcctctgccgccacgcgcggtggtgaaggccgagccgacgccggcggcgcggatgcccgagtcgccgccgtactacgtcgcggcggccggatccgccccttccacggccggcggcgaccggcgtccgcgtcctcgccccgtcgagagggcgcacgtcaagacggtcctcgcggcggcgaaggaggccatggaggcgtctagcccagagacccctctggactacgccgccaccaccggatccggcgcgtcctccagcggcgacgagtcgtcgcggaagcggaaggcggcgccgggggggggcggatccggcggcgcctcgtcgagcggcgacgaggggtgcagctcaccggagaagcggccgtgcctggtcgccggcggcggcgctcagaccgccgcagcggctaaagcagagggggaaaagtttgcggattcgatgaaccgtaacgaagatggcgtgcttctcttcgacctcaacgaatgtgtggataatgcgaagattggtcctaatgggagtctttgctagtgttcatcatgcctagatcaatgtgggagtttttgctaacatatccgcgctccgtcgggtaaaaaataaacccaaaattgtgtacataaaaagggcaaagccagtaagtagagcagttgacaagagctggagggctttgccttttctttctagattatatattatatgagtagatgataaggtgggcttaggtggtttcattgaatttgtcaggttagtttctagtcagccttgttcattgcactgctcttgatcatatcttattattctgctggctctctcattgcccagtgccctctgctgttgccttcagatcggtgtaaggcatctctgttttaatcttcacttcaatgtggaactgatacagtgcaagaacaatatatttac

SEQ ID NO: 22026 - DNA, 1944 bp, Oryza sativa
  ref <308>: DATABASE ACCESSION NUMBER: AK072239
  ref <309>: DATABASE ENTRY DATE: 2001-12-06
gcgtggtgtgatgctgacgcgtcgtcggtgatggcgcggccgctgctgaagatcgggcacggcctcgacaggttcaggtggcggaggtcgacgtcgtcgtcgtcgtcgtcgccgctggcgctgtcgctgtcgtcgtcgtcggcggcggcgttgtccgacgacgacccggggagccccatggacccggagatgccgcccgcggcgaggcgggcgctgtcgaggagctcggggtcgagggggaggctgtcgttcgagctgccaccgctggccggtggcccgtcggataaggaggaggcgccgccgaggacgtcgtcggctccggcgccggcgaggcccgcacccgccgcgctgcatgagggcccaccttcagacgcggagatggtgagggagaagttctcgaagcttctactcggggaggacatgtccggcaccgggaaaggggtgtcctctgctctcgctctctccaacgccatcaccaatcttgcagcttccgtcttcggcgagcagcgccgcctccagccgatggccgccgatcagaaggcgcggtggaggagggagatcgactggctcttgtcagtctccgatcacatcgtcgaatttgtcccgtcaaaacaagtctccgaggatggatccaccatggagatcatgataacccagcagcgtcgggatttacagatgaacatccccgcattgcgcaagcttgatgcgatgctccttgaatatctcgataatttcaaagacaagcaggagttttggtacgtgtcgaaagacgcgagtgaatcagagaagggaaacacgccgaggcaggatgacagatggtggctcccaactgttagagtccctcctggtggtctgtcagatgcatcaagaaagtgggttcaacatcagaaggatctggtcaatcaagtccttaaggcagcaatggccatcaacgctaatgttcttatggaaatggatgttcctgaagcatatatagagtctttacccaagaatggcaagtccacccttggagattcaatgtacaagattataaccgaagatcatttcaatcctgaagaactcttaggaactgtggacatgtcagctgagtacaacatcatagatcttaagaaccgaattgaagcctctgtggtcatttggcagaggaaaatggtgcacaaggaaggtaaattgtcatgggggcatggtgtcaaatttgagaagcgggagaaatttgaagcaagagcagagaatgtcctcctcctcatcaagcacagatttcccggcattgctcagtcagctcttgatataagcaaaattcagtacaacagggatattggcttggccattttggagagctactccaggactcttgaaagtttagctttcacggttatgtctcgaatcgaagatgttcttcatgctgactccctcgcgcaagcttctaatactagaacccaagaatcaatgagaatggccagcttatcaagatatgacactgataaggttgtcattgatgctaaggccgaggtagagagactgggaagaatggaaccagtttcagcgacactatttgactttgtcagtcctcgagatcaagatgttgtggcgacgaagatggactcaaaagaaaagggatgtaggggggatgctcatagtcgaaagttgacaaaggtctcaccgattgcaactaagaggtattcttacctagaaaaacttgagaatttgagtggaacaagaagcccaatatctagacactagtttatgtgtagggggaaagacatatggatgatgctcgctgcagcagctcattcagaaaaatacatgtatgtaaatagcttagatgttcatagcatcatgagatgcagaattgagcatgtaccagtgtgaggtttggcaaattttagccatcttcacctccattcccaatggaagcttggtgcacaaagctatgataattagtgg

SEQ ID NO: 22027 - DNA, 1508 bp, Oryza sativa
  ref <308>: DATABASE ACCESSION NUMBER: AK072240
  ref <309>: DATABASE ENTRY DATE: 2001-12-06
gttctcctcttcccctctccaagtctcccggtctccttcctcctctcttcccggccgcctcgcctcgcctccgccttcccgatcgcaattcgcctcctcctcctcccacccatggcgcggcgatccgcccccctcctccgccgcatcctctcctccccggcccccgccccggcgcaccatggcggcgccggcgcgcgccgcacggtgacctacatgcccaggccaggggacgggaacccgcgcgccgtgacgctgatcccgggggacgggatcgggccgctcgtgacgggggccgtgcagcaggtgatggaggtgatgcacgcgccggtctacttcgagacctacgaggtccgcggcgacatgcccaccgtgccgcccgccgtcatcgagtccatccgccgcaacaaggtgtgcctcaagggcggcctcgccacccccgtcggcggcggggtctcctccctcaacatgcagctccgcaaggagctcgacctctacgcctcgctcgtcaactgctccaacttccccggcctccccaccaggcaccaggacgtcgacatcgtcgtcatcagggagaacaccgagggggagtactcggggctcgagcacgaggtcgtgcccggcgtcgtcgagagcctcaaggtgataacaaagttttgctctgagaggattgccaaatatgcttttgagtatgcttaccttaacaaccgaaagaaagtcacagcagtgcataaagcaaacatcatgaagcttgctgatggtttgttcttggaatcttgccgtgaggttgcctcaaagtatcctggtattcagtataatgagatcattgtcgacaactgctgtatgcaacttgttgcaaagcctgagcaatttgatgtcatggttacaccaaacctttatggcaatttggttgctaacacggctgcaggtattgctggagggacaggtgttatgcctggaggtaatgtgggtcaggaccatgctgtctttgagcaaggtgcttctgcaggaaacgtcggaaacgagaacatcttagagcagaagaaagcaaaccctattgcgctgcttctatcatccgccatgatgttgaggcatttgcagttcccgtcattcgccgaccggctggagacggcggtgaagcgtgtcattgcggaaggcaagtacagaacaaaggatctaggcggcaccagcaccacccaggaagtcactgatgcagtaatcgccaatctggattagataccagccggtgcacgcctgagagattaattcttttgggggactagctcatttgtcccgactcccgattatttttgtttcgtatagagtttagatcgtcaatttgtacgacgcttcccaggaaggaatcgtgaggcaatatctgtttcttagttctgttccacaaataattcaggaacccacgaggagtattcttcacacgatgctgtgtaacaaggtaaagagaacaccttttgttgcaaagggaaatgctggcagccttaattcctttaact

SEQ ID NO: 22028 - DNA, 3080 bp, Oryza sativa
  ref <308>: DATABASE ACCESSION NUMBER: AK072241
  ref <309>: DATABASE ENTRY DATE: 2001-12-06
tgagacatctccacccttcctatcttgatatataacttcgacacactgacaacttaatttgtcagaatgctcacggccacgcagactctggcgccggcagtgctctcccggagccatggcgccccttcttccttctccagccagccgcgccgcaccgccgccgccgcctcgagagtaagctgcacccgcgtcggcgccttgtcggaggtcgtcaatggcgaactcgtcgtcggcgaccaagaacagacgaccgacgacctccttacgcggcacaagaatgtcgtcgccgactacacgctgagcgccacggtgacggtgagcttgaagcaggacgattccactccccagaaggtggcggacatggttaatcgagactggcttttccttgatttcttcagctcgcatatagaggggatgcacacggagcctcagctcgccaggtactcgcacatggatggcaaaggctccttcatatacgaggccagcttcagcatcccgtcctcgttggacgccgtcggcgccgtgcaggtcgtgaaccgctacagcagcgaggtgtacatctcggacatcgacgtccacctctgcggcggccgccatcagtggaccgacatcactttccactgcaactcttggatcgactacaaccccaacgaccagcgcttcttcttccctctcaagtcgtacctcccgtctcagacgcccaggggcgtgaagaatctgcgcaaggaagagctcagggccatccgcggcgatggccgcggcgagcgcaaggagtgggagcgcatctacgactacgacgtctacaacgacctcggcgaccccgacaatgacccggccactcgtcggccggtgctcggcggccgcgggcgcccctacccgcgccgctgccgcacgggccgccgccgctgcaggacagacccgtcgtcggagtcgccgccggccaaggacggcgccgggatctacgtgccacgggacgaggcgttcacggagcggaaggccggcgcgttcgccaccaagaaggcgctgtcggcgctgtcggcgttcaccacggcgcagagggtgtccggcgaccggcggcggggcttcccgtcgctggcggccatcgacgcgctgtacgaggacgggtacaagaaccggccgtcgtcgtcgcagcaggaggcggacaacctcgaaggctacttcagggaggtgctccagaagcaggtgaagctgctgctcaagggcgagaaggaggagttcaaggaggagctacgcaaagtgttcaaattccaaacgcccgagattcacgacaaggacaagcttgcatggttcagagacgaggagttcgcgcggcaaacgctggcagggatgaaccctctcagcatccaacttgtcagggacacggacttccctatattcagcaagctggacgaggaaacctacggcccaggggactccctcatcaccaaagagctgattgaagagcagattaatggggtcatgacagcagaggaggccgtggagaagaagaagctgttcatgctggactaccacgacgtgctcctgccgttcgtgcacgcggtgcgcgagctggacgacaccacgctgtacgcctcgcggacgctcttcttcctgacggaggacggcacgctgaggccgatcgccatcgagctgacgaggcccaagtcccccaacacgccgcagtggcgccaggtcttcacgccgggctccagcgtcgcggcgtcctggctgtggcagctcgccaaaacgcacgtcctcgcccacgacaccggctaccaccagctcgtcagccactggctgaggacgcactgctgcgtggagccgtacgtgatcgcggcgaaccggcggctgagccagatgcaccccatctaccgactgctgcacccgcacttccgcttcaccatggagatcaacgcccaagcgcgcgggatgctcatcaacgccaatggaatcatcgagagcgccttcgcgccggggaagctctgcatggagctcagctcggcggtttacgacaagttttggaggttcgacatggaggctctgcccgccgatctcatccggaggggcatggcgatcgaatgcgaggatggcaagctggagctgacgatagaggactacccgtacgccaacgacggcctgctcatctgggactccatcaaggagtgggtgtcggattatgtgaaccattactaccagttggcttcagacatccacatggacaaggagctccagggttggtggaacgaggtgcgaaccaagggccacccggacaaggaggaagggtggccagagctgaactgccacgggagccacgtcgaggttctgaccaccatcatctgggtcgcgtcggggcaccatgcggcggtgaactttggccagtacccctacgccggctacttccccaatcgccccaccatcgcccggcggaacatgccgacggaggggcaggcgtgcagtcacgacggcatgcagccaacgttcgttgaggatcccgtcagggtgctactagacacgttcccatcgcagtaccagaccaccctcgtcctgccggtgctcaacctgctatcgtcacactcgcccggcgaggagtacatgggcacgcatgcggagtcagcgtggatggcggacagggaggtcagggcggcgttcgggaggttcaacgagaggatgatgagcatcgcggagatgatcgactgccggaacaaggatccggagcgaaagaaccggcagggccccggcgtggtgccgtacgtgctgctcaagccgtcctacggtgaccctaaggacatgacgtccgtgatggagatgggtatccccaacagcatctcaatttgagttgtgccaatgagcttgcatctgtttggcgtgctcatcgtgacattatgtatgaaataaaatggattaaaaatccggcctcgtcaaggaatggctaacacagcgagcctgcatctgtttggagtgctcatcgtgcgattatgaaataaaatgacctggcatctgtttgccactgttttcttgtaactactgcactgtagtaagtacaggacaccgtatatacataacgccctgcattatttcct

SEQ ID NO: 22029 - DNA, 1508 bp, Oryza sativa; identical to SEQ ID NO: 22027
  ref <308>: DATABASE ACCESSION NUMBER: AK099258
  ref <309>: DATABASE ENTRY DATE: 2002-08-28

SEQ ID NO: 22030 - DNA, 2513 bp, Oryza sativa
  ref <308>: DATABASE ACCESSION NUMBER: AK072242
  ref <309>: DATABASE ENTRY DATE: 2001-12-06
tcctagctccaccagccatttctcccccccatctcctctctgcttgcgagcttgtcaaccgcgcaaaggttcatatatacaccgatcgaaatcgatcggtgtagagccacactcttggagtcgatcgttcgctggttagctaactaagctaagctgagctgccttgctctcttcgacgatcaggttgcttggtttgacgagctgacgatcgaggagaagaggacggcgaacgtttttttgcaggatcagtactagggttcatcttggagaaccaatttgattcgatagaacgagcgagtcgaagaagatggtgctcgcgagcacgccgaaggtggtgctgggatgcgtggcgttcacgatcttctgggtgctggccgtgttcccgtcggtgccgttcatgccggtgggtcgcacggcggggtccctcctgggcgccatgctgatggtgctcttccgcgtgatgacacccgaggaggcgtacgccgccatcgacctccccatcctcggcctcctcttcggcaccatggtcgtctccatcttcctggagcgcgccgacatgttcaagtacctcggcaacatgctgtcgtggaagagccgcggcagcaaggacctcctcttccgcgtctgcgtcgtctccgccgtcgccagcgcgctcttcaccaacgacaccacctgcgtcgtcctcaccgagttcatcctcaaggtggcgcgccagaacaacctcccgccgcagccgttcctcctcgcgctcgcgtcgagctccaacatcgggtcggcggcgacgcccatcggcaacccgcagaacctcgtcatcgccgtcgagagcggcatcacgttcggccagttcctcctcggcgtgttcccggcgatggtcgtcggcatcctcgccaacacctgcatcctcctctgctacttctggaggtacctctccgccgaccgcgaccagctcgagggcggcggcggcgcgcatggtcccgaggtcgtcgccgacgaggaggtcacctcgcaccggttcaccccggcgaggatgtcccacgcgtcgtccgtcaacgacagcgactgcatcagcgagcccatccgccggagcgagagcatgaaccgcgccgacgcgctccgcagccggagctacaactccgagggcgacatccaggtcgccatccgctcgctccgggcgtcgagcctgtcgcgcgagatggtggaggtgtccaccgtctgcgaccgccgcgacgtcgtcgtcgacggcggcggcggcggcgggccgcgcaagatcaccaggtcgacgagccaccagcggagcgtcatcatcgaggacgcgccggagcagcaccagcatccggccggccttttcgacggcgagaaggacaaggacgacgaggcgatcggcaagcggcggcggtggaaggtgatcgtgtggaagtacgccgtctacctcaccaccctcggcatgctcgccgccctcctcctcggcctcaacatgtcgtggaccgccattaccgccgccctcatcctcctcgccctcgacttcactgacgcccaagcttgcctcgagaaggtgtcatactcgctgctgatcttcttctgcgggatgttcatcacggtggatggattcaacaagactggaattccaaacactctctgggagctcgtcgagccgtatgcgagaatcgatagcccgaaaggcgtcgttcttctcgcgatcgtcatccttgttctgtcaaatgtggcatcaaatgttccaacagttctactgctgggcacaagagtggcagcatcagccgcagcgatctcccctgcatcggagaagaaagcctggctgatcctggcctgggtgagcacggtggccggcaacctgaccctcctcggctcagccgcgaacctgatcgtctgcgagcaggcgaggcgcgcgcagttcttcgggtacaacctcaccttctggagccacctccgcttcggcgtgccgtcgacgatcatcgtcaccgccatcggccttctcatcgtcatgagctactgatgaacaagcctcaaatggagaagaagaagtaagtaagtagcagcaatcgaaatcacgtagcagcagtacaagattgaaggttttactactactactactatttcagctggtttcttccacaaaggtaaagaagaatggaaggaagcagctgtggatatgatggatgcagatggggactgaactgaaatactaggttcagctgagaaaaaacaatgtgatactttgtaatgtgttttttgttgttatagctgggttttgtgttctgtacttgtaatcttttaatccatgcatgcatgcgcgaagcaaaattaagcgcgaggttgtgtcgctaattaatctgctgaaaagcaaaaaaataagtgggggcagattattgtttgtagatgatgataattaatgacccagtcgatggaacttggaattagtcggcgtactttgtaccctgttgtaaggtgaagcaaggcctttgataggaatggatatatggtgatgttattttgct

SEQ ID NO: 22031 - DNA, 2687 bp, Oryza sativa
  ref <308>: DATABASE ACCESSION NUMBER: AK072243
  ref <309>: DATABASE ENTRY DATE: 2001-12-06
gaccacactagcaagctcagagctcagagctcacgactccagagagcggaggcaatggggacgtcggggtcgaaggggatctgacggcgtccggggagtcggcggcggggcggcggggttggggggaggggaagcgggcgacggatgcggcggggtgggcggagcggcctcccggccgtggcacggcggggcgcatgtgcacgtgtcgttcaagatggagaacgcgcggataaccggcgacctcgtcccgcacgtctacggctccgagcccatcatcggatcctgggaccccgcccgcgccatcgcgatggagagggagctggcgtccatgtgggcgctcagcttcgtcgtgccgcctgaccacgaaacactcgacttcaaattcttgctcaagcccaaggatgcagacaccccgtgcatcattgaggaaggtccgacccggcatctcactggaggcatgctcgagggcgatgtgaggattgcatggttcaagatgaatggggatcatgagacgcttgagttcagggttttcaataaggcagacattgtgtccccacttgatcttgcagcgagttggagggtgttcaaggagaattttcagccttccaaagtccggggaatccctgatgtcagtataaatgtcgcacctgcgcatgggaccgaggatacatctactgaaagtttggagcttgacttggagcattacgttattccaacaccatctgcagcaacatctgaatatgcagcaaaccttgccgcaaacccagcatcattgattcaaactggagctttatggacaaatgacatgcttctcagtgatggcatccagagtccaagtagcgccactgcagattttgaagatcacaataactgtaacaaggataatgtggccttgccatcagattctttcaagaagttacaagtttctggaattgtagagtcaaaataagttgacaccttaacaacactgcaaaagcaagatggacaaaagggactttttgtagacaggggtgttggctctactaagtttggaaaatcatcaagtgcatgttccctggcttctggtcttaattttggaacaggaaagcaggccatgccagaagcagcaggagctgttgcagctgcagctgtagctgaccgattgcatgggtcaaaggaggaccgaaaactagctattgttttggttggcctaccagctcgtggtaaaacttttaccgcagctaagcttacaaggtaccttcgttggttaggtcatgaaaccagacatttcaatgttggaaagtaccgccgcctgaagcatggagcaaatcagtctgcagattttttccgtgatgataaccctgaagggattgaggcacgcaatgaggtggctgctttagctatggaggacatgatagattggatgcatgggggaggacaggtcggtatatttgatgcgacaaacagcacaagaaaacgaaggtatatgctaatgaaaatggctgaagggaactgtaagattatatttctggaaactatctgtaacgatccgaatataattgaaaggaatgtacgtctgaagatacagcaaagtcctgactatgctgaccagccagattatgaaactggagtgcgggacttcaaggaacgcctggcaaactatgaaaaggtgtatgagccagtgcaggaaggttcttacattaaaatgattgatatggtaaagggcaggagggcaattacagggtcaccaatattagtgggtaatctcccctgggaaaggattggtcttttttctgggttgaactcctcatcttaaaaccctcaacctaattttggcttaacaagggcattgttgagaagtttaacacaaatggtcagaaggaaagagttgggtgggttgaacacggtcctggagttgaagatggagagctttactcgaagaaattagccaacttcatagaaaagaggctcaaattcctgagaaaactgcatctatatggaccagccacgcttcagaggacaattttgacagcaagtccaatagttggattcccaaagatacaatggcgtgctcttgatgagataaactctggggtgtgtgatgggatgacgtatgaagagataaagaaagttatgcccgaggaatttgaatcacgcaagaaggacaaattaagatatcgatacccccgtggagaatcttaccttgatgtgattcagagactggaacctgttatcattgagctagaacgccagcgagcaccagtagtcgttatttcccaccaggctgtattgcgggcgctatatgcatatttcgctgacaggcctctgagggaagtcccagatattgagatgcctctccacaccataattgagatacaaatgggagtcacaggtgttgaggagaagaggtacaagctcatggactgaatatacatacatctaggctcagtaggacagcaagtctttgctgttttcagatagtcatacagtaacacagatatacgatcgagtcactacaggtctacagctaccacattgtcatttttctcccgacggtgcaaaaacaaaaactagcacctccggtgtaaaactgtaacccactatacccatgaatcactgtaaaaagaagcattcacccaatcagtagttaaaaaaaaaaaactgtaaaataaaaggcatactgctaccaataaagagcgcagatatat

SEQ ID NO: 22032 - DNA, 3941 bp, Oryza sativa
  ref <308>: DATABASE ACCESSION NUMBER: AK072244
  ref <309>: DATABASE ENTRY DATE: 2001-12-06
gaggcacacgaaagcaacagcgaggaggggagagagagagagagagagagagagaggaaaagggagaagccaaggagttgttggttctggtcggagtcggaggaggaggaggaggaggagggagatggtggcgagctgacttggcggatcgcggcggcggcggcgggggatcggagggggagcagggccactcggatggtattgggcttcgccggcgccggaggcggcgatcgcggatgggcggcgggcggggcgggggccgggggttgtaggtggaggaggaggaggggcggttccggagtttggggagggggcggcggtgctcgtgctgggggaggagtggggaggaggaggaggagggatgaggcgcgggaagggcgggaggaacgggctgctgccgagctcgctgaggatcatctcgtcgtgcctcaagacggtgtcgtccaacgccggctccgtcgcgtccacggtgcgctcggccggcgcctccgtcgccgcctccatcgccccccaggccgaggacgagaaggaccaggtattgtgggctggatttgataaattagagcttcatccatcatctttcaagcatgttttgcttgttggttattcaaatgggttccaagtgcttgatgttgaggatgctgcaaatgtttgcgaattggtctcaaaacgtgatggtccagttacatttttacaaatgcaacccacaccagtttactctgatggtactgaaggattcagaacatcacatcccatgcttctggttgttgccggtgatgagacaaatgggtcgggtatggttcaaggtggtcgcttaagtgcactgatcagagataatagcagtgaaactccaaatggaaattgcatttctactccaacagttgttcgcttctactctttgaagtctcactcatatgtacatgttctgagatttcggtctgccgtatatatagttcgctgcagcccccggattgtagctgtagctcttgcagcacaagtatactgctttgatgctgtgacccttgagaataagttcagtgtcttgacatatcctttgcaaggggcacctgggataaatattgggtatggcccaatggctgttggcccaaggtggttagcttatgcttccaatagccctttattatcaagcacaggccgtctaagtccacagaaccttacaccatctccaggagttagcccatctacctcccctagtagtggaagtttagttgctcggtatgcaatggaatcaagtaagcagatagctgctggtattattaatcttggtgatatgggatacaagacactgtcaaagtactgccaagaatttctgccagatggttctggctcccccttgtcatcaagtcctggcagaagatctggcaaacttccctctagcgtgcatccgctggaagctgacaatgctggaatggttgtcatcaaggattttatctcgaaagaaatcatatctcagtttagggctcacacaagtcccatatctgctctttgttttgaccctagtggaactctgttggtcacagcctccgttcatggccataacataaatgttttcaggatcatgccaaccgtaatagctaacagctcaggctctatacgctatgattggacagcatctcatgtccacctttacaaactgtatcgtggcatgacagcagctgtcatccaggatatctcttttagccattttagccagtggatatctattgtttcatcccgaggtacttgccatatttttacattgtctccttttggcggtgatgcgagtctgctgccacagaattctcacagtgatgggctaccccttgccccatgtcaatcaaggccatggtggtcaaagccatcattccttatggatcatcagcttcatccagctccttcaactgtaactaattctgtagtcagtaggataaaaaacagttcttctggttggctaaatactgttagtaatgtggctgcttctgcaagtgggaaactatctgtaccatctggcgctgttactgctgttttccacaattccaactatgaaggttcattgccagttccatcaaaggctaatgccatggagcatctattggtgtattcaccatctggccatgttattcaacatgaactactgccttcaggttctgaatcctctgatagcagtccaatagttgggcctggttccttgcagatccaagatgatgagttgcatgttactgctgaaccgactcagtggtgggatgtatgccgtaggacaaactggccagaaagggacgaaaacattgcaaacatagtcttccataatcaacgaaatagtatgatggcaatggatgcttctgactgtgatagtgagcattcagattccgttccatcagatggtatttctgggaaagagatgatgagatctcgagaaagatcaagttggtacctctcaaatgcagaggtacagataagttcatggaggattcccatttggcagaaatcaaagattttcttctatgtgatagatcaaccacctgcaaaatcaggggaatctcttagctctagtgggggagagattgagattgagaagctgcctctgcatgaggttgaacttcggaggagggaattgctccctgtattcaagcagttccactattctgaacagaacttcagtgacagattcaggaatcttgcaataggacggtttcagaatgcattgacatacatcgacaaggataatggtgctcatggatccaaggcggggttccctatatctggattttacagtgatatgaggaaaatgcagaacatgaatggtttagaggggcagttattgttggaacctatcactaatgatttacaaccaatggaaaaatgcaattctgttcaatctcctaaagtggcaaattttactgcccttcacaatgtagataatgagagcatgaaccatgtttcaacagcaactggagcaaccacatcagtcacaacagtggacactttaccttcaaccatcagaccattgagcagctactccctcttggatggatctcttgatgatggattaccatcacctgcaagtaatgtatcattcaggcctcagataaccaacaattcttcagtaagcaatggtacaatgactgacatctcaaatgggtgtctcacgagcatcaattctggacagaatgaagcatctgattctcacaactcagtggagtttacccagtatttccaagagggctattgtaaaatatcagaactcgatgactgccgtgagttaactgaagctgttactgatgctgacagcagcagcagccactgcgagagagagaagcccgaggaagatggggataacgatgacatgcttggggctgtttttgccttcagcgaagaaggttgaacctaataatatactctgcttttacatagagaatggaaaacagtgcccgtgatattacctagaaaatggtggatttccattaggctttcgtggaataaattggtgctgagatgataatctactatttggtacatattagaaaggtgaagcttgtgctcgatatccatttgtgagaagttttactcaggaattgagatcaagatccttccttccgggccattaactaatccacggatccacgttaaggggagcttggtgttgtcgagaagttgctgctgcctgccgcaacactgccccttttccgttgctttgtacatactgtaaaagaccatttgttttgtgaaatacgtctctggaacattggacggtccaacttccttggcagccatatttgttgactgcttcctgccaaggcctgttaatgttccttgtttatttgtacagtcttttctgtttcattaaggaaaaagaaaatctagcaaggattaatgtgacataactgtataaacattcagtaaagaatttccgtttacgaagaaatgttaattgtttcccttgc

SEQ ID NO: 22033 - DNA, 2443 bp, Oryza sativa
  ref <308>: DATABASE ACCESSION NUMBER: AK072245
  ref <309>: DATABASE ENTRY DATE: 2001-12-06
ggcacacaacgcaaacgcaaactaatctcctcttctcctctcctccctttttctttcttgtgctaatattatatccatctcgcggcgacgcgacgatcatggagacccgggacgacgtcgccgacgcctcggcgcttccctactcctactcgccgctgcccgccggggacgccgcctccgccgacctcgccgccgcccgccgttcccggaggcgcccgctctgcgtcgccctgttcctcgcctccgccgcggtgatcctcgccgtggcggtcctctccggcgtcaggctcgccgggcgccccgcgacgacgacgatggtcgtcccgggggtggtggagatggagatggcgagcagggggccggagtccggcgtgtcggagaagacgtcgggggcggaggagatggtgaggctgatgggcggcgcggcgggtggggaggcgttcccgtggagcaacgcgatgctgcaatggcagcgcaccggattccatttccagcccgagaggaactggatgaacgatcccaacggtccggtgtactacaagggttagtaccacctgttctaccagtacaacccggatggggcggtgtggggcaacaagatcgcgtgggggcacgcggtgtcccgcgacctcgtccactggcgccacctccccctcgccatggttcccgaccagtggtacgacgtcaacggcgtctggaccggctccgccaccaccctccccgacggccgcctcgccatgctctacaccggctccaccaacgcctccgtccaggtccagtgcctcgccgtcccctccgaccccgacgaccccctcctcaccaactggaccaagtaccacgccaaccccgtcctctaccctccccgcaccatcggcgaccgcgacttccgcgaccccaccaccgcctggcgcgacccctccgacggcgactggcggatcgtcatcggctccaaggacgagcaccacgccggcatcgccgtcgtctaccgcaccgccgacttcgtcacctacgacctcctcccgggcctcctccaccgcgtcgaggccacggggatgtgggagtgcatcgacttctacccggtggccggcggcgagggggtggacatgacggaggcgatgtacgcgaggaacaagggggtggtgcacgtgatgaaggcgagcatggacgacgatcgccatgactactacgcgctggggaggtacgacccggcgaggaacgcgtggacgccgctggacgccgccgccgacgtcggcatcggcctccgctacgactggggcaagttctatgcctccaagaccttctacgatccggccaagcgccgccgcgtcctctggggttgggtcggcgagaccgactccgagcgcgccgacgtcgccaagggttgggcttccctccagtcgattcctcggacggtggagctggacaccaagacggggagcaacctgctgcaatggccggtggaggaggtggagacgctgcgcaccaactccaccgacttcggcggcatcaccgtcgactacgcctccgtcttcccgctcaacctccaccgcgccacgcagctcgacatcctcgccgagttccagctcgacccgctcgccgtcgacgccgtcctcgaggccgacgtcggctacaactgcagcaccagcggcggcgcggccggccggggcgccctgggccccttcgggctgctggtgctcgccgacaagcgccaccgcggggatggggagcagaccgccgtgtacttctacgtggccaaggggagcgacggcggcgtcacgacgcacttctgccaggacgagtcgaggtcgtcgcacgccgacgacatcgtcaagagggtcgtcggcaacgtcgtcccggtgctcgacggcgagaccttctccctccgggtgctcgtcgaccactccatcgtcgagagcttcgcgcagggggggaggtccacggcgacgtcgcgggtgtaccccacggaggccatctacgccaacgccggcgtcttcctcttcaacaacgccaccagcgcgcgcgtcacggccaagaagctcgtcgtccacgagatggactcctcctacaaccaagcctacatggcctagactcctctcttcttcttcttcttcttcttctccattattacattattgctgcttacttgtaaatcatttttgacgccgccgcctgctgctagctgctggcctggccttcagaattttatctctttgcttctttttttttttgtctctgctttaattttgtatctcgatcgatctcgaccgatcgattaattactatatctccatgaagaaatgcatggatgatggatcatggatggatcgctcccttcgatccaactgtacctaggggaagaagatgccatggtcaagcaatacttctgtaaatgtttcacatgagtcaagatttatgcagagttataatatatatgtttctctct

SEQ ID NO: 22034 - DNA, 1403 bp, Oryza sativa
  ref <308>: DATABASE ACCESSION NUMBER: AK072246
  ref <309>: DATABASE ENTRY DATE: 2001-12-06
gagccttacacaaaacacatcaaacacaccaagctcagacaagagaagagaagagaagccaagaaatcatcatcatctcacgcatttcttgctcgaattccagctcgattgagcatcatgggttacaacgagctgattccggggttgccggaggaggtggcgagggagtgcctcatccgggtggggttcgaccagctgccggcggtgcgccgcatctcgcgccagtggaaggcggaggtggagtcgccggcgtacaaccgcctgaggaaggcggagggcctggcgcgcccggcgctcgcgctggtgcaggcgcggcgtgagctcgccgaggcgggcccggcggcggacaagcagtcgtcggccggcggtgtgccggggaactcgtaccggatggtgctgttggacccggcggaggggaggtggacgccgctgccggaggtgggtggagcgagtgggagcttgccgctgttctgccaggtggcggcggtggatggcggtgtggaggggaggaagcggctggtggtcgtcggcggctgggacccggagacgtgggcgccgacggactcggtgctcgtgtatgacttcctcacgggcgcgtggcgccgtggcgcggccatgccgggcccgcgccggtcgttcttcgcgtgcgccgccgtcggcgggaaggtgttcgtcgccggtggccacgacgaggagaagaacgcccttcgatcggcgctggcgtacgacccggacgccgacgcgtgggccgcgctccccgacatggcggaggagcgcgacgagccgcgcgggctctgcgtcgacggcaagttcctggtcgtcggcgggtacccgacgccggcgcaggggcgattcgtcggctccgccgagtggttcgacccggcgacgtccacctggtccgccgtccaagaaggcttcgtcgacgacggcgcgtgcccgagaacctgcagcgccgcccccgaggccggagaccgcatgtacatgctccgcgacgggcacctcgtggcgcgccacggcgccatctcctccgcccccgcggcgtggcggcccgtggcgccggtgccggaggacgcgcgcaccgcggcggccgtttccgtcatccccgacggccgcgtcgtggtcatcgggtccgactgccacggcggcgaccagacggtgtacacgctgcgggaggaggccggcaagcccgcgtcgtgggcgcgcgcgccggcgccgcccgagttctccgggcacgtccaggccgcctgccttctagaaatctgaagcgtattacagaaactaaattccgtgtataattgtgtatccatctatgtacatatcacatatgtgtgagtagcagagttcgagtttgtacagcaacttttgcgaggaaaaaaaatggttaaacgagtgtatcaattttg

SEQ ID NO: 22035 - DNA, 2240 bp, Oryza sativa
  ref <308>: DATABASE ACCESSION NUMBER: AK072247
  ref <309>: DATABASE ENTRY DATE: 2001-12-06
ggtgagtccctctttccctgtcatctctcccctactaggcccatttgccctctcccccctccatccatccatccattcatccatatctcccttccttttgccgtccctttttcttgatttgattcttcttcctcccatggtctctcctcttctctccccttccttacactaacagagagctcttcttcttcttcttcttcttcttcttcttcttcttcttcttcttcttcttcttcttcctctcagctagccgtgctccggctgcgtgagatgtaagacgacgcgcgaatcaaaaatctcaaaatctcaagaagccaagaacagcagcagcaagtagaaggaaaaaggaggagagaattaagagggaatccaagaacagtggatactaaagcgtgaagtgttgggggttagcttttgattgaagccatcgaaaattttccagtgaactttcaggccctgctgaaagaagaatctactgaaagagggaagattcgtaaccttggaagatatgctgccttactttgatccggagtatgagaacttcagtcagcgcatcaaccctcctagggtatgcattgacaacagcacctgcagcgactgcaccttagtgaaggtcgacagcatgaacaagaatggcatcctgttggaggtggtgcaagttctgagcgatctcgatctcgccatctcgaaggcgtacatcacctctgatggtggatggttcatggatgtgtttcatgtggtggacaagcaagggcagaaggtgactgatgagaagaccattaagcacattgagaaggcgttaggcccagacagcaacctgctgggtggcgcgaagggcgggtcgtcgccggtgaggtcggtggggatgcactccatcggcgaccacaccgccatcgagctcaaggggcccgaccggacgggcctcctctccgaggtcttcgccgtgctcgccgagctcggctgcaacgtgctcgccgccgaggtgtggacgcaccgcgcccgcgtcgcctgcgtcgtgtacgtgaacgacgtcgcgtcggggcaggccgtcggcgacccgtgccgcctgtcccggatcgagcaccgcctccgcctcgtcctccgcggccacgccggcggcgacgacggcgacggcgacgacggcccggcgcacgccaacttcttctcctccggcggcgccgggtcgaacacccacgtcgaccggcggctccaccagttgatgcacgccgacgtggacgccgacgacgacgacggcctcgacagccgcgccatcgtgtcgggcgaggccgggaacgcggcggcggcggaggagaggccggtggtgacggtggagcactgcgaggagaaggactactcggtggtgaacgtcaagtgcagggacaggtccaagctgctgttcgacatcgtgtgcacgctcaccgacatgcactacgtcgtctcccacgcctccgtctcctccgacggcatctacggcatccaggagctgtacattcgtcggaaggatgggcgcacgctacagaaggacgaagcagggagggtgatcaagtgccttgaagcggccatctccagaagagtatctgagggattcaccctggagctgtgcggcagggacagggtcgggctgctgtccgacgtgacgcgggtgctcagggagcacggcctgacggtgacgagggccgacgtcacgacggtcggcggccaggccatcaacgtcttctacgtccgcgacgcctccggcgagccggtggacatgaagaccatcgagggcctccgcgtccaggtcggccacaccgtcatgctcaacgtcaagaaggtgccctcctccccctcctcctcctccgccgccgccgccgccgccgccaacggcaagtcgccggggcagcctgcctccggcgccctgtccaggaccagcttcttctccttcggcaacctcttcgccaagctcagagcatgatataattcacctgaatctctgaagaattatggtccctttttcgggttgcgcaaatcgccataaggagaaggagatttcagttgaaattttagagtttagggggtgagggtgagaaactgcgtgtggcatatggcagaaaaagaaattgctgttgttgtatagtccataaaccataaggagctctacctaccagtgtaggaaatgagaaaaaaatgctggatccatggtgttggttctgttctgtgcaatgcagattgcagaatgcagactgctcttgagttgcatg

SEQ ID NO: 22036 - DNA, 1708 bp, Oryza sativa
  ref <308>: DATABASE ACCESSION NUMBER: AK072248
  ref <309>: DATABASE ENTRY DATE: 2001-12-06
gggggggaagataaaaacagcacgcgctagctcggtcgagtcgtcgtcgtcgcctcaaaccacccgcctcggcctctctgtcccggacgaacacctcgcagcctctgctattctcgccaccacctccgcgtccgctcgcctcaagaaagcatccccgcacgcggccatggcaatgccattgcgggatccaacagaccgcgctgctatgtccgcgccgttgctcccgcgttccgccttcgtctcctccgcatcgttctcctccttttcgtccatcgcctcgttctcctccacctcgtcgtcgttctccgacccggccgtcccgtcggatgtcgtcgaggcgttgccgatgtcgagggactcgttcaaggcgctcgccgtgctgagggaccaccagggctcggtgtcgtccctctcgctctgcggggagttcttgctcagcgcgtccaccggcgcagacatcgtcgcgtggcagcagccggatctccgccgcttcgcgaggttcgggcatggggaggggtccgtcaaggcgctcgccgccgcggggggcagggtgttctccgcgcaccaggacggccgcgtccgcgtctggcgggtgtcgcggcggtcggagaacgcgttcaagctcgtcgccgcgctgcccaccaccagggactacctgggcaagatcttccgccacgccagctacgtgcagacacgccgcaaccaccgccgcctctggatcgagcacgccgacagcatctcctgcctcgccgtgcacgacggcgtcgtctactcgggctcctgggacaagacgctcaaggtctggcgcatctccgacctcaagtgcctcgagtcgatccacgcccacgacgacgccatcaatgccgtcgccgccgacagcggcaccatctactccgcctccgccgacggccacgtcaaggcgtgggggaaaggcaaggcggcgcacttcctccagggcatcctcatctcccgggacggcgtgtcgtggaacgccctcgtggcgagcgccgacgccggggctcgccgcgtgtacgccgccgggtcggacgggcacgtcgtcgggtgggacagggtaggcggcaggggcagccgctggagcctctcctgcgacgtgaaggcgcacgacatggccgtgctctgcctgtgcgtcgccggcgaccttgtcttcacgggctccgccgacaagaccatcgggctgtggcgctggcagacgagcggcgacggcgacggcgccgccgccgccgccctcgccagggtgggcgtgatcagaggccatgagggccccgtgaaatgcatccaggcgagctggtgcagggtcagcaatggctgcatggtgtacagtggagggctcgacaagagcatccgagtttggtgggtgcccaatggctggaaggccaacgagcagaagcagcagcaagaaaatgacacgaaagatcacaagaactgcgtgttcttgaggtgaatcgtgtcaggtcaggtcaaaatgtgttcttgatttgtgttgtgtttgtagatcgtagtttggattgtttggtagcacactgccttggttgggttgatgatctactctgatggatatattggaggatatgaattaaggagtcatgaaggtattagttttagatttgggtgtaaatggctgtatacttttatacctaattcatacacattttgattaaatggaaatatcagtaataatggttatcat

SEQ ID NO: 22037 - DNA, 1760 bp, Oryza sativa
  ref <308>: DATABASE ACCESSION NUMBER: AK072249
  ref <309>: DATABASE ENTRY DATE: 2001-12-06
gatccccctcgcgattacctctcctctcctctcctcccccattcatcgtccccctccgccgccgccgctgcaggcccgccgctccgctgctggtcctgctgctgccatgatgggggcaaagcttttgctcttactggtggcctcatctctatgtctatctgctgcgatcgctacgcagcaaacctgtccggccgacctcgatagcaagtgtggtgatgctgcttcaggggattgggaaggggagttcttccctggcatccccaagatcaagtatgagggtccaagcagcaagaacccgcttgcttacaagtggtacaatgctgaggaagtgattcttgggaagaagatgaaggattggatgcggttcagcgtggccttttggcatacgttccgtggtactggaggagatccttttggtgcccctacaaagtcttggccttgggaggatggcacaaattcgttggacatggctaagagaagaatgagagctcactttgagttcatggagaagcttggagttgacaggtggtgcttccatgacagggatattgcccctgatggcaaaacactcacggaaacaaataaaaatttggatgagatagttgaactggcaaagaaactccaggaggagaccaatataaaaccactgtgggggactgcacagcttttcatgcacccgcgctacatgcacggtgctgctactagcccagaggttaaagtgtatgcttatggtgctgctcaagttaagaaagctttagaggtcacccactacctaggcggtgaaaactatgttttctggggaggaagagagggttaccaaactcttcttaatactgacatgaagagagaacttgaccatttggctagttttcttcaagctgcagttgactacaagaagaagattggatttaatggaacactcttgatagagcctaaaccacaagaacccacaaaacaccagtacgattgggatgttgcaaccacattctctttcctacagaaatatggtctaacaggagaattcaagataaatgttgaatgcaaccacgctactctatctggacatagctgccaccatgagcttgagactgcaagaattaatggtctgcttgggaatattgatgccaacactggtgatccccagatcggttgggacaccgatcagttccttacagatatttcagaggctactttggttatgtcaagtgtggttaagaatggtgggcttgcacctggtggattcaactttgatgccaaattgaggagggagagtactgatgttgaggacatgtttctggctcatatatcgggaatggacaccctagcccgcggccttcggaatgttgtcaagctgatcgaggatggttccctggatgagcttgttcgcaagcgctaccagagttttgatagtgagatcggtgccttgattgaggctgggaaaggagacttcgagacactagagaagaaggttctggagtggggtgaacccattgttccatctggcaagcaggaactggctgagattctgttccaagctgctctatagatggtgccgtggtgctgttcatagttctaggaataaagcctagcacgcctttggaaacggaatgtgcattctatcattgtctactacgagcaataatctagttatagtttagttattagccttccatgcaatgaacttttgtacactacagcatggaacttaaataatgatgagttgtgcctttctaaactgaaataaaagagtcggtaccttt

SEQ ID NO: 22038 - DNA, 1697 bp, Oryza sativa
  ref <308>: DATABASE ACCESSION NUMBER: AK072250
  ref <309>: DATABASE ENTRY DATE: 2001-12-06
tggatcctttccccaccatctccaatggtggcccccctcgtcgcctagagcaccgaccccaacgttgcccaaggaccagggtggccacctctcctcctccccccgccgcggtcccccctcgccgccggctcgccggcgacgaagacgtcgtcgtgcccccaccaccaccaccaccactcggccacccaccggtccttgtccaattcgctctctccacccccgcccgccgcgcggtcgtcgtagcaacggccgcgggcaccgccaccatggcgcgctgcgggagcgccatcgccgccgtcgcggcgctgctcgtcctgctcggcgggcacgcggccgcgcgcatccgggtggagcactccgggatggtgatccggcggccgtcgtcgtccatcccgagcttccgggaggcccccgcgttccgcaacggcgaggagtgcggcggcggggggagggtggacgtggccatgacgctggacgccaactacctccggggcaccatggccggcgtgctgtccatcctgcagcacacggcgtgcccggagagcgtgtcgttccacttcctcgcggccgggatggacgccgacctcgcggcggcggtgcgcgccacgttcccgtacctggacctccgcgtgtaccgcttcgacccgtcccgcgtccgcggccgcatctcccgctccatccgccacgcgctcgaccagccgctcaactacgcgcgcatctacctcgccgacacgctcccgcccgacgtgcgccgcgtcatctacctcgactccgacgtggtggtcgtcgacgacatccgcgcgctggcgtccgtcgacctcggcggccacgtcgtcggcgcgcccgagtactgccacgccaacttcaccaactacttcaccgacgcgttctggtcggacccggcgctcaacggcacgttcgccggccgccgcccgtgctacttcaacaccggcgtcatggtcatggacgtcggcaagtggcgcgccggcggctacacccgccgcgtcgagcggtggatggaggtgcagaagcagacgcggatctaccacctcggctcgctgccgccgttcctcctcgttctcgccggtgacatccaggccgtcgaccaccgctggaaccagcacggcctcggcggcgacaacgtcaaggggcggtgccgtggcctccacccggggcccatcagcctcctccattggagcggcaaggggaagccatggatccggctcgacgcgcggcgcccgtgcgccgtcgactacctctgggcgccgtacgacctcttccggccatcgtcgccggtgctcgaggagtgagcagcagcagcatcgagccatgcacaagctaaactgatcaatctcctactttgttcttgcagaagcttaaaagattttttttaaaaaaaaagaaagaagttggcaagaacatgatgaagaaattgatttttcttcaaaggaaaaggagaagaaattaatgtgcaatcagcaatgggtgctatgatctgtgctgctagctgctgttttggggggtctcgattgggaaattaagcaaaaatcgatgaggatatgaacgtgcgaattgcttcatgatctctttggtttatcttgtataggacacaatgttgtaattaattttgtgaggattagtgtgaatactgggagctaggtgggggaaggaaccgacttactctgacaaatgtatgt

SEQ ID NO: 22039 - DNA, 1406 bp, Oryza sativa
  ref <308>: DATABASE ACCESSION NUMBER: AK072251
  ref <309>: DATABASE ENTRY DATE: 2001-12-06
ggctgagcttggcttggcaacgcggagggacggacaatactgacctctgagaaagaagacattgagggaggaataaacacaatgccattggcccgttgaggaagggtgagagccaattaattgttaacaagaattgaccatatagagaggttcaatcttgttaacagcaaattttgacgttcacccttggcggacggttttgcgaattcgagaagagaaggcgcgtgcacacacaaaaaaggaatttcaggtgaaagggcatgagcacaaagatgaagaagggaatcctaagaccattccgctacatctctaacatgatggatggtaaggaggcggcacaagacatgcagattggattccccacggatgtgaaacacgtggcgcacatcggatgggatgggcctagtgtccccaacaacaataataatactgcaggagcacctagctggatgaaggattaccattcggcgccactggactcagcctcatttaggagcgacagagggggctctgctgcagctaatccatgggcttctcaagaaatcgtggtagacggaggaagcctaggagacacatccttcagtgaaaccagaagcgaggccagcggcagcatggacatcaccgccggcgactccccgccgtcgcccgactcccgccggtcgaggcggcaccgctccaggggctccgccgccacctcctccatggactgcacggccgccgacggcggcgccgccccggagaagaaggacaaggccaagaagagctcccgcggcaagaaccgcaagaaggacaagtccgacaagtcggcggccgccggcgccggcgacgacgcctccggcgccacctgccaggacctccccgccgtgcccaagaagtccaaccgccggaaaaacgagggcggctcggagggcaccggcgccgctgcggcctccaaggccgacggcgccggagccggcggggaggacgcggcggcgccagagccgccggcgaccgaagaagctcaagatcacgactgataaaaaaaaaaagacacgaacacgaacttctttcgggagacgaaatcgatgaaactaaactaaagcttgtcacgtcacgctccggatttgcttcgagcgagctcggatttagatggatgggtatgtagattttgctcgatcatgcatggcgacgttcgaagaagaaacggggtgtgtgcacgccctaattcaaactgatcctttcctctcaattttttttccctttttctttctctctctccctactgtaatactatttgatcgacattttgttgaatatgtgttgtgttgttcctgactcacatatataaagtgtaccaagtgggattatgtacgttttgtataaccgcggtgaaatattctgtgaaatttaatggatccctcttgagt

SEQ ID NO: 22040 - DNA, 1961 bp, Oryza sativa
  ref <308>: DATABASE ACCESSION NUMBER: AK072252
  ref <309>: DATABASE ENTRY DATE: 2001-12-06
gttgctcaccaccagagttttaaaatggaaagcttgcatcaggccacgtggcgttgacaaagaaccaatcccaatgtggccacgagccccggccacgccgccgccgccgccatggccatcaaaacctagtgccgcctcgcgcagcgcgctgcgtcgtttggatctcgacgacggccggcgccaaggcacggagggagaagaaaaccacgcgcctcttctgtgttctccggcgatggcgagctccacggcatttgcagcggcatttgcgctgctgctgctagcgtcgtcggcggcggcggagggggaggcggtgctgacgctggacgccggcaacttcacggaggtggtgggggcgcacgacttcatcgtcgtcgagttctacgccccatggtgtggccactgcaaccagcttgctccggagtacgaggcggccgccgccgccctgcgctcgcacgacccgccggtcgtcctcgccaaggtcgacgccagcgccgacctgaaccggggcctcgccggcgagcacggcgtgcagggctaccccaccatcaggatcctccgggaccgcggcgccaggtcgcacaactacgccgggccccgggacgccgccggcatcgtcgcctacctcaagaggcaggccggcccggcctccgtcgagatcgctgcctccgcctcgccgccagcggccgactccatcgccaacgacggcgtggtcgtcgtcggagttttccccgaacttagcggcagcgagttcgagagtttcatggcggtggcggagaagatgagggccgactacgatttccggcacacgacggacgccggcgtcctcccacggggtgatcggacggtgagggggcctctcgtccgcctcttcaagcccttcgacgagctcttcgttgactcgcaggattttgatagagatgcgttggagaagtttatcgagtcttctggtttccctacagtggttacctttgacactagtccggcaaaccagaaataccttctgaaatacttcgacaatgccggcaccaaagcgatgcttttcctgagcttcagtgatgacagagcagaggaatacagaactcagttccatgaagctgcaaatcaatacagcgcaaacaacataagctttctgattggtgatgtcactgcctctcagggtgctttccagtattttgggcttaaagagagtgaagtgcccctcgttttcatactagcatcgaagtcgaagtatatcaaaccaactgtggagcctgatcagatcttgccctacctgaaggaatttacagaaggaacattggcaccccatgttaaatcagaacccattccggaggttaacgatcagcctgttaagaccgttgttgctgacaatcttcgagaggtggttttcaactccggcaaaaacgttctgctcgagttctatgctccatggtgtggacattgtcagaagctggccccgatcttggaagaggttgcagtttcattgaaagatgatgaagacgtcgtcatagcaaagatggatggtactgccaacgatgtaccgtcagatttcgcggtggaggggtacccaagcatgtacttctactcgtctggggggaacctcctgccctacgacgggaggacagccgaggagatcatcgatttcatcaccaagaacaagggctccaggcctggggaagcaaccacgactgaatctgtcaaggatgaactgtgatggccacttgggggagtggggagcttcaggttaggaggtgcagtgcagctgacagcttgaggacatagctcagtactgaatttaatcttgtattcgagttccaggtttccaagtacatgtagcattaccaatggtttcatacatacatgtccccccccttttttttttttttgcaccgctgaaatctgttattgtaacatcattacactacatcgaataatccccattttagcttgccaaacgagtaacc

SEQ ID NO: 22041 - DNA, 2423 bp, Oryza sativa
  ref <308>: DATABASE ACCESSION NUMBER: AK072253
  ref <309>: DATABASE ENTRY DATE: 2001-12-06
ggtaaaaaaatcctagggccgccttagtctttctcccctctcccctctccccctcccgcccgcctctcctcccctcccccccgcccgggcgccgccacctcccccgccctgcgagcctcgccgaagccccccgccgcttccttccgttccccctccagcgatggcgacctcggcgctgctccgggctctgaggcggccctcgtcggaagccgcgctgcgattggcagcaagtgtcagggtgcaaggagttactggatataggcatttgaataatcggaatctaagtgtctttaatgagttctcaaaacaattgaagggggaggctaagagtaatcctgagttccagaaatccatgaaggaattcagtgagaaacttagtggggtaaaagaagatcttaaagtaaggactaagcaaacagctgagacaatttacaagagcgttgatgatgttttgactgaagctgaggcaacatctaaaaaggttactgcaaatgtgaaagaaaaaatgtctgccgctacagaagaggtaaaggagagttttagactaggaaaagaagatacttcaagttgtaaggatggctcacctgaaacttcgaaacatgagtactctgagacatcgtcacattcagatgacaagtcacaagctggcacaagtggctatacattgtttaataaactgaggtcaacactttcatctgcttcacctgtgctgtctggtgcatttgcaaagttgagggatactagagtctcaacttatgctaagcagggatatgaaattttcaaagatgagctaagctctagctctagcagaaagaagagaaatcatgccaggcatgcttctgctggaacagttgaaaagagtactcgaactgagttagttattgtaccaacaaagaaatcagtactgggtgaaaagtgggaagcatttaagaataagatgcgaggtcatccagcctataagagagtgaatgaatataccaaaccagtcgtcaatataggacaagaggtagctgaggatgtacgagagcggtgggagacaagtgacaatccagtggttcagaaaattcaagatttgaatgaatctatttttgaggaaaccgcaactgcagtgtctttcagggaaattcggcagagagacccatccttttctttgcctgattttgctggtgatgttcaagaaatgattaaacctgttcttactgcatattccaagggtgatgtgaagaccttaaaaaagtattgcaccaaggaagtgattgaacgctgcaaaggagagagagatgcttatgcatcacagggcatatttttcgatcacaaaattttgcatatttcagatgctgatgtaagagaaacaaaaatgatgggatctacgcccatcattattgtagggttccaaacacagcaaatttactgtgttcgtgatagggaaggacaagtaacagaaggagggcaggacaccatccaaaccgtcttttatgcatgggccatgcaactgatggatagtgatgaggtgccagaggaagagtcatattacccggtttggcggttgcgtgagatccagcaagttggtatcaaagctctcatatagagtaggtcttctcttctcttgctatttctttctcaattggatcagtcattgccaaacatgcattcgctatttgggatggaagagcctaacacttcgaacttatgctgctgtacgatgtgatcctctcagttcagtgcaagcaattttcaacaaatagtttcatataatttatactgatgatagaaacctcttctcaatctctctctctctctctctctctctctctctctctctctctctctctctctctctctctctctgccccccgctgatgtatctaatgtctactatgtttttttttttgtgaagtcagctgttcttcttgcatgttggctgaaaaagattgtataagttttgtaacaacatttttttttgtccctacttggaaaagaatgcaccggagtcttgggagcattttctatccaagagattatttagaggaggaaagcagccacctggtgcgaacattatgactacaagttggtaacagagtaacctgatggttgaaagcatgttctgtggtttcatttttttttgtccctacttggaaaagaatgcaccggagtcttgggagcattttctatccaagagattatttagaggaggaaagcatccacctggtgcgaacattatgactacaagttggtaacagagtaacctgatggttgaaagcatgttctgtggtttcagtgttgaggttgaaaattatcttaatgttttggcttttgacagtggcattttgtttgtttgccttcattaacattcacttcgtatttcgtacagtgtattttccgtatcatctcaagtttggctgaccacaactgcaaatttgtgc

SEQ ID NO: 22042 - DNA, 2034 bp, Oryza sativa; identical to SEQ ID NO: 18667
  ref <308>: DATABASE ACCESSION NUMBER: AK099259
  ref <309>: DATABASE ENTRY DATE: 2002-08-28

SEQ ID NO: 22043 - DNA, 1743 bp, Oryza sativa
  ref <308>: DATABASE ACCESSION NUMBER: AK099260
  ref <309>: DATABASE ENTRY DATE: 2002-08-28
gatctgtagtagcaaacatctccttcgtcttccctacgcgtccacccgaaaaaaaaaaaaaaaagaacaggagaattatccccacttccagagtccaaacctccccgtccatggcgacggcgagctcgatccggccgccacgcgcggcgctagtcctcctcctgctcgcgctgtccttctccctcaccctcgccgcccacttcgagggctttggctccgacgacctccactccgcccacgccgacgcggcctcggcagacgacgaagacgacgaggggctcgacgtcgagctcccgccgccgccgcgcatctccctctccacttcaactccttcccctcccgtcaccaccaccaccaccaccacctccgctccaaaccctaaccccgatcccaacccgacgctgaccccgccgaaccccaccccgacgctcgatctctgggacgaggacgagttcgagggcatccctgtcccggaagcggcctcctccgacgaatcctccacgccggcggaagccgccccgtcagatcccgcggccgatgccgcggccgaggcggcgccagccccgccccggcggcccgcggagctgctccgcgcgtacaccgtcgagatcgcgtgcgtcagcttcctgatctgcttcctgctcaactacttcaccgggaagcggcagaacgaggcgatcgcgctcgcctgggccaccaggttcgccaccagggactccatcttcgacaagaacttcagcctcctcggcaccggcgacggcaaggacacgccgctcctgatgaaggaagggcaggacgtgttcaagttctacgcgagcgggaggcggtactgccaggggatgctcgccaccatggagatgcgcgcgcggcacgacctgctgtccaagctggtggagctggtgttccccaggaaggacaccatcacgttcgaggtggtgatgaacgaggaagccatggaccacgtcatgttggccgtggcgaggaagaaggcggccaagacgatgcagaaggaggagagggatctgcagaaatttgccggggttctgacctcggcacccgccgggaggagatgggttgcggatgagcttgcggtagtggccgagtcaaaggaggttgctggggatatgattactgaagccgtgctggaccaggtccttggtgacaaagcttttgagaaatttgggaaatggttcatctcacttcatttttcagatcaactggcaggctcttacaagaaagtcctttctttcaagtttgtactgccagatgcaagcaacatggctgagatgacaagattagttgctctcgtgccatactacattgatttggtggggcgttacaagctcagcaaccatgctcgttccaaaactgaagctgcaagaacaaaagcttcccaggaggctttcagggagcaacagggtctaaggcaggaagcccttcaaaggaagaaggctgagaagaaaaaacttatggaagaggcagaggccaaattgagcgccgaggcactccgcaagaaagaggaaaaagaaagggctcgtcagatgaagaagtccatgcccaaagttaaaatgctccgttcctagtaacatcaaagatatatcacagcactggctttagctattcagttgctgattagcttattgttgcctgccagactcttttatgttcttctgggccatcaacttttctttgccatggggggatacaagcgaaaggaaataggtgaagataatcttttgctgt

SEQ ID NO: 22044 - DNA, 1464 bp, Oryza sativa
  ref <308>: DATABASE ACCESSION NUMBER: AK072254
  ref <309>: DATABASE ENTRY DATE: 2001-12-06
gacatgcctcgaagtttagcccatccccgatcgccgcaccatcatggtccaagaattcttgctcatatcgccgtgcaacgtctgaagaggtgttcaatccggacgaacaagatgcagcagagccggcaggacgtggacgagcatgtcgccgagctccgcggcgagctgcgcaaggcgcgcgaggagcgagaccgcgcgtaccgcgtcctggaggtgagcgagtggaaggcgctggcgtcggccaacgaccgcaccaccatagagacgctcgaggcggagctcgacgcgtccagggagtccgagaagcggatgctcgagtccctggcgatgcagacgaagcagctcgagatgaccaagatcgagctcgaggaggccaggctggagaacgcgtcgctgcgtgagaccatccagaggctcgaggccatagcggtgcccgtcgcgacgacgccgagaggaaggtacgatcgcgactaccagagggttcacggcgagctgcggatggcgctggtggcggaggacaagaacaagaaggcgatggaggagctggtgctggcactcaaggaggtgaacggggagctgcacacgacgcggcagctgctggcgcggtcgcagcacgaggccgagacggcgcggctggagtcggaccggctgcacgtctcgctcaagcgcaaggacgacaagctccgcgcgctgtcggaggaggtggccaggctgcgcgccgacgccgaggagtcgttcgcggcgtggcggggcaaggaggccgggttcacgtcgtgcatgaagtccaccgagtccgagctcgccgagacgcggcgcgagaacgcgcgcctcctggagtcgcagcggtccgggcgggacgagatcgccaagctgcgcgacatcctgaggcaggccgtcaaggacaccaaggtcgtgaaggaggcgctggaggaggcgaggggcgagaacgccgcgctcaaggagatgctcggcgacaaggacaccgccatcaagtgcaccaagcaggagctcgagtgcctccgggtgacggaggcggcggcgcgcgacagcgtcaaggagctgcagagcctgctcgtcgccacgtcgtcgagccccacggccgccggcatgaagctatccgcgtcgccgagccccacagcttccgggataaagctggacatggaggattcctcgtcgtcgcacgggtcgagagaactgcacgggctgatcaagtgccactcggaggcgagggtgaagccgccggcggggctcaccctaccgcggcggaggtcggataacttcgaaggatcggtgtacgacatattcgggtcgatggaagatcagaagagcgagctaagcgcgttctcgacaatgccgaggtcgttgcccgcacggcggcgggtgatgatgcgcaaggttggcagcttgttccggtttaagagcttcagtatcaagtagtagctgctactgccgagattcggggcc

SEQ ID NO: 22045 - DNA, 2524 bp, Oryza sativa
  ref <308>: DATABASE ACCESSION NUMBER: AK072255
  ref <309>: DATABASE ENTRY DATE: 2001-12-06
tagtgaccgcttgcttcctcccccctttctcccgcccctctccaccaaaccctaaggccgtctccctccctccgcctccccgttcgccatctccccgtggcgtcctccgcggctccttcgggcgcggcggcgtcggcgacggagtgccctcgctttctagagcggtgcggcctcaacgccgacgagttcgacgacgatgccgaggcggaacccacgggagagaggaggggaaggccatcgtcatggccggatctggtctctccttgctcagcggtagcggcaacgtcctcccctttgtcctggcctccccatcctcctcccaaaaaatcccccactgctggcttcatcgatgacggcgatgatgtacagtagctcccgtgtcacccactccgctagatatggaggcacctcgtcctcttcttcgtctcagcgccagacagtcccctcgtcctcggcaccgtcatcgacaccaaaggaacaatgatgaggcctctgggtggagacgaggatctcggtggtgatgcggccggaggcaatacaacattcgcactgttaacatgacattgaagtgtggttgattaggcgaagaaagatatattttggttggaggattgcagggatgtaagcggtttgaataacatttgggactaacctgacaaagaggttccggtgtttcctctgcgaaagttgttgcgaaaagcagctggacaagacaattatgagattccatttacatggtttttcttcatggtcatgaagcaacttgctcgttggacctgttgcatagcttacatggctcctcccattatgtcttgcttccaataaagacttcatttctttgattgttgggggtgcgcttcagacatgtggtcatgctgccggcaaccgcattggctcctattcagctaagacgcggttcttgatttgttggcgaaaacccaaattctggggaatcattgagctgacctggagttcttgttcagtgttttgctgaatctggatatggcgagcttttagcaggaaacaaacgccaggaatgatcaagggccttttgctgatcacgttgggcatcagaaccacatggaaaacctcacagatcatccagaaaaaactctcagaatgcaaaggatctaggattttctccattgagtttgttgccctgattgcattttgcccctttagttcagagttgttcattctctcggaaaggagaccgcacaaagcatccgttaatttatccattcagtatgagataccaaggaaacccactaaaatgatagttggcaacaacctagcaagaagaacctaaggtgatggaaaaaagcaacaagtacttagggtttgtcattctctccagcaggtgatatgctattcaatttattatttcctgtgattttacggtgccactaccttcgttctgttctcggaagcaatatagctaattgcctataatagattacataataaaagtttagcgcatctgccaggtagcattttcatacaatgttagatacttacatgctatgcatctattcaagattccttttcttctgtcatgacctattactggcagtacttatttttgggcactcatatggatcttttctaatggttctctgttaaagctacgcattgttcacacatgaagattaagtgaaaaagatgacacacccatcttacctttatttgctggatatgctatattaaaacccaattgtatgtccttagcgtcttaggtcattgtattgcacaacaccgtttgtagatgagctcaatatatatatatatatatatatatatatatatatatatataggacactcatatggggcaccatggtgcccgggcaccatggtttcaaatgcacaaaatcactcaaatttttcaaaattttcaaattgtgagtatatacctagttataagaattcgattcatacctatacctatcaacaaaacaactcaaatttaactttatttcacaatccatgattacatacctaactaattatatgtatggatgctatatacctagaatcaaaatctaacaaaaacaagttcaaattcagttcaaacttgctttcaactagttagtaaagtagttaatattaatacctaaataattgaaaaagtttcatgctcatttgaattgggtatatactcaatttcaacaatggtgcccgggcaccatggagcaccaaacaaatttactatatatatatatatatattgcttatatcattgtgtttgcataataaggttttggtactaatatgaggttactatgctcacagtggttagatatagaattcattttgttattggtctgtagtttggttttggctcttgttttgtttttccacaggcccagcaaatatgatataagataatgttagtcatggtccctcatcttgaaaaggtcgctgcggacattcctcaaacaaatatatgagcctgtatataccgtactgtttaatggtcatctcaaatgataaatatatgaaagtattatatgtttaccgtgttt

SEQ ID NO: 22046 - DNA, 2019 bp, Oryza sativa
  ref <308>: DATABASE ACCESSION NUMBER: AK072256
  ref <309>: DATABASE ENTRY DATE: 2001-12-06
ccctgttttgctgccaattgcagctttcaagcatggcaagacgaataagagacccttttccttaattttgtttgatcattccctttcagctttgattttcctggtatgacatgaagcattgttcagattatttgttgtctgaagcccttatcaagatttgattccagattacctagaaactcaagctttcaataaactaacaacgatggaggacggcatggatttcagccctcataaaaatagcacagaacagaatcgaaccagctttgaagaagatgatcaattcagcattcgatcagcaccctccaaaccatctccagacaagaaatcgaagcccaagaacaagccgaatcatcactccgacaagacggcgaacccgccgccgcagaggcccgagacgacggcggcgctggtgacgacgaccgcagcagcagcaacagcaggaacaaaccgtggcgaggccgtcagcaacggcagcctggacagcatcagcagcggcagcacacggagcaacagcctggagagcagcagcaccggcgccgcggcggcgccaacggtgctgacgacatcggcgtcgacggcgtcggtgtcggcgtcggggcagaacgtgaagcggcacaccggcggggacagccggtgggaggcggtccaggcggcgacggcgcgcgacgcgccggcgccgctgagcctggcgcacttccggctgctgaagcggctggggtacggcgacatcgggagcgtgtacctggtggagctccgcggcacgtcggccttcttcgccatgaaggtgatggacaaggcgtcgatcgcgagccggaacaagatggcgcgcgcggagacggagcgcgagatcctgggcctcctcgaccaccccttcctccccacgctctacacccacttcgagaccgacaagttctactgcctcgtcatggagtactgctccggcggcaacctccattccctccggcagaagcagccctccaagcacttctccgagcccgccgccaggttttacgtggcagaggtgctactggcgctggagtacctgcacatgctggggatcgtgtacagggacctcaagccggagaacgtcctggtgagggacgacggccacatcatgctctccgacttcgacctctccctccgctgcaccgtctgccccaccctcgtcaagtcctcctccgtccacgccaccggcagcggcggcggcataggcagcagaggagacgccatcgacggcggcgagagcatgccggcgaaccagggctgcatccagccctcctccttcttcccgcgcatcctgccgcggcgcagccgcaaggcgtccaagagcgacatgggcctgctgctcaacggcgcggcggcggtggagttcaacgcggagccgacggaggcgcggtccatgtcgttcgtgggcacgcacgagtacctggccccggagatcatccgcggcgagggccacggcagcgccgtcgactggtggacgctgggaatcttcctctacgagctcatccacggcgccaccccgttcaagggcgccggcaaccgcgccacgctctgcaacgtcatcgagcagccgctccgcttcccctccgacggcggcgccagcgccgtcgcgcgtgacctcatccgcggcctgctcgtcaaggagccccacaagcggatcgccttcaccaggggcgccaccgagatcaagcagcaccccttcttcgacggcgtcaactgggcgctcgtcaggagcctcacgccgccgtcggtgccggagccggtcgacttccggcagtacgccgccgccgcgtccgccaccactcccaaggacaagaagccgccggagaacgccgccgccgccgccgcccccgccgcggcggatggtggcggcgcggccaactcgagcaccggcgagtcctacactgactttgagtatttttaattagtactatatatttattcctgacaatattgttgtgcacaccagattgttttgatcgatggttgtgaagtatgagaactcgattcgtg

SEQ ID NO: 22047 - DNA, 1804 bp, Oryza sativa
  ref <308>: DATABASE ACCESSION NUMBER: AK072257
  ref <309>: DATABASE ENTRY DATE: 2001-12-06
gactcgcctccactccacctcgaaacccacaaaaatggcgtcgcccacccacgccgcctacctcgcccccaccgcccctccccgccatctccacctcctcctccgcctccgcctccgcggccgccccgccgtctcaacctgcgtccgcgccaccgcccgcgggggggatggcgggtcgtcgtacctggacatgtggaagaaggccgtggagagggagcgccgccgcaggagcgggaacagcagcagaagccggcggcgaccgcgatccaggccggatcagagagtggcctggtttcccgtacggctccgggggagtcggatcgggcatccccgccgccgccggtgacggagacggcgaccgaggcggcgaaagtttcagtgccggactctggtgattcatctcctttcaagaagtcaagttccaagctcggtactccaggcccggacttctggtcgtggttaccacctgtggaaaatagcactaaactaggagaaatcgacactgggttaaaacaatctgagaaattagactccttcgccggtcagcctgatctgctgatggaaaaggaacagtcagaagacattttatcgctcccgttcgaaacctctttcttcaagaaggaagaccgatctcttcctcccttccagtcgtttgctgagcctgaaaatgtggaatccgagcccagtattactgctgatgcagaggagacattcgaagatcagttttcgaaaaacgcagctgaggcagctagagctcttagtgcaagcgacgagaagtcatcacatggggtgcgtccagatggttcattgtggtggaaggagacaggtgtagaacaaaggcctgatggtgtaacttgcaagtggaccgtgattaggggagttagtgctgatggagctgttgaatgggaggacaagtattgggaggcttcagaccggtttgatcacaaagagctaggttctgagaagtctggtcgtgatgctacagggaatgtttggcgggaatactggaaagagtctatgtggcaggatttcacatgtggtgttatgcacatggagaagacggcagacaagtggggacagaatggtaaaggggagcagtggcaagagcagtggtgggagcattacgattcaagcggtaaagctgagaaatgggctgataaatggtgcagcttggatccaaatacaccactagatgttggtcacgctcatgtttggcatgaaaggtggggcgagaagtatgatggctgcggaggtagtgcaaaatacactgacaaatgggctgaacgatcagagggtgacgggtggtcaaagtggggcgataagtgggatgagcatttcgacccgaatggccatggagtgaagcaaggggagacctggtgggcaggcaagtacggggatcgctggaatcgcacctggggcgagcatcacaactgtactggttgggtgcacaagtatggcaggagcagcagcggtgagcactgggacacacacgttccccaggacacctggtatgagcgttttccgcactttggcttcgagcactgcttcaacaactcggtgcagctccggtctgtgaagaggcagactccaaaaaacactaagcctgaaaaagattagatatttagaatagaatctactcaattgctatcataaaaaatagttggctacatggccatctttcatttttgatcttgctgaagagcccatgcttgtaaaataagattgaatggctgatttcagttgtccggttttatgccaatacctgtaccgagctatgttatcaaaagttcatatgctactatgc

SEQ ID NO: 22048 - DNA, 1429 bp, Oryza sativa
  ref <308>: DATABASE ACCESSION NUMBER: AK072258
  ref <309>: DATABASE ENTRY DATE: 2001-12-06
ggacgggaactccgtaaggtccgtcaaaggctcatcaagctgcacaggtaaaacacacacaagccgaagccggacgagagagagatcattttttctttcctttttcttgtgagaatcccctcgagttcctcggaccaaaggctgcgccgtccttatttatacgacgagtagtccactagaggaacaaattaagacacaagtggaagttgcacagctcctcctcgatccacccggcaccaaggtacggccggaagctatctaaggactgcagctatgggcaatttgttctgctgtgttcaagttgatcagtctacagtggccattagagaacagttcgggaagtttgatgctgtgcttgagccaggatgtcactgcctgccttggtttgctgggaagcgtatagctggccatctcacactcaggttgcagcaactggatgtgcgctgtgaaaccaagacaaaggacaatgtgtttgtcaatgttgtggcatcgatccagtacagagctttggctggcaaggcaaatgatgctttctacaagctgagcaacacaagatctcagatccaagcttatgtcttcgatgtgatcagggcaagtgttccgaagctgaacctggacgacgcatttgagcagaagaacgacatagcaaaggcagtggaggatgagctggagaaggctatgtctgcttacgggtttgagattgttcagacgctcatcgttgacattgagccagacgagcacgtgaagcgagcgatgaatgaaatcaatgcagctgcgaggctgagggtggctgcaaacgagaaggcagaggcagagaagatcgtgcagataaagagggcggagggagaagcggaagcaaagtacctgtcggggctgggtatcgcgaggcagcgtcaggcgatcgtggatgggttgagggacagcgtgctggggttctcagtgaacgtgccgggcaccacggccaaggacgtgatggacatggtgctcatcacccagtacttcgacaccatgaaggagatcggcgcctcctcaaaggcctcctccgtcttcatcccccatggccccggcgccgtccgcgacatcgccacgcagatccgcgacggccttcttcagggccaggctaccaccacctcccattagcatccatgtgggacaccagctgtgggattgctaagctgctgtttctcttgatttgtcctgtgtgattagatatgtcttgtaatttcttcatgctagctgtccgaccgacgtgtgtgcgcgcgcgggcaacattttcattttagttgtgaatgatatcctatcgtgtatgtatgtgtggaactatgccttgtgaaaactttgtgaaatttcagcgtcaaacatgtaaatgtgcatgtaatccggttctctgtattgtattacttgtatgatatgccgtctcgagttgtgc

SEQ ID NO: 22049 - DNA, 3426 bp, Oryza sativa
  ref <308>: DATABASE ACCESSION NUMBER: AK072259
  ref <309>: DATABASE ENTRY DATE: 2001-12-06
ggcccaccaacgtcgcttccccggcacctcaccatggacaccgcctccgtcaccggtggcgagcacaaggggaaggagaagacgtgccgggtgtgcggcgaggaggtggcggcgagggaggacgggaagccgttcgtggcgtgcgccgagtgcggcttcccggtgtgcaagccctgctacgagtacgagcgcagcgagggcacccagtgctgcccccagtgcaacacccgctacaagcgccacaaagggtgcccacgggtggaaggcgacgaggacgacggcggcgacatggacgacttcgaggaggagttccagatcaagagccccaccaagcagaaacccccccacgagcccgtcaacttcgacgtctactcggagaacggcgagcagccggcacagaagtggcgccctggaggcccggcgctctcttccttcaccggaagcgtggctgggaaggatctggagcaggagagggagatggagggtggcatggagtggaaggacaggatcgacaagtggaagacgaagcaggagaagcggggcaagctcaaccgcgacgacagcgacgacgacgacgacaagaacgacgacgagtacatgctgctcgcggaggcgaggcagccgctgtggaggaaggtgccgatcccgtcgagcaagatcaacccgtaccggatcgtgatcgtgctccggctggtggtgctctgcttcttcctcaagttccggatcacgacgccggcgatggacgcggtgccgctgtggctggcctcggtgatctgcgagctgtggttcgcgctgtcgtggatcctcgaccagctgcccaagtggtcgccggtgacgagggagacgtacctggaccggctggccctccggtacgagcgcgacggcgagccgtgccgcctggccccgatcgatttcttcgtcagcacggtggacccgctcaaggagccgcccatcatcaccgccaacaccgtgctgtccatcctcgccgtcgactaccccgtcgaccgcgtctcctgctacgtctccgacgacggcgcgtccatgctgctcttcgacacgctctccgagaccgccgagttcgcccgccggtgggtccccttctgcaagaagttcaccatcgagccccgcgcccccgagttctacttctcccagaagatcgactacctcaaggacaaggtccagcccaccttcgtcaaagaacgccgcgccatgaagagagagtatgaggagttcaaggtgaggataaacgcgctggtggcgaaggcgcagaagaagccggaggaagggtgggtgatgcaggacgggacgccatggccggggaacaacacgagggaccacccggggatgatccaggtgtacctgggcagccagggcgcgctcgacgtcgagggcagcgagctgccgcggctggtgtacgtgtcccgcgagaagcggcccggctacaaccaccacaagaaggccggcgccatgaactccctcgttcgcgtctccgccgtgcttaccaacgcccccttcatcctcaacctcgactgcgaccactacgtcaacaacagcaaggccgtccgcgaggccatgtgcttcctcatggacaagcagctcggcaagaagctgtgctacgtccagttcccccagcgcttcgacggcatcgaccgccacgatcgctacgccaaccgcaacaccgtcttcttcgacatcaacatgaaggggctggacgggatacaggggccggtgtacgtggggacggggacggtgttcaacaggcaggcgctgtacggatacgacccgccgcggccggagaagaggccgaagatgacgtgcgactgctggccgtcgtggtgctgctgctgctgctgcttcggcggggggaagcgcggcaagtcgcacaagaacaagaagggcggcggcggcggcgagggcggcggcctcgacgagccgcgccgcgggctgctcgggttctacaagaagaggagcaagaaggacaagctcggcggcggcgcggcgtcgctcgccggagggaagaaagggtaccggaagcaccagcgcgggttcgagctggaggagatcgaggagggcctcgaggggtacgacgagctggagcgctcgtcgctcatgtcgcagaagagcttcgagaagcggttcggccagtcgccggtgttcatcgcctccaccctcgtcgaggacggcggcctcccccagggcgccgccgccgaccccgccgccctcatcaaggaggccatccacgtcatcagctgcggctacgaggagaagaccgagtggggcaaggagattgggtggatctacgggtcggtgacggaggacatcttaacggggttcaagatgcattgccgtgggtggaagtcggtgtactgcacgccggcgagggcggcattcaaggggtcggcgcccatcaacctgtcggatcgtctgcaccaggtgctccggtgggcgctcggctccgtcgagatcttcatgagccgccattgcccgctctggtacgcctatggcggccgcctcaagtggctcgagcgcttcgcctacaccaacaccatcgtctaccccttcacctccattcccctcctcgcctactgcaccatccccgccgtctgcctcctcaccggcaagttcatcatccccacgcttaacaatttggcgagcatatggttcatagcgcttttcctgtcgatcatcgcgacgggggtgctggagctgcggtggagcggggtgagcatcgaggactggtggaggaacgagcagttctgggtgatcggcggcgtgtcggcgcacctgttcgccgtgttccagggcctcctcaaggtgctcggcggcgtggacaccaacttcacggtgacgtccaaggccgccgccgacgagaccgacgcgttcggcgagctctacctgttcaagtggacgacgctgctggtgccgccgacgacgctgatcatcatcaacatggtggggatcgtcgccggcgtgtcggacgccgtgaacaacgggtacgggtcgtggggcccgctgttcgggaagctcttcttctccttctgggtcatcctccacctctaccccttcctcaaggggctcatggggaggcagaaccggacgcccaccattgtcgtgctctggtccatcctcctcgcctccatcttctccctcgtctgggtcaggatcgaccccttcatccccaagcccaagggccccgtcctcaagccatgcggggtctcgtgctgagctgctgctgctacttctctgtgtctctgcattttgcaagagggatgaccggatggatgattcttgttgtatggagtattttgacttgttcatgtacaagtttttgtgagtgggataaaagtgttttgggggtaaaatttgtaagaactgaggtggagattatactcgaatttaagaacaattgtttttgaattttctttt

SEQ ID NO: 22050 - DNA, 1706 bp, Oryza sativa
  ref <308>: DATABASE ACCESSION NUMBER: AK099261
  ref <309>: DATABASE ENTRY DATE: 2002-08-28
gggggggaagataaaaacagcacgcgctagctcggtcgagtcgtcgtcgtcgcctcaaaccacccgcctcggcctctctgttccggacgaacacctcgcagcctctgctattctcgccaccacctccgcgtccgctcgcctcaagaaagcatccccgcacgcggccatggcaatgccattgcgggatccaacagaccgcgctgctatgtccgcgccgttgctcccgcgttccgccttcgtctcctccgcatcgttctcctccttttcgtccatcgcctcgttctcctccacctcgtcgtcgttctccgacccggccgtcccgtcggatgtcgtcgaggcgttgccgatgtcgagggactcgttcaaggcgctcgccgtgctgagggaccaccagggctcggtgtcgtccctctcgctctgcggggagttcttgctcagcgcgtccaccggcgcagacatcgtcgcgtggcagcagccggatctccgccgcttcgcgaggttcgggcatggggaggggtccgtcaaggcgctcgccgccgcggggggcagggtgttctccgcgcaccaggacggccgcgtccgcgtctggcgggtgtcgcggcggtcggagaacgcgttcaagctcgtcgccgcgctgcccaccaccagggactacctgggcaagatcttccgccacgccagctacgtgcagacacgccgcaaccaccgccgcctctggatcgagcacgccgacagcatctcctgcctcgccgtgcacgacggcgtcgtctactcgggctcctgggacaagacgctcaaggtctggcgcatctccgacctcaagtgcctcgagtcgatccacgcccacgacgacgccatcaatgccgtcgccgccgacagcggcaccatctactccgcctccgccgacggccacgtcaaggcgtgggggaaaggcaaggcggcgcacttcctccagggcatcctcatctcccgggacggcgtgtcgtggaacgccctcgtggcgagcgccgacgccggggctcgccgcgtgtacgccgccgggtcggacgggcacgtcgtcgggtgggacagggtaggcggcaggggcagccgctggagcctctcctgcgacgtgaaggcgcacgacatggccgtgctctgcctgtgcgtcgccggcgaccttgtcttcacgggctccgccgacaagaccatcgggctgtggcgctggcagacgagcggcgacggcgacggcgccgccgccgccgccctcgccagggtgggcgtgatcagaggccatgagggccccgtgaaatgcatccaggcgagctggtgcagggtcagcaatggctgcatggtgtacagtggagggctcgacaagagcatccgagtttggtgggtgcccaatggctggaaggccaacgagcagaagcagcagcaagaaaatgacacgaaagatcacaagaactgcgtgttcttgaggtgaatcgtgtcaggtcaggtcaaaatgtgttcttgatttgtgttgtgtttgtagatcgtagtttggattgtttggtagcacactgccttggttgggttgatgatctactctgatggatatattggaggatatgaattaaggagtcatgaaggtattagttttagatttgggtgtaaatggctgtatacttttatacctaattcatacacattttgattaaatggaaatatcagtaataatggttatc

SEQ ID NO: 22051 - DNA, 3634 bp, Oryza sativa
  ref <308>: DATABASE ACCESSION NUMBER: AK072260
  ref <309>: DATABASE ENTRY DATE: 2001-12-06
gcttcgcagcaatggcgagagccgcatgggggctccgagaagctagctagctaggacgaacgcgaatgtcctcgtcgtcggcggcacccaggcagccacccgagacaggtttacgcggcggacggcgagcctagcggcctcccgcggccgcagcctctccaacccacgaccacgacgaccacctcgacgtcgcgctggagtacccgtccttcgccgccatgtcggtcgactacgccaactacaccgtcctcatgccgcccaccccggacaaccagccgtccgggggtgccccgcccgcggcgccgtccgccggtggcgctaggccgggcgatctgccgctcccgccctatggctcgtcgtcctcctccaggctcgtcaaccggcgcggtggcggcgacgacggcgccaagatggaccggcggctgtcgacggcgcgcgtcccggcgccgtccagcaacaagtcgctgctggtgcgcagccagaccggtgacttcgaccacaaccggtggctgttcgagaccaagggcacgtacggcatcgggaacgcctactggccccaggacaacgtgtacggcgacgacggcggcggcggcgccgtcaagatggaggacctcgtcgagaagccgtggaagccgctgagccgcaaggtgcccatccctccgggcatcctcagcccctacaggctgctggtgttggtgcggttcgtggcgctcttcctcttcttggtgtggcgcgtcaccaaccctaacatggacgcgctctggctgtgggggatctccatcgtgtgcgagttttggttcgccttctcctggctgctcgaccagatgcccaagctgaacccgatcaaccgcgccgccgacctcgccgcgctcaaggagaagttcgagtcgccgtcgccgacgaacccgacggggcgctccgacctgccggggcttgacgtcttcatctccgccgccgacccctacaaggagccgacgctggtgacggccaacacgctcctctccatcctcgccaccgagtaccccgtggagaagctgttcgtctacatctccgacgacggcggcgcgctgctgaccttcgagtccatggcggaggcgtgcgcgttcgccaaggtgtgggtgcccttctgccgcaagcacagcatcgagccgcgcaacccggattcctacttcacgcagaagggcgacccgaccaagggcaagaagcggccggacttcgtcaaggaccgccgctggatcaagcgcgagtacgacgagttcaagatccgcgtgaacagcctccccgacctcatccgccgccgcgccaacgccctgaacgcccgcgagcgcaagctggcgcgcgacaagcaggccgccggcgacgccgacgcactcgcctccgtgaaggccgccacctggatggccgacggcacgcactggccgggcacctggctggacccgtcccccgaccacgccaagggcgaccacgccagcatcgtgcaggtgatgatcaagaacccgcaccacgacgtggtgtacggcgaggccggcgaccacccgtacctggacatgaccgacgtggacatgcgcatcccgatgttcgcctacctgtcgcgggagaagcgcgccgggtacgaccacaacaagaaggccggcgccatgaacgccatggtgcgcgcgtcggcgatcctctccaatggccccttcatgctcaacttcgactgcgaccactacatctacaactgccaggccatccgcgaggccatgtgctacatgctcgaccgcggcggcgaccgcatctgctacatccagttcccgcagcggttcgaggggatcgacccctccgaccgctacgccaaccacaacaccgtcttcttcgacggcaacatgcgcgcgctcgacggcctccagggccccatgtacgtcggcacgggctgcctcttccgccgctacgccatctacggcttcaacccgccgcgcgccatcgagtaccgcggcacctacggccagaccaaggtgcccatcgacccgcgacaaggcagcgaagccatgcccggcgccggcggcggccgcagcggcggcggcagcgtgggcggcgaccacgagctgcaggcgctgtcgacggcgcacccggaccacgaggcgccgcagaagttcggcaagtccaagatgttcatcgagtccatcgcggtggccgagtaccaggggcggccgctgcaggaccacccgtccgtcctgaacggtcgcccccccggcgcgctgctgatgccgcggccgcctctggacgcggcgacggtggcggagtcggtgtcggtgatctcgtgctggtacgaggacaacacggagtgggggcagcgcgtggggtggatctacgggtcggtgacggaggacgtggtgaccgggtaccggatgcacaaccgcgggtggcggtcggtgtactgcatcacccggcgcgacgcgttccgcgggacggcgccgatcaacctgacggacaggctgcaccaggtgctccggtgggcgaccggggtcggtggagatcttcttctccaagaacaacgcggtgctggcgtccaggcggctcaagttcctgcagcggatggcgtacctcaacgttgggatctaccccttcacgtcgctcttcctcatcatgtactgcctcctcccggcgctgtcgctcttctcggggcagttcatcgtggcgacgctggacccgacgttcctctcctacctgctgctcatcaccatcaccctcatgctgctctgcctgctggaggtgaagtggtccgggatcgggctggaggagtggtggcggaacgagcagttctgggtgatcggcggcacgtcggcgcacctggcggcggtgctgcagggcctgctcaaggtggtggccgggatcgagatctccttcacgctcacggccaaggcggcggcggaggacgacgacgaccccttcgccgagctctacctcatcaagtggacgtcgctcttcatcccgccgctcgccgtcatcgggatcaacatcatcgcgctcgtcgtcggcgtgtcgcggacggtgtacgcggagatcccgcagtacagcaagctgctcggcggcggcttcttcagcttctgggtgctcgcgcactactacccgttcgccaagggcctcatgggccgccgcggccggacgcccaccatcgtctacgtctgggccggcctcatctccatcaccgtctctctcctctggatcaccattagccccccggatgatagcgtcgcgcggggcggcatcgacgtgtgacttttcgtgacacacaccatcacccatcactggtactaagatcgatcgagatatgcatggccagacatacaagaaattgccaagagatttatatgtgccaattgcatgaaccgtgcactacatgcatcgatcagatttgcactgtacgttcaagatgttctggttagtgtgtcgtgttggagtactgatttggtttttgtaagaaagaatttgctgggtttattagcatgtacgtcctgtgttacttaaggatgccagagcagggtccattttgtacaagagtttcccatgtgtgtaccaatatacggacagggcagtactgactgactgtacatgattttctgtatttgggttctggtaaaattacctattcttg

SEQ ID NO: 22052 - DNA, 1763 bp, Oryza sativa
  ref <308>: DATABASE ACCESSION NUMBER: AK072261
  ref <309>: DATABASE ENTRY DATE: 2001-12-06
ggattttgacgagatcgtggggaggactgaagaggtgtttaggcaaggggtgctacgcgcgggcgcttcgcctccgtcaccatctcgcgagatgatttccctcttccgccgccgccacggcctccccttctccaccctgcacacgccagccggcgacgtcgccgccacgccgccttctcctctcgacgccacggcggtgctcgagacgctctccctctacgccaacgactggcgccgcgcgctcgagttcttccactggtcagcctcccccgacggcgccaacgtgcccccgacgccggccaccgtcgcccgcgcggtcgacgtcctcgggaagcacttcgagttcccgctcgccacctccctcctcgtctcccaccacgacccggggcgcgcggacccgtccttcctccgccccgccctgcgctccctcctcaaccgcctcgccgccgccaatctcatcgacgacgccatccgcgcgttcgattccactgccggttccatcggcctgcgggatgaggcctccttccacgccctcgtcgacgcgctctgcgaccaccgccgcgttgacgaggcccaccacctatgcttcggcaaggacccgccgccattcccgccggtgacgaagacctacaacttgctcctccgggggtgggctaagacccgcgcctgggcgcgcctccgccaactctggttcgacatggatagccgcggtgttgccaaggacctccactcctactccatctacatggatgcccttgcgaagtcaggcaagccgtggaaggccttcaaggtgttcaaggagatgaagcagaagggcatggcgatcgatgttgttgcgtataatactgcaatccattcagttgggcttgcacagggagtcgatttcgctattcggttgtataggcaaatggttgatgctggttgcaagccaaatgcttccacttttaatacgattgttaaattattatgcaaggaagggaggttcaaggaagggtatgcatttgttcaacagatgcacaagtttgggattgagcccaatgtgctcacttaccattgcttcttccaatatttgagccggcctcaggaggtccttggactgtttgagaaaatgctcgagaggggttgtcggccaaggatggacacatatgtcatgctcatcaagaggtttgggcggtggggattccttaggccagtgttcattgtgtggaaggcaatggaaaagcaaggactcagcccagatgcatttgcttacaattcccttattgatgcattgctgcagaagggaatggtggacttagctagaaagtatgatgaggagatgctttcaaagggattatcacccaaaccaaggaaggaactggggactaagattccgggagcagagtctgacagtgataatgcattgagtggcgtactttaatagtttgattactgagagcagtggtattaacatgttctggttatcactaagattatgctgatcttcttttaaagataggcttctttgtgttgaaagtctgaaggagatctgatttgtggtgcacatgagtttaacattgaagtaaaagattgcatttcctctcaactattgcacagctgcccacaggaattatgatgatatccctcaataatggaatgtttgcccaagctgaggacacctgggaagtgggcactagtgtgaattcggagagctattgctcctcacagatctatatgattaccgtggtcaattgaaattacgacatgctgatatttctcaaagc

SEQ ID NO: 22053 - DNA, 2479 bp, Oryza sativa
  ref <308>: DATABASE ACCESSION NUMBER: AK072262
  ref <309>: DATABASE ENTRY DATE: 2001-12-06
gattatgtgtctcgcatcagttctatcttgtttttttttatgtgacagggagtatgaactgtaagagaatcaatccttttcgtgtcaaaacctgtaagccagtgcaaaaatcaaacgcagcaagagcaaatcccaaaaacttcaaagatttgacaatgccacttgtgcgaggagccgattcggataaaagtcaggaaggatcggggtgtataacaaacaaaacctaaacgagccaacacgcacgctcatcgcatctttgcgtgcgccgtgcagccgccatggacatagacgacgacgcccgccaccgccgcgtcatcatgtcaagggattgccggagtcgcacgccgtcttccaggacgcaagacaagaacagatcgttgctccttgacaaggttcgtgcctcccacgcggaggcgctggaacggctgcggccggcggcggacctcgacgccggcctctgcttcggcttgctggatcccgtctccaacgccatcgtcaacgccgccgtcttcgccgaagcggaagatgggaacgacaggacggggcgatctctcgacggcgcggtcaccttcctcaccacgttcttccctcacctcccggactgggaggccgtgcgctacctgctcgacgccgacgctgacgtcctcgtcgcggcgcgcctcgtcgtgcgggaccgtggactgaggagattcgggttcgcctcggacaccgccggcgccgccgtaaggttggccctcagatgcgccgcgctggccgtgaagcatccgcatcccgaccggctcgtccacgcgtggctgtccctgtctcgccgcctcgacgaggccgtgtccgcgctcgccaaccacgacgtgcgcggcctcgtcgcgctggtcgtcgacgaggcggaggcgccggcggcggccaacatggagagggcgtgggagctggcagcgtcccgatttctcggccgggacaacggcatcgccgcgccgccttaccggcacgccatgcctctccagaggacgctcctctacgcgatccaggggttctacctccgggcgctcgcccggctgccctccggcgagctgcggtctcactaccaccggagcctggtgaaggccggccattgctacggccccatggaccccgtctccaacatcatcctcaacgtcgtctggtacgacgccgcgcacccgccggtggaagagctcgagctggccatgatcccgcccaagagcatgtccagcatcgccacgcgttccttcctcggcctcgtctccttcctctgcacccgctaccccaacctcggcctccatgacgccatccggtgtttgctcgacttcgacggcgacctcaacgccgccgcaagagaagcagatcggcggcagcaccgtccctcctgcactatccaggagtcctacgccgccgccgccgcggcggcccggcaccccaaaccggacgaacaagtggagttcctcagctctagcagagccatgacgacgccgctgctcctgcagaacggcggccagctctcctcggaagacgttcgccgcctcgccgccgccttactgcctccaactccctccgccgccgtctcgccaatgcagcgcaaaccaacgaaaccacggcggcgaagacagctcaaactgaaggcgcagatcatccgtgatcagaacaagatctgcaggaaggtgaaggctgcattggacagatacgcgttgcagaacaacgaacccggtggttacgagctccatgtcatctgtggcatgaacaattgcgtatcaggacccgtgtattgcactgacgatgacatcgtcagttatactcctctgatatactttcgttgtcatgtcaatttcttggctcgccggagagactccgatccatctgccattgccggcgagggagctcttcaactcttctttgcagaatgcggtaactatcgcctcaaccacgacggcatttgctgcccagtaaccatatcgccaccatgctcagaacaagtgcgttgcctttactgcgaacatgaaggggttgggattatgcatccgtcgatagaaaatttccatgggcgtgaggtggattttgagaagatggtatgtggagaagatacctgcggagacgaatttgatccagaaattgatgaggaaccgttttacaccaacgatggtatcgttaatagcctcaaagtgaatattttgtccgggttagaagaggaattcatttatcgcaatagcgatgaaggcaccgacgaggaagaaggtgactctgatgatgatatcgattttgtgtgagttttcttttttttttacgaactggcaaaagaatttgtcaatttcattgagaagaaaaagaataacatgattgtacattttgattggtggagttgtgtacattgttgttgttcatgtaccagtcttaccagtaggtatgataaagaaagtatatataaatattcaaagatgggagaaaacctcacctaatgaacgagatcattgcc

SEQ ID NO: 22054 - DNA, 2828 bp, Oryza sativa
  ref <308>: DATABASE ACCESSION NUMBER: AK072263
  ref <309>: DATABASE ENTRY DATE: 2001-12-06
ggggggcaagaagagccagcggcgcggcgaccgcgccattgccggcgcgcgcagtggggcgcggatgcagaggaggcagacgccgaggaatcgttgggaatggataagatcgactgctacgtcgtgccgcagaccacgggcaccggccggaacatcttccagggcggcagcccgctctcggcgtcgctgccgctgctcggcgtgcagctcgtcctcatcgtcgccgtcacccgcgtcctctacttcctcctcaagccgctgaagcagccccgcgtcgtgtccgagatcatgggcgggatcatacttgggccgtccgtgctgtcgcggcacgcggcgttcagggaggtggtgttcccggcgaggggcgagccggtgctgaacacggtggcgacgttcgggctcatgtacgtcatcttcctcatcggcgtgcggatggacccgaggctcgtcgtccgctccgggaggaagggcgtggtcatcggcctctcgggcttcctcctcccgctggccatgaccggcgcgggctcctccggcgaggccatggcgacggagccggacgtgtcgaggcggtccacgttcttgttcgcgctcgccacctcgctgtcggtcacgtcgttcgcggtgctgtcgccgatcctgtccgagctgagcctcctcaactcggacctcggccgcatcgccatgtcggcgtcgatgaccacggacggcatcgcgtggatcatcatggtggtgtacatcctcgccgaggcgttcctcgtgtcgcccgccacgtcgatctgggcgttcctctcgctggcggtgctcgccgcgttcatactgttcgtggtgcgccccgtcgcgctgcgggtgatcgagcgcacgccgccgggcaagccggtggaggagacctacgtgttcgtcttcctcctcgtcgtcctcctcgtcggcttctacagcgacgtcatcgggacgaactcgttccacggcgcgctgatgctggggctggccatccccgacggcccgccgctcggcacggcgctcggcgagaagatcgaggcgatggtgtccggcctgatcctgccgctctactacgccatgaccgggctcagcaccgacgtgtggcgcatgcactggggcaggctgcaggtcgtcatgttcctcgcctgggtcgggaagctcgtcggcgtcatggtgtcgtcgctgtaccttgagatcccactccgcgacgcctgtctcgctcagcctcttcatgaactccaagggcatcgtcgaggtcatcaccttcaacttcttcttgaccaacaagctcatcggcaagaacacgttcagcatcctgatctgcttgtcggtggcgatcacggcggtgtcggtgccggtggccggttggctgtacgatccggcgcggcgctacgccgtgtacaagcggcgcacggtgcagcatctcaaggcggacgccgacctgcggatcctcgcgtgcgtccacgaccagtcgcacgtccccggcacgctcgccgtgctcgaggcgtcgaacgcgacgccacagacgccgctcagcctctacctcctccagctcgtcgagatcgccagccgctccgcgccggtgttcatcccgcacaagctccgccacagcgcctcccgagccggcgccgcggcggccagcgcggcgcccgcacaccgactccgaccgcatcatcaacgccttcttccagtacgagctgaagcacccggagggcgccgtgtccgtgcaccccttcaccaccatctccccctactcctccatgcacgacgaggtgtgccgcctggccgtcgagaagcgcacgtcgctcatcctcctccactaccacaaggccacatgctcgccggcggcgtgcgcgccgccgtggggctccgcgtcgtcaaccgcaaggtgctggaggtcgcgccgtgctccgtcgcggtgttcgtcgaccgcaacgccgggagcgtcggcctctgcgccttcatcccgggcccggtgcaagaccaatcgacgtcctccaggagcaggagcggcgggcacgcggccagcggcagcggccaaggcttcaaggcggccgtcgcgtcgctcttcttcggcggcggcgacgaccgcgaggcgctggcctacgcgacgcgcatggcgcgccacgagggcgtggcggtgggcgtgatccggttcttgccggcgcggggcatcaaggacgagccgtccgaccgccggatcgacaaccgcgccatcgaggaggtgaaggcgctcgcggcgaggagcaggaacatcaaggtccaggaggagctcgtcggcgacatggagaggatcgtccaggtgctgcgggggctcgacgaggcgggctacgaccttgtgctcgtcgggatgcggcacaggtggtacccggtgatgccggcgaacgggatgtcggattggagcgagtgcccggagctcggcgtcatcggcgacctcctcgcctcgtcggacttcgacacgccgtactcggtgctcatcatgaagcagcaggaccagggcgggctgaacgccgccgtgccgggcgcccaggacgtgtggcacgtgaacgacggcggcgccgaggacgcgccagcgccgccaagaaacatgtcaaccgccggatcttagcaggttcaggcagtaggcgattgttctgttctagcctctaggacctggttcaatgtagactttcagattccctttttgcgtccaagtatgttgtgatgtatagctatcaggattagcatcaatccttaaactgagatgagatcttaagattatttcaaggaaacagcattgtgtatagcagcaatggaacaaatgcatccaatgttaatttgacaattcagtc

SEQ ID NO: 22055 - DNA, 1778 bp, Oryza sativa
  ref <308>: DATABASE ACCESSION NUMBER: AK072264
  ref <309>: DATABASE ENTRY DATE: 2001-12-06
ggagttcttcaccggcttctttcccctcctctccggaccagggaagcagctaactgtctgcgcaagaaaggtggttcaagcacgatgggacggaaccatctttgcctggtcacttgcttgtggattctgtcatgcgcagttctgcttcatgcttctcctgatggattgctgagaattagcctgaataagaagagattggacaagaagaccttggacggtgcaaaattggcaagggaggaaagccatcgtctgagagccgacggtttaggcgatgacatagttcctttggacaactacctggacacgcagtactttggagagatcggcatcggcactccaccacagaacttcactgtgatattcgacactggaagctccaacttgtgggttccatcagtgaaatgttatttttcgatagcatgctacttacaccacaggtacaagtcaaaagggtcgagcagttacaaaaagaatggagaatcttgcagcatttcctatgggtctggatcaattgctggtttcttcagtgaggatagcgtgctagttggggatcttgctgtgaaaaatcagatgttcattgagacaaccagggaaccgagccttactttcatcatcgggaagtttgatggaattcttggacttggatttccggagatctctgtgggaggagcccctccaatttggcagggaatgaaagagcagcaactgatcgagaaggatgtattctccttctggctcaaccgcgatcctgatgcaccgacagggggtgagttaatctttggtggtgtagacccaaatcattacaaggggagccatacatatgttcctgttacccgcaaaggctactggcagtttgagatgggggatcttcttattgatgactactcaactgggttctgttctggtggttgcgccgctattgcggattcagggacttcattgctcggtggcccaacaactattgttgctcaaattaatcacgcaattggagctgagggaattgttagtatggaatgcaaacaagttgtgcgggactacggggacatgatcctcgagatgctcatagcacaggcaagccccatgaaactgtgctctcagattggtctctgtgcatttgatggtactcgttctgtcagaaacaatatagagtctgttgttgataaagaaaaggtgggctcagatctttcctgcactgcttgcgagatggctgttgtctggatacagaatcagctccgacataaccaaacaagggagctcattttgcaatatgctgaccagctctgcgagcgtctcccaagccccaatggcgaatcggcagtcgactgcgatgagatctcaaacatgccgaacctttcattcaccatagcaaacaagaccttcaccttgacaccagagcagtacgtagtgaagctggagcagcaaggtcaaactgtttgcatcagcgggttcatggcgttcgacgtgccacctccacgcggcccactctggattcttggagacgtgttcatggctgcataccacactgtcttcgactttggcaaaaacaggattgggttcgccgagtctgcttgaattgcttggctagggccttcaggatcatacaacatatcaagtattgtaatgtttgttaggcagcttgtttactcggtattgtaacctgggaatgtctaaaggtatagtgcattagtagtagcatgcaaaaccttgtagaggaataaacgttttcacgatggagctgtatcagctatggatatgcagatatggatcttggatggtgc

SEQ ID NO: 22056 - DNA, 1371 bp, Oryza sativa
  ref <308>: DATABASE ACCESSION NUMBER: AK099262
  ref <309>: DATABASE ENTRY DATE: 2002-08-28
gaggtgcagcgtactcagtgcttcagtattgtagcgagtcggagtcagtagagcaggcagccaagaaatggccgatgcgcacggtcaccgccggcgggtggccctgccgtgcgcggtgcgcctccggctctgcctcctcgaggccgccatcgacgcgacgcagcgccgggacggcgccatcaaccgtcctctcttctccctgtacgaccggcgggcgcccgccgacccgcggccggacgccgccggcgtgagctccacggacgtcaccgtcgacgcgtcccgcggcctctgggcgcgcgtcttcacccctaccgcgccggagcacgagcactcctcgtcgtcgtcgacgacgacgccgcgccccgtcatcgtctacttccacggcggcggcttcgcgatgttctcggcggcctcccgcccgttcgacacccactgccgcacgctctgcgccggggtcggcgccgtcgtcgtctccgtcgactaccgcctcgcccccgagcaccggttccccgccgcgtacgacgacggggaggccgtcctccgctacctcgccaccaccggcctccgcgacgagcacggcgtccccgtggacctctccgcctgcttcctcgcgggagacagcgccggcggcaacatcgcgcaccacgtggcccagcgctggacgacgacgtcggcggcgactccgccgcctccgtcagacaaccccgtccacctcgccggtgtgatactcctggagccgtacttcggcggcgaggagcggaccaaggcagagcgcgcgctggagggcgtggcgccggtggtgaacatccggcggtcggaccggtggtggagggtgttcttgccggagggggccgaccggaaccacccggcggcgcacgtcaccggcgacgcggggccggagcccgagctgcaagaagcgttcccgccggcgatggtggtcgtcgggggcctcgacccgctgcaagactgggaccggaggtacgccggcatgctgcggcggaaggggaaggcggtgcgggtggtggagttcccggaggccatacacgccttctacttcttcccggagttcgccggcgacatccggaagctcgtcggtgaaatcagggcgttcgtggaagacagcatcatgtccaagcaatccattgcttagctgtgattactccaactagctataaattatcggagtggttcgtatttatataattgtagtacttatcttttgagggaacttaattatagtacttataatggagtaattactctccatagatgttttcggttcgttcaaacttttgaaatttgctgattactcactctgttcagtattgagtttgactaaattgcattagcgttacaaattttgttatgtgg

SEQ ID NO: 22057 - DNA, 1461 bp, Oryza sativa
  ref <308>: DATABASE ACCESSION NUMBER: AK072265
  ref <309>: DATABASE ENTRY DATE: 2001-12-06
gagatagcgcacgccacctcccctcccctcccctcccatggcaacgccaccaccgccaccgccttcgcctcgtcgcctccgccgctagccgttacccccccaccaccggcgccccctcaccttctccccaatgtcgacggcggcgcccgcatccgctacggcggctgcgagcctcttcctccgccggagtctctcctcctcctcccctcgccacgtcttcctgcctcattgggttgcccccattgtcgtcgcgcgccccgctaggttatctgcggtgccggcgaagcgcggtggaggtggtgttgttgcggctgcatcggcggcggcggggagcgcgcagtttggcgccggggacagtgagaatccatacgagattttggggatcagtccacttgatgggttcgaccaggtgaagatggcctataagcggaggcgaaaggatgccgagagcaacaaagatgccgagcacctgttcaagttagagagggcatacgatatggtcatgatggagcagcttcagaaccggaagaatggggtggcatatggatcaatccaggtgtcaaaggacattaaataatgctgataatcaaccagtggttccttgggggcctagatactcaagatccactgggaaggacctgcgcattaatatggcaatatcagcaacatttatcatgtatatatctaccatgggccatgcagactggaagcccatgcagtttttgtgttttgcctatttctatcgaatacttgacaaactgaaggctaccgagtcagctagcactcctatatacaatgagtatggtgaggttgaaggtcgtggcatacacatggcaaaacgagtactccgtagtttgggtttggtacttggatcaatacttgctgtatccctgggctacactgggctagccaatttttctcagtttcttgggcagtatattccatctgttgtttataacttccaggaattgattgtgactacagcttcatctgttttgctttgcatattggcgtcgtactatcgatagcaacttgtgtaattgtgttggatcaccccttggcattgcaatcttgataaacctgtcttcatgagggccatggtcgataacttgagcctattctgctatggaatatgagagcccatcaactatataagtgcactgttcttgcatgttttacatcgttcttacatctggaaaattttgcagctactgataagatgttctatccaatgttttgaaactgaaatttagcatgcaagagacagacagctaacaaagcaatgtgtcacatgaaacctgacgatgctgaaaatctagttctagtgagttgttccagcaaaaagttaactgcaattttcctagaagtttccttgagtttgcaatctgcttgcaagttccttgtatatttactgaacaattactctgtgttggtgagttatgaattacaacgtccttatgg

SEQ ID NO: 22058 - DNA, 1574 bp, Oryza sativa
  ref <308>: DATABASE ACCESSION NUMBER: AK072266
  ref <309>: DATABASE ENTRY DATE: 2001-12-06
gactcctctcccaccatcattcacagccgtgcttcgctcctccaaacccaaaaaatttctcctgcttttgtttcctgcacaccggctagatctcgccaagaactcggtaatcccaagccctgggtgagtgagatccagcttcgcaagaaggttttgggggttcttgggcagttctgccaggagagtgacactggatgattgcataaatgaagcttgctgaatgtagattgtgaagttctcctttcctgcgtacggccatatacacttttatcatggcaccgcgcaacaggtcttcagctagaaggcctctctggattgtcatcttgattgcttttgtctgtgcagtaggcattggagcctatctttatacaccccagcattacacaccttgttacttggtgtcatcaaattcctgtagttctcggcctcctccagaacctgctagggtttacactgatgatgagattgctgctcgtattgtcgtaagagatatcattttggcacagccagttcagtcaaagaatccaaaaattgctttcatgttcttgacacccagttcattgccattcgagaagctttgggaaaagttcttcatggggcatgaagacagatataccatatatgtacatgcatcaagagaaaggcctgttcacgctagtccgatatttaatggcagagatattcgaagtgaaaaggtagtctggggcacaatttcaatgattgatgcagagaggaggcttttggctaatgcactgcaagatcctgataaccagcattttgtcttgctctctgagagctgtgtaccacttcataactttgattatgtatatagctatcttatggaaacaaatatcagctttgttgactgttttgacgatcctggtccacatggagcaggcagatattctgatcatatgctacctgaaattgttaagagagattggagaaaaggtgcacagtggttcacagtgaaacgtcagcatgcagttcttattctttccgatttcctttactatgcaaagttcaagcggtactgtaagccgggaaacgaatggcataactgctattctgatgaacactatttgccaaccctctttaatatggttgatccaactggaattgcaaattggtcagtgacacatgttgattggtctgaaggaaaatggcatcctaaagcttacagggctgttgacacaagctttgaactgcttaagaatatttcgtccattgatgagagtattcatgttacaagcaatgcaaagcaccaagtgatgagaagaccgtgcctatggaatggcatgaagaggccttgctacctatttgcacggaaattctatcccgaggcactcgacaatctgatgaacattttctcaaacttcactatcatctaagggaaggatgaatcaaaaacctagtttgcatgtaacactacagtataggccttggaaaatcagaaacccagagagactcgctgaattgttttttgtgatctctcttggaacatcaaatgattttcctttttcgcgaagatgttgcatggtttgcagttgaaagagcagtcaaatttgttcccc

SEQ ID NO: 22059 - DNA, 1822 bp, Oryza sativa
  ref <308>: DATABASE ACCESSION NUMBER: AK072267
  ref <309>: DATABASE ENTRY DATE: 2001-12-06
gatttatttcgattctcccttctctccacgatttctccattcttcttcttctcctcctctccactactctatcctcttcttcttcttcgtagccttcgagctcgagctcctccatagattagcttggctaccaccggagaagagtccggggagtcggaaactcgtagctggggttcgttgcggcggtcggggcggccgaattgattggttgggtcggagcggatgatgatggcgaacgcgaagctgcccaagcaggcgctgctgccgccgcgcagcccgttcccgacggcggcggcggcggcggggccgtacgccggcgaccacggcccgatcgcgcggccgcagggtgcgccgcaccacaggcacgggcacggccacgggcaccaccagcgcacgtcgtcggagagcttcatcgaggagcagccgtcgtggctcgacgacctgctcaacgagcccgagacgccggtgcggcagcacggccgggccggccaccgccggtcgtcgagtgactcgtttgcgatgttcgacggaggcgccgccgccggcgcttacgccaatggctttgaagggatgggaggaggaggaggaggagggcaggccgcgccgtggggtggtgtgcaggagtactatgcgaagccaagctcgtttggtaggcaccagggccggccatgggagcagggcatgaacaatttggtgaattacaggcaaagcggcggtccaccgatgccggcgaaggagaaggttggtgggcaccatgggtcgccgagcgtgttgagggatcatgatcatggtatggacaggagatcctcggacgaatcggggcatgatcagaaggttgggcctgagaggaaggagggcgtgccgccgaagcatgcacaatccgaggcggacaccaagcgcgctaaacagcaatatgctcaaaggtcccgcgttcggaagcttcaatatattgcagagcttgagagaaaagttcaggcattacagtcagaagggatagatgtgtctgctgaaatggagtttcttagccaacagaatattatgcttgacttggaaaacaaagccttaaagcaaaggctggaaagtctagctcaagagcaactaattaaacgctttcaacaggagatgtttgagcgggaaattggtcgtctcagatcattgtaccagcagcagcagcagcaacagaagcagccgcaacctactactaccctcagtcgaagtaacagcagagacctggattcacagtttgctaatctgtctctgaaacacaaagaccccaactctgggcctcttcgtactcagtcctcgtcaatcttgtgagttccacacaaagttgccacaactcctagataactctttgtggctgtcatctgcatcaagaaaggagcaggcgcacctggaatcgtgtacccccatctatggtgaataataacactggaaaggctaataactgtggatctgatctttattcttttggaatatgcacctggcggtcatcctcagctcacttccattgttgatgctcgaccagtcggaggtgtttagggtttttctttgtagtttgatgcttttattatcgcatcgttgtaccattttcgaaatgctagggttctaatttgttaccgtcctgttccctgtgatcatgcattatgttagcgatatttggattagtcttgcctttatcaatggaatgtggagcactagtcagcatctggtacatacagatgttttgaaattgtgccacatccttgagaaaccgtatgtgttgtaacattgttattcaataagctagtgcaaatgaagtattagcgttgttcagtgttcc

SEQ ID NO: 22060 - DNA, 2866 bp, Oryza sativa
  ref <308>: DATABASE ACCESSION NUMBER: AK072268
  ref <309>: DATABASE ENTRY DATE: 2001-12-06
gatcaccaccaccaccgcacgggcgggcgggcgggcgatcgattcggcgagcgcttgcgcacacggtcgcttcgtgcggcgtcggagacaaccccggcagcctctccccctcccccgcgccgccgccgcggccaacctcctcctccatccggcgcacgcccggcgaccgaccggccggacgaccgatcgtcgaccgccgccgccgcatcgattccaagctctttcatgggtagatggtcaggatcgccaatcggtagagccgggggatggaattttctgcccttctgacttcggcaggcataaacatcggcctctgtgcgctcttcctgtcactctattcagtccttaggaagcagcctcacaactatggcgtctacttcgggaggcggctcgccgaggagaagttccggcagcaggtcgactacttctcgcttgagaggctcttgcctaccgctggatggatagtgaaagcgtactggtgcacggaagaggagatacgacgggttgctggcttggattccgtggtgttcctccgcctcttcatcttcagcatacgtatcttctcgataacttctcttgtttgcatatttggagtgcttcctgttaattaccatgggaaagaaacgaatcacggacgtattccagcagagtctctcaatgtattcacaattgcaaatctcaaagaaggatcacgaatgctttgggtgcattgtgttgccttatatgttataacaatatcagcttgtattcttctatactatgagtataagtatatatcaaggaagagattggcgcatattactggatcaccacctggtccgggtcatttttctgtgattgttcgatcaataccaaagtcagataatgagctacttgatgacactatcagaaatttctttgttaattatcatggatccagttacttgtcacatcagatgatctaccggaaaggaagtatgcagaaatttgtggataatgcagagagggtatataggaaatttgtaagagttaagatgtcttcatttggacagagtagaaggtctgacttgtccagatgtggtctttgtggagtacgggcttcgtcgtttcagcaatatcgcaataaattcatcaattccaagaagccagacctaagtgatccagaagtaattgaagctcagaaggattgtccaggtgctatagtattcttcaagactcgctatgcggcaattgttgcttcacgaattcttcaatcttcaaatcctatgctatgggtgacagattttgctcctgagccaagggatgtctattggtcaaacctctggatcccctatagacagatctggctccggaaaatagcaacacttgcagctagtgttgccttcatgtttgtttttattgtccccgttgcattcgtccaaagcatgatgcaactggatcagattgagcagctatttccaagcctgaaaaacatgttgaagaagcccttttttgtcaaacttgtaacgggatacctccctagcgtcgttctgctgctgtccctgtacacagttcctccattgatgatgttcttctcttccatagaaggatcgatttctcgcagtggcaggaaaaaaagtgcttgctgcaaaattttgttctttaccatctggaacgtcttctttgtcaatgtcctgtcaggatccgtgctaaatcagctaaatgtcttcactagaccaagggatatgccatctatgcttgccgaacttgtaccaaagcaggcaactttcttcatcacttatgtcctcacatcaggatgggcaagtctatgctccgagatattgcaagtgtacaacttagtatataacttcttcagaaaatgtatattttgctaccgggatgatccagaatatggctactctttcccttaccatactgaagtcccgaaagtcctcctgttcaacctgcttggcttcacattttcgataatggcacctctcatactgcccttcttgctagtctacttttgcctcggctacctagtgtatcgcaatcagatcctaaatgtctactacccaaagtacgaaatgggagggaaactgtggccaatcatgcacagcaccttggttttcgccctggttttgacacagaccatagctcttggagtgttcaccataaagcacgctactatatcttcagggttcaccgtcctactaatcatcgggacagtcctcttccatcagtattgcagacaccggttttcaagcatattcaactccttttctgcccaggatctgatagagatggacagagacgatgaacaatccgggaggatggaggagatccacaagcaccttctggacgcctactcccaaggcaccaccaacatggacaactccagttcttccaggaatggaggggctccaatcgaaatgatcatggaagaccctgcgcaggatgcacaggattctaaccaagaactctgtgacgccgtgaaggaagtgactgggtcgattcaggaacatgccgacgagatgtgacaactctgctagtatatattgttccgtgtcttgtttgattccatttgtaatctaccattcgctctgatgatgtgtgtagcttcgttatatgcttatacttaggccaagtagctgcttgattaatccggagaaagctccttgaatggtttaagggggggaactaactgtgcagattacccgaagtctctccctgtctcactttaccaccacggatgatgtgcatgacacagattcgtagcatgggcatcgagctcgtggatcaacttgctttaccttgcaaatttgtgtactttgaaaaattggaatatataactgtatatccaactttatgtgctgccccaatgttcctcttaacgttgtatattttc

SEQ ID NO: 22061 - DNA, 1743 bp, Oryza sativa
  ref <308>: DATABASE ACCESSION NUMBER: AK072269
  ref <309>: DATABASE ENTRY DATE: 2001-12-06
gactcttcctcctcctccctcctcgccggagcttggctgagcttgagctgagctgagctgatcggcggcggcaatggcgggcggcgcgatggtccagacggtgggtggcaagacgtacccggggaagatgaccgcgttcgtgttcttcacctgcctcgtcgcctcctccggcggcctcatcttcggctacgacatcggcatctccggcggcgtcacctccatggactccctcctcagcgagttcttcccgtcggtgtacgcgcaggcgaaggcgagcaaggacaccaaccagtactgcaagttcgacagccagctgctgacgctcttcacctcgtcgctgtacctggcggcgctggcgacgtcgttcgtggcggcgtgggtcacccgggtgttcggccggaagtggtccatgttctgcggcggcgtcaccttcctcgccggctcggcgctcaacggcgccgccaccgacgtcatgatgctcatcctcggccgcatcctcctcggcatcggcgtcggcttcgccaaccagtccgtgccgctctacctgtcggagatggcgccggcgaacctccgcgggatgctcaacatcggcttccagctcatgaccaccatcggcatcctctccgccaacctcatcaactacgcgacgtcgagcatcgagggcgggtgggggtggcgcatcggcctcggcctcgccggcgtgcccgcgctcatcatcacgctcggcgcgctcgtcctcccggacaccccaaactccctcatcgcccgcggctacgccggcgacgccaagcgcgtcctcgtcaagatccgcggcacggacgacgtccacgacgagtacgacgacatggtagcggcaagcgaagaagccgcctcgatcgagcacccatggcggaacatcctccatcgcaagtaccgcccgcagctcaccatcgccatcctcatcccgtgcttccaacagctcaccggcatcaacgtgatcatgttctacgcgccggtgctcttcctcaccatcggcttcgccggcgacgcgtcgctcatgtccgccgtgatcacgggcctcgtcaacatgttcgccaccgtcgtctcgatcatctccgtggaccgcctcggccgccgcgtgctgttcctccagggcggcacgcagatgttcatctcccaggtggtggtcgggacgctgatcgcgctccagttcggcgtcgcgggcgtcggcgagatgtcgcggtcgtacgccatcttgctcgtgctgttcatctgcatgtacgtggccgggttcgcgtggtcgtgggggcccctggggtggctggtgccgagcgaggtgttcgcgctggagatcaggtcggcggggcagagcatcgcggtgtgcgtcaacatgatgctgacgttcgtcatcgggcaggcgttcctcaccatgctgtgccacctcaagttcggcctcttctacttcttcgccgggtggatgctggtcatgaccaccttcgtcgcgctcttcctgccggagacgaagggggtgcccatcgaggagatgaaccacgtctggagccggcactggttctggggcagctacgtcaccgcccacgacgtcgccggcgccggcgccggaggaggaggaaaccgcagaagccacaacgtctagctcttacatatactattaccgtttacgagttacgcgagagagagagaattaatgggtaggttgtgtaattaggtaatgcaagaattaattaaaccaattaatttcaaggg

SEQ ID NO: 22062 - DNA, 3464 bp, Oryza sativa
  ref <308>: DATABASE ACCESSION NUMBER: AK072270
  ref <309>: DATABASE ENTRY DATE: 2001-12-06
ggttcccctgaggcctgatcaccaccctctctcctcccctttccctgaccccgcgaccgcgccgcgcgaggcgaactcgccactccgatctctctctccggcgacgccgccgccgccgcacagggttttgctctctctcgcgcggaatggagagcggcggggtcgacggcgagaggcccctgctgcgcgaggcgggggatttgggtggcgaggacggcggcgcaggcggagtccccgaggagggggatgcgaagggcgatgtgatggcggcggcggcggcgcaggggggcgatggcgatgagggtgtggaggcggtagatggggacgggagtaacgaggaggaggaggttgtgcagacgcccgatgtgaagcagacgcccggcgccgcggccgcggcggcctggcgggaggcggcgtgggaggaggctgacggcgaggagttcgtggatgtcttggaaggggacgtggatgagaagcgtgaggatggatcggccttggagaatggggaggatttgttggcctcccgttctctcgctgtcgagggtgacgaagaagggtatggttcttgtgctgatattggtatagaagaagacgctgagggtgatgcgagtcgggagcgcttggaggaggaagccatgacggaatcaatcagggagtatgtgacagaagctgttttggctgaccatatccaggagcaaccggacaaatcgaagagtgaatctgaacatgtgaaggttgctcagcacaagtcgcagattgcgaagagcagggaagagggacccaaacaatctggaggcgaaccgtccgttgttgtcgaggaattgaatggatcaagctcgtctgatgatgagagtaaagctacctccgctcctcctgcacgatccattagtggtgctgcaggtcgttctaatggcccctctttgccatctcgtcctgctgggcttggagcatcgacttccttgtcgcagccctcagctcgacctgttcagcagacccgcgctaatggtccagtcgctgtggacagagaaactcggcaggatgttgaatctcctgaggatggagacgaaaatgatgaaatccgtgagaaactccagatgatccgggttaagtttctgcgtcttgctaacaggtttgggcaaacacctaataatatggtggtttctcaggttctttaccgacttgggctggcagaacagcttagaagaaatacaggccagggtgtttttagttttgaccgggcacaagatatggcagaacgtcttgaagctgctggaaacgagccccttgatttttcttgcaccatcttggttcttggtaaaactggggttggcaagagtgctaccatcaattctatttttgatgatgtccggttggaaacaaatgcttttgataccagcactagaaaggttcaagaagtagttggtgcagttgagggaatcaaagtaaaagttatcgatactcctggcctgtcatgctcatcttcagaccagcaccacaaccagaagattctcaattctgtcaagcgacttatcagcagaaaccctcctgatattgttctttattttgatagactggatatgcagaccagggactatggtgatgtgcctcttctgcaaaccattacaagagtctttggagcatcaatctggttcaatgccatagttgtgctaactcatgctgcatctgcaccacctgatggtctgaatggaattcccctgagctatgagatgtttgtaacccaaaggtctcatgtagtccagcaagctataaggcaagccgctggtgatgtccgtcttatgaatccagtgtccctggttgaaaaccactcagcgtgcaggaccaatagggcaggccagagggtgttgccaaatgggcatgtctggaaaccacagttgctattgctttgttttgcctcaaaggttttagcagaggccaacgcgcttctcaagctgcaggacaatcctgctggtaaacctcgtatgaggattcctccacttcctttcctattgtcttcgcttcttcagtctcgagccccactgaagttaccagaggagcagtttggtgatgatgatgatattgaagacgatttggctgatgattcggattcagatgatggttcagactatgatgacttgcctccttttaaacgcctcacaaaagctcagcttgcaaagctaaaccatgctcagaggaaggcatatcttgaggagctggattacagagagaagttattctacaaaaaacagctaaaggaggaaaggatgcgccgtaaaataatgaagaaaatggcagcagaggccagtgcaagaacagatgacttcagtaacagcaatcttgaagatgatggcagtgctccaacaaatgttgcagtgcctatgcccgacatggtattgccctcatcgtttgattctgaccatcctagccatcgctatcgtttcgtggacacaccaagtgaatggcttgtcaggccagtgctggagacccagggatgggatcatgatgttggttatgaaggtctaaatgttgaaaggttgtttgctgtgaaaggtaaagttcctttatcagtgtctggtcaactttcaaaagacaagaaggattgctccctccaaatggaggtcgcaagttcacttaagcacggtgaggggaaaaccacttcactggggcttgatttgcagtctgttggcaaggacatggcatacactcttcgtggcgagtcgaggtttaaaaacttcaggcgcaataacacggctgctgggatatccgccacactccttggagattctgtatccgctggtgtgaaggttgaagacaagcttgttgtgaacaagcagctcagggttctggttagtggaggcgctatgagcgggaggggagatgtggcttacggagggcggcttgaagcaacattgaaagacaaagattacccaattggccgcatgctttctaccatagcgctctctgttgttgattggcatggggatcttgctgttggctgcaacatccagtctcagattcctgctggaagagctagcaatttgattggtcatgcgaatctaagcaacaagggaactggtcaagttggcattcgcctcaacagctcggagcatcttgagatcgcccttattgccctcgtgccaatataccaaaacatcaagaagttattgcagagttaatccgtatcaaccagtatttatgtaagcgagaaaaggcagcaagataaatccattagagttaatgcaagcataaattagaactagagttaatgcaagcataaattagaactatctatttattttcttcttcccttacctacacgtaatagtgttttcttccaagtttttttttttttgatgaagttggatttgcagaacacatccttttcaggatttttgttgttatccttgtactctcaatagctgataagaaaaaaaaatgcactgctgttttgaaggctgcaaccgccg

SEQ ID NO: 22063 - DNA, 2487 bp, Oryza sativa
  ref <308>: DATABASE ACCESSION NUMBER: AK072271
  ref <309>: DATABASE ENTRY DATE: 2001-12-06
gttcgcaaatccggccgcgagcgcgcgcgagcgcgacatgcaccccacgttcgcgcgcggcttaaattaggcaagaggcgcgccacggtcgcgccttctttgtctctcccttgtttttttttaaatttttttataagctgcgaggccgcgtcgtccgccattctcttcttcttcttgttgcacaccgccggccgggccgtgcgtagtgcgtggcatgtccgtgttccccctagcagctgattgatttgatttggtttttttctttgcttgattacttccttcgatcttgccctggttggttggtggtggtggtgggttttgctatctctgcgtgcgtgttccggccgtgtcggcggcggcgagcgtgaggaggcgcggcggcggaggcggcggtgagcgaacggcgggtgccacgtgcccacgccttgcgcgcgaagctcgaggcggtgggctgggtgatggtgcggttcctccggcgccatagcctcgacaagaacagcgcgcagttccatcgccagctgagccacgacagcagcagcagcagcagcgacaccgccgacatgcacgagcctcacggcaatggcagcgggggcactcccccgctgcccaacgggagagccgccgccgcaggcgcgccgcgctcccgcttcggccgcgacgggccgccctccgatttggacgtgatgaaggagaggttcgcgaagctcctgctgggcgaggacatgtccggcaccggcaagggcgtgtcgtcggcgctggcgctgtcgaatgcgatcacgaacctggcggcgtccgtgttcggcgagcaccgcaagctggagcccatggcgccggacaccaaggagcggtggaagaaggaggtcgggtggctcctctccgtcaccgaccacatcgtcgagttcgtccccacccgccagaccgccgagaacggcaccagccatggagatcatgtccaccgcccagcgccgcgacctccagatgaacgtccccgccctccgcaagctcgacgccatgctcatcgggtacatggacaacttcgtggaccagagcgagttctggtacgagaagggaggggacaacaagagggacgacgacaagtggtggatgccgagcggtgaaggtgccggcggaggggctatcggaggtgacgaggaagtggctgcagtaccagaaggagtgcgtgaaccaggtgctgaaggcggccatggcgatcaacgcgcaggtgctggtggagatggagatcccggaggtgtacatcgagtcgctgcccaagaagggcaagaccagcctcggcgacgccatctaccggagcatcaccgacgaggagttcgacccgatcgagttcctggaaggcgtggacctgtccacggagcacaaggtgctcgacctcaagaaccgcatcgaggcgtccaccatcatctggaagcgcaagatgcagaccaagcaggaggccaagtcgtcgtgggctccatcatcagcttcgagaagcgcgagcagttcgaggagcgcgccgagaccatcctccacctcctcaagctccagttccccggcacccctcagtcccagctcgacatctccaagatccaatacaaccgggacgtggggtacgcgatactggagagctactcgagggtgctggagagcctggcgtacagcgtgatgtcgaggatagaggacgtgctgggggcggacgcggcggcgcagaacctgacggcgacggaggcggcgaggaggctgatggacggggacgcggcggcgaggaagctggacgccatggaggagctggagaagctcaacgaggcgccggcgtccatgacgctctacgacttcatggggtggcacttcgaccaggacgagctcatgaggaagaaggaggaaggcaccctcgacgaggccggcgaggccaagctcaagaaggcccccagcctcgcccccaagaagttctcctacgtcgacagcctctccgccggcggcatgaggagcccctccgcgcgccactgatcaccaccaccgccgccattacactctctctcacacgcacaagatgatcggcaccatcgccggagtcggacaagatgaccggcgccgccgctttcttgcacgctgtacataaccgaactcgacggacactagagatcaacgacgacactggagtagagatcagcttgattattaatctaatcagcatctaatctcttcttaccaatgccaattaatgctgggaggtaattactattgatttctttttttttcttccttctccatctttattctagagggggaaaagaacaaaggtggtttcatctgcaatacctgcaattcgacgccattgctactgatcatgtaactagtactggtttgtaccaagcagttctgagttctcttgaaaaaaggagaagatgaactccttgggatgtatgtatgtaactgggtggacggggaacacacactgtattctttcatttgtttcaaactaatctttttgtt

SEQ ID NO: 22064 - DNA, 2075 bp, Oryza sativa
  ref <308>: DATABASE ACCESSION NUMBER: AK072272
  ref <309>: DATABASE ENTRY DATE: 2001-12-06
ggcctcctccaccaccttggccagtggttcagcaagaggaggaagaaggcgctgttcgacgcgctggagaaggtcaaatccgagctgatgacgctggggttcatctcgttgctgctcagtgtcacggggaggtacatatcgcgcatctgcatcccggtgggagccgcggacaccatgcttccctgcagcctccggaggagttcttcagagcaggaggtgcccggtggtggtggccatggccggcgacacctatctggagatccaaccaattttaaatgcgccaaaggtatggtgtcgcttgtttcagctgatgggcttcaccagctgcatatcttcgtgttcttcctggcagtctttcatgtcgcattcagtgctattacaatgtctctgggtagagcaaagacacgtatatggaaggagtgggagaaggagacttgctcccttacctacgagttttcatatgacccctcaaagttcaggcttactcatcaaacgtcttttgtgaggcaacatgcaagctgttggagcaaaagtactattctgctctattttgtgagcttctttaggcagttcttcagatctgttagaaggacagactacctgactttgaggcacggattcattgctgctcatttatctctagggactaggttcaattttcggaaatacatcaaaaggtcactggaggacgattttaagacagttgttggcattagtgcacccttatgggcttctgcgttggccattatgctcttcaatgttcatggatggcataacttgttctggttctctacaatcccccttgtagtaactttagcagttggaacaaagctgcaggctataattgcaatgatggctgttgaaattaaagagaggcatacagtaattcaaggaatgccggtggtgaaactcagtgatgaacatttttggttcaggaagccacgtctggttcttcatcttatccatttcgcgtcatttcagaatgcatttgaaattacatacttcttttggatttggtacgaattcgggttgagatcctgcttccatgacaactttgagcttatcatcgccagagtctgccttggggttgtcgttcaattcatgtgcagctatatcacacttccactctatgctctcgtatctcagatgggttcacagatgaagagaacgattttcgacgagcagacggcgaaggccctgaagaaatggcacaaggcagcagtggtgaagaagaagcagcagaaggggtcatcccatgagccaggttcagagacaccgggcacggagacgacgacgacgacggcgacggcaacggaggagagccagcgagaacgcgacgccgcggccatgccggtgcgccacctccaccgctacaagaccatcgcccacgtcggcgcgacggggacgctgtccgactcggactgctccgacacggacacgccgttcgcgtcgccgacgaggctcctgataccgccgacaaagcagcggagcctcgacgccgggagggcggaggtgcgcgtggacgtcgactcgacgccgacgccgacaccaccggagcgccatgacagcttctccttcccgaggttgcctgctcacaatttgcagcagaaatgaccaaatgatcatccatcctaagttcctaaccatcagtagtagtagtagcagcatcaactatacatgtaattgaaattgatggtggtgacaagtgtgtgtagagcagtggagtctgaaacttggtgctgtcccatttggtccagctcctactctgtgggtggagcggagctgagaaaatgccatttcacgtacttcctccgtttcacaatgtaagtaattgtaacatttctcacatttaaattgatgttaatgaatctatatagatatatatgtctagattcattaacatcaatatgaatgtgggaaatactagaatgacttatattgtgaaacggatgaagtataatttccggtttggcagctgtttggcagctccactctaatactttatgttatccatgattttgaaagtgtttggtacagagccacagatataagaatatccgagcatgagttatgcc

SEQ ID NO: 22065 - DNA, 2462 bp, Oryza sativa
  ref <308>: DATABASE ACCESSION NUMBER: AK072273
  ref <309>: DATABASE ENTRY DATE: 2001-12-06
gtcctccatctcctcgagatcgacatgccacgctcacgagttcttcttgagtggatcaatggagatgtgttgctgctgagctgagcagagtgtgtgtagaatgatgggagccctgcagcagcagagcaatggccatggccatggcgtcctcctcctcgctgaggctggctatgccgaggttgatcccactggaagatatggcagattcaatgagattcttggcaagggatcgtcaaagattgtgtatagggggttcgatgagtggaggggagtggaggtggcgtggaaccaggtgcggctgcgcgacgtcgtgcggggcggcggcgagctggagcggttctacggcgaggtccacctcctcgccgcgctccgccaccgcggcatcgtgcgcctccacgcctactgggtggacgcgccgcgccgcgccctcaacttcgtcaccgagctcttcgtctccggcacgctccgccagtacagggagaggcaccggcgggtgagcgcggcggcggtgcggcgctggtgcgcgcagatcctcgacggcctcgcctacctccacgcccactcgccgcccatcatccatcgcgacctcaagtgcgacaacatcttcgtcaacggcaaccagggcgaggtcaagatcggcgacctcggcctcgccgcgttccgccgcggcggcggccacgcccgctgcgtcggcacgccggagttcatggctcccgaggtgtacgacgagtcctacgacgagctcgccgacgtctactccttcggcatgtgcgtcctcgagatggtcaccctcgattacccctacagcgagtgctccaatcccatccaaatctacaagcgagtcatctccgtatgatctgatcaccacagaatttctcgtgaattcttggacacgatttgatcaagagaatgcgtgtttctgatcaggggatcaagcccgcggcgttgtacagggtgagcgacccggtggtgaggcaattcatcgaacggtgcctcgccccggcggcgcggcggccggcggcgagggagctgctcgacgacccgttcctgctgccgcttgaggatgatggcttcttctccggcgacggcggcgatggacatggcggttttggcgttggctactacaatctgatgtacaactacctgcaccagcctgcttgcatcgacgaccaccatgcctgcagcaatggcggcttgtcgccgtcgaatagcgtcggcgacaacgacgtggacgcggccgtgcagcggggggacgacgacggtgacaactggctccgcgacatccacatgctgttcgacgaggacgacgacgacgccgccgccgccgacgccaacgagcgtgtcggtggcgtggacatcaccatcaaggggaggaggacggacgacggcggcgtctacctcggcctgcgcatcgccgacaagaacggcacagggcgtggccggataatctgcttccggttcgacaccgaggccgacacggcgatgaccgtggcggcggagatggtcgccgagctggacatcaccgaccacgaggtgactcgcatcgcccagctgatcgacggcaaggtcgccgcgctggtgccgggctggaggccgggtccagcgacggacgacgacgacgacgacgatctcgtcggcggcggcgatgatccggacgcgccgggcggcgccgccgccgcctgctgcaagaactgccggccggcggcgtcgtcgtcgtcgtcctgcggctcgctcgtcgacttcatgtcatcggcggcggcggcggagcgccatggctgcaggcggtgcgccgagctgcacggccggtttgaggagatcacgttccaagccgacgacgacgaggaggagcagcatttgcaggggagctcctctgacaccggaggcagcaaccatgagcagcacgccatgggcaaggacaaggaggtcatgaacatcaatggcattgcacaagatggcacagtacaaggttcagaacagccatgatcagtaattcagtatgatgatgatgaacatccgaagatcgagcaattcgacgctgataggcgatacggatcggcgatgtttacaaccattgatgggttcttggatttgagcaatggcgcgagtcggtgccgccaccatgatcatgaccatggtagctcaaaggattcatgatcattgtgagggggaattgctcattgtgagggggaattgctgacagcaatctcgatcagccgctgctcactttcagaggttaccttgccgacacattgcaagagcaacaaagtctgtactgttgaacaatgctactgacgttcgacatgcccttctgacaaagtaaatctacagtttcaagattggatttgctcgtctttttttcagagatttagcatatattgtagggaagaaactgaaagatgtagtataacgttttgtgactgtgctatgaatctgaagaagatagggtacagtttaggtaggcc

SEQ ID NO: 22066 - DNA, 3534 bp, Oryza sativa
  ref <308>: DATABASE ACCESSION NUMBER: AK072274
  ref <309>: DATABASE ENTRY DATE: 2001-12-06
ggtccacctctctctctctctctcccacgccacgccacgccacgcttctcctcctccagatccggttcgcctcgccggcgatggccgaagatccggcggggtcccgccgctggcggtgcgacgccggcgacgagcacggctgttggctctcctcctccgccggcggcggcggcgacgaccacttcgaccgcctccccgacccgctcctgctcgtcatcttcaaccgcatcggcgacgtcaaggcgctcggccgctgctccctcgtctcccgccgcttccacgacctcgtccccctcgtcgactccgtgctcgtccgcgtcgactgcgtcatccccgacgaccccgcgtcctcgtcgtcgtcgtcgtcctcgccgtccgccgcgccatcctcccctacggcgtccgcgcgcgcgcgcaccgtcttctcccagatcgcgcgcatcgtgctcggcggcatcatcaagcccatccaggcgctcggccagatactctcccccgccaactccgcctccgtcctcgcagcatccgtcacctcctccccctcctcctcctcctcctcgtcctcctcttcgccgccgcttcccggtgacgtgtcgcaccactcgccatcggaggtgctccgctccttcaaggagctacgccgcctgcggatcgagctccccgccggcgagctcagcatggaagaaggcgtgctgctcaagtggaaggcggacttcgggtccacgctcggcagctgcgtcatcctcggcgcctcctccgccggcaaggacggcggcgcgggagcagctcccgctgttgactgtggcgagtccgacgagacagggagtattccggagtcgttctacacgaatggggggctgaagctgcgggtggtgtggacaatcagctcgctgattgctgcgtctgcgcggcattacttgctgcagccgatcattgccgaccacacgacgctggagagcctggacctgacagacgccgatgggcagggagtgctcaccatggacaagtggcagctgcaagaactgcgggtgaagccggtatcggcatctgggggctcacacaggacgctgatgccagcgcttagcatgcggctgtggtacgcgcctcacattgagctgcccgggggtttggtgctgaatggagcaacattggtagccattaaaccaaccgaggaggcaacaagggacacggttgggagtgggattgctgggtctgcaggtggatgctgggtttcagatgcctttgaggagccgtatcggacagccgtggggatgctcctgaagcggaggacatatagccttgagatgaactcgttctaagctgatggcaatttggaagttctatccgtgaggtaaattctgcactgcattcaatactatgtttgtctaattatcttcagcaattgctgtttgcgatgccatgctttggcttctcacattgtagcatttgcttcaacaacattgttgcttattcgtggaaaaattaacacgcgctcaccagtataaacttgcatagtagtaaacagcacgagtcttcgaatttctgaaatttggtttatgaggcttgccatgacttcagttaggttgtcataatcaaacaaaatagcacaacctttcgctaatttgaatgcgaggttgtaaggagttggaggagatctgttgttttagctgactcgttatatccttgagtcttgtggttattcctactagtatatagcaagcttcccgtatcagtttacatgatctggatatgcatttcttggctgccaaattaatggaacttgattcacatcatatcttccactaacatcatgtgctttgaaaatacatcgttttccacttgacatctaatcacgattttctgtatccagcagtaacaaatgaacaaagcatcattcatttttcttgaagaatactctgtagctgaaagtattcttttttgcggtaggcacaataaccttcactgaactgcactgaaataaataaaatcactcatcagtggtgatgtacaaaacatatatcgagttttattttattttttgtccatgttgcttatgagaattgttcctgtaaattctgagagtctggcaatccaccaagtttacatccagaaacaaaggggcgttgcatgagctactgtctttctttgcaactagtagaagcaaaacaacctagatgaccaaccctctttacttaccttaatgtattgttacagggtatgaatcacgcataccaatatgtgccacggtctgtaatcttttgttgttttttcttaccattcttgtataagaactgtagtcatcaaggaccatccattccattgctagtttgaaattatgcaattagggaatagaaaagtaccaaaaagggttaggctattaaaaggtgtgtatggtttttatggtgagaatggtgttccaacatttatgatctatgtactgatcatttgattgtacatcaccaccacggaatcgtggatcacccagtatggccccacatgatacatactttacttctaaataactaattacttaaccagttctcatggtggaatcttctgcacctccttgtattgttggagggcgtgtcacatgccacttccttaactcttgagattcgttttagccgtagatctgctgcacgagagaatagaaagaggaaggaagatcccacctggatgcaggatccacttgttttttttaaaaaaaactttatagatcattttgaaaccctctgaaatagtcccctttcatttcgcaaattgcaaaaaggaaacaaaatcagcaattttacttaagaaaatgtccaatgccttgttaactcatgcatgtgcacttggatacttgatgcaataacaaagatatttgaaaagcagagaacatatattatgtttgcattatgcttgttgtgttttgcaagatcaacagttccaccattccactgtatgtttccatggtgtagtagtaagctttaagcaaccaatggatttgtttttggcgtgttgctaacatcttatatttctctccttttcaggatgttaatttattgcaagttgcaactcaaagtactacgcggcataagaaatggagtagaagttcactggctgcctgttttactccggcacacgccctacccagacatgctgcaagttcttatttaacgcactacttgtcttgagcatctgtcagcaaggacctgaacggaggctatacaaccgatgatgacgagaagccgaacatgcatcctagtttgttggaattgctgggctactcaatgttgagcttgttgtttgcctctttgaggaagcccgtacctctcccagacgttggtagcacggataatttgtgccatgccaagctgttaagtgctaatcctaatttatcttccagtactcaggagtcctgtaccgtactttttgcagaaaaagtttgtagtagtacatgcgaggttactctgtttctgtacatcaatattcaagggcacaactagcagaatcttgtgtaattgagcactgacgtacgtagcattatcaatt

SEQ ID NO: 22067 - DNA, 1640 bp, Oryza sativa
  ref <308>: DATABASE ACCESSION NUMBER: AK072275
  ref <309>: DATABASE ENTRY DATE: 2001-12-06
gactggaaggtgatgagagtactcaagttgatcgccggagcagcatcagcatcagcatcagcttcaccatgcggggatcagatcatcatcaggatgtcgtcgcggcaccgcggggcggtggcggtggaggagacgacgggcaggcgcacgacatggtgatgccggggttccggttccacccgacggaggaggagctcatcgagttctacctccggcgaaaggtggaggggaagcggttcaacatcgagctcatcgccttcgtcgacctctaccgctatgacccgtgggatcttcccgctctggcctcaattggggacaaggagtggttcttctatgtgccaagggaccgcaagtaccgaaacggcgatcggcccaaccgagtgacgccatcggggtactggaaggccacaggggcggataggatggtgaaggtggagggtgaccgtcctatcggcctcaagaagacgctcgtcttctacgtcggcaaggcgcccaaggggcttcgcagcagctggatcatgaacgagtatcgtctccctcatggcgacgctgaccgctaccaaaaggaaatttcgctgtgtcgagtctacaaacgcccaggaatcgaagacaacttccacctcaccggcacaaccactaaatcctccggctcaaaggcggcggcggcgatgggcaagaagcacgccgccgcgaaccggacgtcatcgacggcggcggctgcggcgccccgcctcgccccgatgttcgacggcggcggcggcggccaccactcatccgccctcatgggaaaggcaacatacaacgcatcacacaccgccgccgaagggacgaacgccatcgccatgtcactgtcggcggcggccgcgctgcatcctccggcgccggcgatgttccggtcgacggcgtcggtggcctcgctgagctccaccacgtcgacggaggaggacggcacgtcgctcttccacctcaaggccggcgcgacgacgacgaacacgacgacgatgcatcatcaccatcatcatcagcagctgcctgcttcaactcatgctctgctcaacaccaactcgtcagcaatggcgaccatccccatcgacgagctgagtagggcgattggatcttacagcaacatccaccatcaaccaaactctactacaactcatcaatcaactgctttgccgccatcgcaacaaagccctcttcttccattcgctagcatggagaagatttgggattggaaccctctcctagaatctcccaaggtttgcacaaacttcaagtaactttgattatgatctactcttggatgatggattaatgtttgtatgcatgaatgcatctatgcaactatgcatatatatgcattgcatggatgcaaaaaccatatggtattatatgtgtacttaattaattatgtatatgtataacacatatttgggctaggacagggttatctatctatataatggaacatggtaaggtagttctagtcccatgcaattaccggcttaccgcgccattattttagttcacattagtggatggaagtaactgtatgtcaatttctattggatatgatctcgaggacaatgtgtagtgttactcgtcgatctagagttgtaataaagatgaaatagcattat

SEQ ID NO: 22068 - DNA, 2089 bp, Oryza sativa
  ref <308>: DATABASE ACCESSION NUMBER: AK072276
  ref <309>: DATABASE ENTRY DATE: 2001-12-06
gatcctcctctcctcttctcgctctcacttcttgtgcccaagtgtgagagcaatgggagttcttggtagtagggtcgcttgggcatggctggtccagctgctgctgctccagcagctcgccggagcgtcgcacgtcgtctacgacgacctcgagctgcaggcggctgctaccacagcggacggcgtgccgccgtccatcgtcgactctgagctccggactgggtatcacttccagccacccaagaactggatcaatgatccgaacgcgccgatgtactacaaggggtggtaccatctgttctaccagtacaaccccaagggcgccgtgtgggggaacatcgtgtgggcgcactcagtgtcacgtgacctcatcaactgggtggcgctcaagccggccatcgagcccagcatcagggccgacaagtacggctgctggtcggggtcggcgacgatgatggccgacgggacgccggtgatcatgtacaccggcgtcaaccgccccgacgtcaactaccaggtgcagaacgtggcgctgccgaggaacgggtcggacccgctgctgcgcgagtgggtgaagcccggccacaacccggtgatcgtgcccgagggcggcatcaacgcgacgcagttccgcgacccgaccaccgcgtggcgcggggccgacggccactggcggctgctcgtcggcagcctcgcggggcagtcccgcggcgtggcgtacgtgtaccggagcagggacttccggcggtggacgcgcgcggcgcagccgctgcactcggcgcccacggggatgtgggagtgcccggacttctacccggtcaccgcggacggccgccgcgagggcgtcgacacctcgtccgccgtcgtcgacgccgccgcctcggcgcgcgtcaagtacgtgctcaagaacagcctcgacctgcgccggtacgactactacaccgtcggaacgtacgaccggaaggccgagcggtacgtgccggacgaccccgccggcgacgagcaccacatccgctacgactacggcaacttctacgcctccaagacgttctacgacccggcgaagcgccgccgcatcctctggggatgggccaacgagtccgacaccgccgccgacgacgtggccaagggctgggccggaatccaggcgattccgaggaaagtgtggctggacccaagtgggaagcaactgttgcagtggccaatcgaggaggtcgagaggctgagagggaagtggccggtcattctcaaggacagggtggtcaagccaggggaacacgtcgaggtgaccgggctacaaactgcacaggctgacgtggaggtgagcttcgaggtggggagcctggaggcggcggagcggctggacccggcgatggcgtacgacgcgcagcggctgtgcagcgcgcggggcgccgacgcgaggggcggcgtggggccgttcggcctgtgggtgctcgcgtccgcggggctggaggagaagaccgccgtgttcttcagggtgttcaggccggcggcgcgcggcggcggcgccggcaagcccgtcgtgctcatgtgcaccgaccccaccaagtcatcgcgcaacccgaacatgtaccagccgacgtttgcagggttcgttgacacggacatcaccaacgggaagatatctctgaggagcctgatcgacaggtcggttgttgagagcttcggggctggaggaaaggcgtgcatcctgtcgagggtgtacccgtcgctggccatcggcaagaacgcgcgcctttacgttttcaataacgggaaggcggagatcaaggtgtcgcagctcaccgcgtgggagatgaagaagccggtcatgatgaatggagcctaaacaatatttgaaattgagagagatagatgcaatgcatgatgagaactaccttcagtagctagctagatttttgagtttcagcggaaaagaaaaaactgattgcccttaattatgtgctaaatcatgcccccttgtgtaaaatggtttcagtcacacgtgtcgtatgcatatgtaccaaggggacagtttgaatgcatggatgccattaggactaataaagattgatgctagtataaccct

SEQ ID NO: 22069 - DNA, 1368 bp, Oryza sativa
  ref <308>: DATABASE ACCESSION NUMBER: AK072277
  ref <309>: DATABASE ENTRY DATE: 2001-12-06
gatacgaacaacaagagactactccattactatattagattgattgattaggggaggggattgctgattaatttcatctctctaaccctagcagcagatccctctctcccctagcaactagcaagcagagagaagcagccgcctccatggatcctaatcagatgatgggccgaagcttccccatgtgggccgccgccgacgacccttccgcccagccaccgccgttcctccctccgcccaaccgcggctggaagcgtaagaaccctagcaccgccgccggtggctaccagccccccgccctcggcgacctccaggtgcagaaccgcgccaaggctcgccgctggttcaagaaccaaagcggaggcggaggcggaggcggtgggccccgcaagcacttcttcccccggcccaaggccgccgccccacgcaacaccacctccttcatcatccgtgccaagcgcgccggtggcatcgcctccctcgtctccccctcccctgttacccccgccgttctccccaccccacgcctctccccctcccgcgagggcctctccgacatggctcaggcgcagtggggcgtcgatggctatggctccatgaagggcctcatccgcctccgcacctcccctcaccccgccaacccctccgatgacgacgatgatgccaactccagcggcagtgacgtcgaggagcatgtcgaggtggagcgccgcctcgaccacgatctcagcaggtttgagatggtctaccctgccaggggtgacggtgtcttcttcgaggaggaggatgactatgagtatgaccaggaagcccatgtggctcgcctcgaggaggagaacctcaccttgaaggagaggctctttttgatggagcaggagcttggcgacatgaggcgccgcctggaggcactcgagtcgcgttttgcagggactgatggtatgcctattgagaattcagatgcagttgcagttgaccatgacaaggagatggctcatcccatacttgttcagagggatgatcttaggactgagattgctgctgatgcagcagggtcagacaaggctagtgcacaagacaatgcagaggaggttgctgatgcagcagtgtcagagaagatcgtgcaagacaatgcagatgttgtagttgcagggtcagagaggactggcgaagagatcggggttgatgcttcggagatggattgatgggagatggacactggaatgcaatagcggttatcagtactgtacatacataattgtcgatgacagattgaggccgcgtgatgtggacttgttttgggaggcttacaattgtatgttgtcgcataacaagtggatcatcgtatttacaatgtaatatgtttctacc

SEQ ID NO: 22070 - DNA, 1924 bp, Oryza sativa
  ref <308>: DATABASE ACCESSION NUMBER: AK072278
  ref <309>: DATABASE ENTRY DATE: 2001-12-06
gaatcactttccctttacatatctgcatcaactttctcgttccaaacaggcgatggtgagcagagcggacacgccggccgccgcccatcttgtcccaattcggctcctataaatttccctccaaattcgcactgattcctcacgctacccgcccatcgatctcgcgccatctcacaatgcggatgagggtctcactgcgccgtcgacgttggccgggccgacgcggccggtgacggtgccgccgcgggacaggggccacgcggtggacctgccggacacggacccgcgggtgcagcggcgggtcaaggggtgggcgccggagcagatcgccgtcgcgctctccgccgcgccctcctccgcctgggtctcctgggtcacgggggacttccagatgggcgccgccgtcgagccgctcgaccccacggcggtcgccagcgtcgtccgctacggcctcgccgccgactcgctcgtccgccgcgccaccggcgacgccctcgtgtacagccagctctaccccttcgacggcctcctcaactacacctccgccatcatccaccatgtccgcctccaagggcttgagccagggacagagtacttctaccagtgcggcgacccggcgatcccggcggcgatgagcgacatccacgcgttccgcacgatgccggccgtcgggccgaggagctacccggggaagatcgccatcgtcggggaccttggactgacgtacaacaccacctccaccgtcgagcacatggtgagcaaccagcccgacctggtcctcctcctcggcgacgtcagctacgccaacctgtacctcaccaatggcaccggcacagactgctactcctgctccttcgccaactccacgcccatccatgagacgtatcagccgcgctgggattactggggaaggtacatggagccagtgacgtcgaggattccgatgatggtggtggaagggaaccatgagattgaggagcagatcgataacaagacgttcgcttcttacagctccagattctcgttcccatcgacggagagtggatcattctctccattctactactctttcgatgctggaggcatccatttcatcatgctcgcggcttatgctgattacagtaaatcagggaagcagtacaaatggctggagaaagacttggcaaaggtggacaggtcggtgaccccctgggtgatagccggctggcatgcgccatggtacagcaccttcaaagctcactacagggaagcagagtgcatgcgagtggccatggaggagctcctctactcctacgccgtcgacgtcgtcttcaccggccatgtgcatgcttacgagcgttcgaaccgggtgttcaactacacgctggacccgtgcggccccgtgcacatctccgtcggcgacggcggcaaccgcgagaagatggccaccagctacgccgacgagccggggcgctgccctgacccgctgtccacgccggaccccttcatgggcggcggcttctgcggcttcaacttcacctccggccccgccgccggcagcttctgctgggaccggcagcccgactacagcgcctaccgggagagcagcttcggccatggcattcttgaggtgaagaacgagacgcatgcgttgtggagatggcacaggaaccaggatctgtacggtagtgtcggggatgagatttacattgttcgggagcctgacaagtgcctgatcaaatccagtagaaatagaatagcttactattgattaatttctatcagaagaagagccaaattacgcgggcacattttatagtgctttgctagctagttgtactcagatttgtcaggtaaattccatgcagcgaccggcatctctgctgttgtatacgtgttcttgtaagacatctgaagaatgaatgaagcttaaattgtactttgt

SEQ ID NO: 22071 - DNA, 1783 bp, Oryza sativa
  ref <308>: DATABASE ACCESSION NUMBER: AK072279
  ref <309>: DATABASE ENTRY DATE: 2001-12-06
gacaccatcactggacgagcagtaagtaaacactctgtggaacaatggccgccgtccttcccttgctcgccgccgccctcctcgtcctcttctccggcctgcatcccgccgcctccaccgccgccgccggcggcgaggcggccaccgtggttgtcaaggcggcggcggccgtctcccgcaccgacgacaacttcgtctgcgcgacgctcgactggtggcccagggacaagtgcaactacggcatgtgcccctggtacaacgcctccatcattaacctggatctgaacaacactattctgaacaatgctgtcaaagcgttcaactcgcttaggattaggctcggagggtctcttcaggaccaggtgacgtacaaagtcggcagcaactacggcgattgccggagcttccagcgagacgacggcggcctcttcggcttcaccgacggctgccttgaaatgaaccgatgggacgagctcaacgtcttcttcaaaagaaccaacacgacggtgacgttcgggctgaacgcgctcaagggccggaggaaggccgccggcggcaaggacacgctgtactccggcgactgggacgcccggaacgcgctcgacctgatgctgtacaccgccggcaagggctaccgcgtcgagtcgtgggagctcggcaacgagctgtccggcagcggcgtcgcggcgagggtggcggcggcgcagtacggccgcgacgtggcggtgctgaggaaggcggtggagcgtgtgtacggcggcggcggcgaggtgccgaaggtgctcgcgccgggcgggttctacgacggcgcgtggttctcggagatgctgcgggtgtcggggcgcggcgccgtcgacggcgtgacgcaccacatctacaacctcggctccggcaaggacagggacctggcgaggaagatgcaggacccggggtacctcgaccaggtggagaagacgttccgcgacatggcggccacggtgcggggctccgggccgtggagctcgccgtgggtgggcgagtccgacggcgcgtacaacgccggcgggaagggcgtgtcggacaggtacgtgaacggcttctggtacctcgaccagctcggcatgtcggcggcgcacggcaccagggtgtactgccgccaggcgctcgtcgtcggcaactactgcctcctcaacaccaccaccttcgtccccaaccccgactactacggcgcgctgctctggcaccgcctcatgggcccggtggtcctcaaggcggcgaccaccgccggcggcggaggttcgccgtacctccggtcgtacgcgcactgctcgagggagaagccgggggtgacggtgctcctgatcaacctgtcgaacgcgacggcgttcgacgtgtcggtggccggcggcgcgctcggcgcggcgccgtgcggcgggcggagggaggagtaccacctgagcccgctcggcggcgacatccggagccaggtggtgctgctcaacggcgaggcgctggcgctcggcccgggcggcgagatccccgagctccggccggccgtcgtcggcgacgggtgcgcggcgccgctgcgcgtggcggcgcgcggcatcgcgttcgttaggttcacggaattcaaggctcccgcatgcgcggcctagccgcctaggcttaattagcacgtgctagtaatcgcgagttcgtagattatgcagacatgaacaacatttgcattgtatcatgagtttaatcgtttttgataactctgagaaatggagacgtggttatcagctttgcttctggtttgatc

SEQ ID NO: 22072 - DNA, 1337 bp, Oryza sativa
  ref <308>: DATABASE ACCESSION NUMBER: AK072280
  ref <309>: DATABASE ENTRY DATE: 2001-12-06
gtccatcatcagagagggatcaggcagagaagcaggagcaacgtatacaacaagtcattcggttcaatcccccacccacaacatcacagcacggttgccgcttgctccggtgtcacactccccttgtctcgcctcgcctagtcgcctcgcctcttccgtttcaccaccaccgtctcggatcaaaccggccaacatctcgcctcgccgagaaattcccaaacgaggaagaggggaaaaggagttcatccccatggcggccaacccctcctccccgtcggcgggcggcggcggcgacgtgtcggcgtcctcgccgacgctgccgccggtgcggctcgcggcggcgcaggcggcgtcggcggcggcgatccaccccacctcgccgcggtacttcttctcctcgctcgcgggcaccaacgcctccccgcaccggcgcatcgccatcgccgtcgacctctccgacgagtccgcgtacgccgtccggtgggccgtgcagaactacctccgccccggggacgccgtcgtgctcctccacgtgcggcccacctccgtgctctacggcgccgactggggctccatccccgtctccgtctccgacgacgccgacggggaggtcgcacccgcggcatccgcggaggagctgcagaagaagcgggaggaggacttcgacgccttcacgtccaccaaggcggaggacctggcgcagccgctggtcgacgcgcagatcccctttaagatccacgtcgtcaaggaccacgacatgaaggagcgcctctgcctcgaggccgagcgacttggcttgtccgctatgatcatgggaagccgcggcttcggtgcctcgcggaagggcgggaaggggaggcttgggagtgttagtgattattgcgtgcatcactgtgtctgcccggttgtggttgttcgttaccccgatgatgctgcaggtgccgacggggaggcagcagggccaacagatgagctgcacactgtgcctgaggatgaacctgtgtatcatgatgcacctgatgtgcagaaagaaaactgaggtaatgcatctggagcgcaaggaaaacgtgagaggcttgcccgaggcgatctgtgtatttgaacaatgcaactactgtttagctgttggcctgttgcttctgtatctactggatatcataaactggcttgaccagcaagctgcttttcattttgcgtgaagtattggactctttagatcaggggagtttgttggtttactttgtaaactgatacagtccagtatccccgtgggtggtggagaaaggagctgtgtatgggatgttttcgttggtcacgaatccatgttgtttcatacc

SEQ ID NO: 22073 - DNA, 1690 bp, Oryza sativa
  ref <308>: DATABASE ACCESSION NUMBER: AK072281
  ref <309>: DATABASE ENTRY DATE: 2001-12-06
gaggatcctcccccaactttgatctctcccaccactactactcatccatcaaatcaacgtcgctcccctcctcctctcgcggcgcggctcctttccaagattctccgatccccaaacccccaatcgccagagcaaagaagggggaacatcgccaggaaaaagatcggtggcgagagaaggcggaaagcgaaggaaagcgaggggagcaaaaggagagagagagagagtcttttcaattttcttttgtttttcttttctccctgcaagaggcagctcggcgttgctgcgaattccatccatgtcgctcgccgtcctcaggatgaggttttgatgcccgaatccggccttttctctgtctatttcagcacctcatcgattttttttggctcttgtgatgccctctgtcgtagagctccccaatcagggcttcctcacttgtgccatgtttgttgctcactcctttcttgattattagttggtagctcaccagtttttgcaggggttttggcagatcatgtagtctgcctgctcaatccctggtcagttaatctagaaacctcattgaataaacaagttcagaggttcttgattccttttgttgcaattgcaattgcaactttgttgtgcaaattgtccattgacccatacaaaggagattgttcttggcgcattctgcggcaatggacgatgtcccaagtcaattgctcttctcccatccggaggtgcctgatagcttcgatgatttcttgaacaacatcacaacctgcacccacacccacacctgcaatcctcctggtccgtcggcaaccatgcacacccacacatgcttgcacacgcacacccaggtcttcgcctccggcagtggcgaagatgacatcaaggaggacctgacgaagacccggaggccgctggggaacagggaagccgtgcgcaagtatcgggagaagaagaaggcgcatgcggctttcttggaggaggaggtcaagaagctccgcgccgccaatcagcagctgctgaagcgattgcagggccatgctgcgctcgaggctgaggtgatcaggttaaggagcatcctactcgatgtccggggcaagattgatatggagatcggcacattcccttaccagaagccgtgcagtgttggctctgtggcatgcactgatccaggtatgtgcttcaatggcaattctgagattggaggggtctgggaggagtgctctagaccagtgggtgcagatcgcatgatcgacaaagatggtagcatgtcacaggaaattgatatcccaggaccggtgcattccatttccatggatgttgtcggaagcttggtgacttctgcttctctatctgagtgaatgcttttaaaggatgtttcagttgtttggcagattttcaatccatgccatgccaggttcttcttacttgaggggtaaacaatttttgtcagttatactctcatggaataaaagggtaacaacgagtaggaactgatctggtgccttttatgttctaatgatactccttgtgtaagtttttcttttttagttaatgactcctcgtgtaagtgttcactgtgtatagactacggagtactcgtgtatatatatatatagcactgcaagaatatgtgcttaatcatgtttttgaaaattgtaatgccagtatgtaaatgaagtatacttcagttctg

SEQ ID NO: 22074 - DNA, 1700 bp, Oryza sativa
  ref <308>: DATABASE ACCESSION NUMBER: AK072282
  ref <309>: DATABASE ENTRY DATE: 2001-12-06
gggcggcctcctcctctcctcctcccctgcacagaccactcgtttcctccacaaagagggagggaacaagggaagggtgtcgcccgccccccaccccgatctgcctccgccgctccgctcctccgcgcctgcgaaatctaccaacgctaactcagcaagatgggtgccggcggcaggatgacggagaaggagcgggaggagcagcagaagctgctcggccgcgccggcaatggcgcggccgtgcagcggtcgccgacggacaagccgccgttcacgctggggcagatcaagaaggccatcccgcctcactgcttccagcgctcggtgatcaagtccttctcctacgtggtccatgacctcgtgatcgtcgccgcgctgctctacttcgcgctggtcatgatccccgtgctgccgagcgggatggagttcgcggcatggccgctctactggatcgcgcagggctgcgtgctcaccggcgtgtgggtcatcgcgcacgagtgcggccaccatgccttctccgactactcggtgctcgacgacatcgtcggcctcgtgctgcactcgtcgctgctcgtcccctacttctcgtggaagtacagccaccggcgccaccactccaacaccgggtcgctggagcgcgacgaggtgttcgtcccgaagcagaagtcggcgatggcgtggtacaccccgtacgtgtaccacaacccgatcggccggctggtgcacatcttcgtgcagctcaccctcgggtggccgctgtaactggcgttcaacgtgtccggccgcccgtacccgcgcttcgcgtgccacttcgacccctacggcccgatctacaacgaccgggagcgcgtccagatcttcatctccgacgtcggcgtcgtgtccgcggggctcgccctgttcaagctgtcgtcggcgttcgggttctggtgggtggtgcgcgtctacggcgtgccgctgctgatcgtgaacgcgtggctggtgctcatcacctacctgcagcacacccacccggcgctgccgcactacgactcgagcgagtgggactggctccgcggcgcgctggccaccgtggaccgcgactacggcatcctcaacaaggtgttccacaacatcacggacacgcacgtcgcgcaccacctcttctccaccatgccgcactaccacgccatggaggccactaaggcgatccgccccatcctcggcgagtactaccagttcgacccgacgcccgtcgccaaggcgacatggcgcgaggccaaggagtgcatctacgtcgagcctgaggacaacaagggcgtcttctggtacaacaacaagttctaactgctgctgctgtgaaatcagcatcacacatccatagccaagcagcaaacaaatttgaagaagaagattacaagggaagagaagatagtgtcttcggaaatcgtcgtagcaagtatccatccatccatccaacccatgaacaatcgtctatctatccatgcatctatctatggttagtctctttagataggagagggcacttgggcacagaggaaggctattgcagtgccattgctagagttgccatcaagtgcaaagtaggcggatcaggcgtgtgtcatgcctgtggatttgtagtctatgtatgtgtcagctgctgagctccggtgtcgcagccttggtccctgtcgtgttatttccatcgtttttttccc

SEQ ID NO: 22075 - DNA, 1502 bp, Oryza sativa
  ref <308>: DATABASE ACCESSION NUMBER: AK099263
  ref <309>: DATABASE ENTRY DATE: 2002-08-28
gtaggaattgaaggatgatgctgctcgccaaggagttgggcctgtcgccgccggcagcggtcactcctcgccggaggccgccgcctgccagggtccccgcctctccctccggtggctcgcccgtggccgtcggagacctctggctccggaccaaaggagccggaggaggaggagacgggttcgggagccacagccacgagagcgagatggatttggccatgctcgtcaccgacttccttgagaacggcggcaccggaggcgccgattcccgcgccagcagcgactccgactccgccctctccgaccacctcgccgataacatttctatctacaagcaaggcggcgatgagaaagaaaacgagctactctccatggtccactcgctgttattctcgatccatgagtcagaccttctggctttcaaaagaggtcaatgcagtgccagctgcatccgtcatttacttgtgaagctcttgagatattcgggatatgatgcagctgtttgcgtatcaaaatggcagggattcgacaagatacctggaggtgatcatgagtatatcgatgtcatcatgaatagtgatactgaatatcgtctgatcattgatatcgacttcaggagccactttgaaatagccagggctgttgattcttatgacagtctgctcaattcacttccggtggtctatgttggcactcttcccagactgaaacagttcttgcatgttatggtagatgctgcaaaatggtcgcttaagcagaactctatgcctctgcctccttggagatccttgccttatctccaagcaaaatggcattccaagtatgagaggatagacctgcacattgagcaagacttccgcagcacagcttcagatcacgcactatgcattgggcacctcaaaaggctgaaatcctccctgcagtcagaactggataccgaaaggttgcttatgatgccaatcaagactgatatgaagcggagggcaaagtttgagaggcggcggcgccgttccttgctcagcttctgattcatatttgtgcttcttggatactgaagtactgagagaaggaagaatagcttcccatactttttttctgtgataaaaggagttctttttaacagttttggacatacaagggaaatagatgacgggtactaacaaggcaggagagttgagagagtgtgccagcttttttttgaaggcatatacaaaaacataaaattctttttggatttcatttttgttcttccggcgatgatggctgctagtggttaatctgctgcataccatgtacaatgatgagtgtttacagcgtttttttcctccttatattcattcttttatcacatagatggaccttgtgtattttgaacacacttccttttcccccttgttgtagagtggacatgatacatgctgttggttccctttgtaataatagaatgttcaagcttagttacactctgttttgaaatgatatactctaaaatgttctggctt

SEQ ID NO: 22076 - DNA, 1862 bp, Oryza sativa
  ref <308>: DATABASE ACCESSION NUMBER: AK072283
  ref <309>: DATABASE ENTRY DATE: 2001-12-06
gagagcagcagtctcgtctggagaagtggactagtggagtgtcgtgagttcttcgcttttgcttggctaaaatcgccgttagaaacttgtggaatcgagcagctcgccgcgcagccatgggtacgcgacgcgtagggctcctcctcctcctcctcctcgccgccgtactgctccagcccctcctcgcggcggcggcggcggagggcgtggtccgcatcgcgctgaagaagcggcaggtcgacgagaccggccgcgtcgggggccacctcgccggggaggatgcccagcggctcctcgcgcggcgccacggcttcctcaccaacgacgccgccagggccgcctcgaggaaggcgagggctgaggccgagggcgacatcgtggcgctgaagaactacctcaacgcgcagtactacggcgagatcgccatcggcacgccgccgcagatgttcaccgtcatcttcgacaccgggagctccaacctctgggtgccttcctccaagtgccacctctcgattgcttgctacttccactcgaggtacaaggctggtcagtcgagcacgtataagaagaatggaaaacctgcttcaattcattatggaacgggtgcaatttctggctattttagtcaggacagtgtgaaagttggtgatgtagctgtgaaaaatcaggattttattgaagctacgcgggagccaagtattacattcatggttgcaaagttcgatggcattcttgggcttggatttaaggaaatctcggtaggaaatgcagtgcctatctggtacaacatggtgagacaaggtcttgttgttgatcctgttttctcattctggttcaaccggcatgctgatgaagggcagggaggcgaaattgtgtttggagggattgatcctaatcactacaagggaaatcatacatatgtccctgtcactaggaagggatactggcagttcaatatgggcgatgtcctaattggagggaattccacaggattctgtgcagctgggtgtgcagcaatagcagattctggaacttcactgcttactggtcccacggccataattactcagataaatgaaaagattggtgctactggggtagtcagtcaagagtgcaaggcagttgtttctcaatatggtcaacagatcctagatcagctgcgagcagagacaaaaccagcgaaagtatgctcttcggtcggtttatgtacttttgatggtactcatggtgttagtgctggtattcggagtgtggtggatgatgaagttggaaaatcaagtggtccctttagcagtgcgatgtgcaatgcttgtgagacagctgttgtatggatgcatacccaacttgcacaaaatcaaactcaggatctcgtattgcagtacattgatcagctatgtgaccgtcttcctagtcctatgggagaatcatctgttgactgcagcagccttgcatccatgcctgacattgccttcacaatcggtggcaacaagtttgttctcaaaccagaacaatacatcctgaaggttggtgagggaactgctacccagtgcatcagtggattcacagctatggacattcctcctcctcgtggtcctctctggatcttgggagatgtctttatgggagcctaccataccgtgtttgactatggcaacctgaaggttggcttcgcagaggcggcataatgccccccatggtgatcggacgagtcggagagcccttagcttttcagctcgggtttatctcccgcaagcgtgtaggtatatattttagtgcatgctcaataaatattgctactgtgatctcaaaacctgtctgttttaatttggctaagctaaatataagtaggcagaattcagacg

SEQ ID NO: 22077 - DNA, 1389 bp, Oryza sativa
  ref <308>: DATABASE ACCESSION NUMBER: AK072284
  ref <309>: DATABASE ENTRY DATE: 2001-12-06
gaatccccacctgtacaccacagccgctcaccgagctctcgcccgcgtcgtccgtttccgcgctttcccgctgctagcctccgcgtgatagatggacgtggcggaggcggcgtcgccgggggtgggcgcgtgggcggcgatccgcgggtacttcacgccggcgacgctgttcctcgtcgtgaacatcgtcatcggcaccatcgcgctcacctcccgcacgcaccagcgccgccggcggcaggtgtaccagtatcaccacgacggggagatactccaccacgaccagttgcaaccgccgccgccgctgctgcatcagcaatactacggcggcggtgagcaccagcagatgatgatgcaggagacgctgtatgctccgccgccggcgccggcgccgctcgcgcggacgtcgtccgttcttgaccggctccgctcgttcggactctaccgcttccgctccggtgacttccctcccgagtacgctactgctgcggcggcggcgacgagccaactccaccaccagcgcacggaggaggtggtgtcttcgtctccggtggatgaggtgaagctgcaagggcactacgcgaggagccggtcggagccggcggcggcgccggcgcaggaggagaggaaggcggcgtcgaggctgaggaactcgagctccgaggtgaggagggcagaggtcgtgagggctccggcgagggtggtcgaggcgttcccggaggaggccgcggccgccgtggacgcgacggccgaagacgatttcacaccgaagcagcagcgagatctgccgctccagcaagaatacgttcctcccccggcgccggcgccggcgccgctcgcgcgcacgtcgtccgtcctggaccgcctccgctcgttcaccctctacagcttccgctccggcgacctcgccaccgacgacatccccgccgacgcagcggcggcggcaacgcccgcacaagcgcactacggtaggacccggtcggagccggcgcgggagcaggacaagaaggcgaagaagcaggcggcgtcggaggcgaagacgatgaccaagtcgagctcggaggcgaggaaggacacggcggcggaggacgccgacgacggcggcgtggacgccagagccgacgacttcatcaacaaattcaggcagcaactgcagcttcagaggctcaactcgctgctcaactacaaggagatgctcagccgcggcagcagcaagcagtagctagccacactcgccaagaacaacaagagccttgcaatttcacagcaagctcactaagctccctgttaattatactacttagcaatgctaaatcaatcaagagatttcttatatatgtggtgttaatgaattaaactgtgaaatagttgcaagatttttgccttaac

SEQ ID NO: 22078 - DNA, 1653 bp, Oryza sativa
  ref <308>: DATABASE ACCESSION NUMBER: AK072285
  ref <309>: DATABASE ENTRY DATE: 2001-12-06
gaccgtctcatcccagccgccgccgccgcagcctcctcctctcgtcttctccttcgagttgttagctccctccttattcaaccgtgggtaaggagaagacgcacatcaacattgtggtcattggccacgtcgactccggcaagtcgaccaccacgggccatctgatctacaagcttggaggtatcgacaagcgtgtgatcgagaggttcgagaaggaagccgctgagatgaacaagaggtccttcaagtacgcgtgggtgctcgacaagctcaaggccgagcgtgagagaggtatcaccattgatatcgccctgtggaagttcgagaccaccaagtactactgcacggtcatcgatgcccctggtcaccgtgacttcatcaagaacatgatcacgggtacctcccaggctgactgtgccgtgctcatcattgactccaccactggtggttttgaggctggtatctccaaggatggccagacccgtgagcacgctcttcttgctttcactcttggagtgaagcagatgatctgctgctgcaacaagatggatgccaccactcccaagtactccaaggcccgttatgatgaaatcgtgaaggaagtctcatcctacctgaagaaggtcggctacaaccctgacaagattccctttgttcccatctctgggtttgagggtgacaacatgattgagaggtccaccaaccttgactggtacaagggccccaccttgcttgaggctcttgaccagatcaacgagcccaagaggccatcagacaagcccctacgtcttccccttcaggacgtgtacaagatcggcggtattggtaccgtgcctgtgggtcgtgttgagactggtgtcctcaagcctggtatggtggtgacctttggtcccagcggtctgaccactgaggtcaagtcggttgagatgcaccacgaggctctccaggaggctcttcctggtgacaacgttgggttcaacgtgaagaacgttgccgtgaaggatctgaagcgtgggtacgtggcctctaactccaaggatgaccctgccaaggaggctgccagcttcacctcccaggtgatcatcatgaaccaccctgggcagatcggcaatggctacgccccagtgctggactgccacacctcacacattgccgtcaagtttgctgagctggtgaccaagatcgacagacgatccggcaaggagctggagaaggagcccaagttcctcaagaacggtgatgctggtatggttaagatgattcccaccaagcccatggttgtggagaccttctctgagtaccctcctcttggtcgttttgccgtgcgtgacatgaggcaaacggtggctgttggcgtcatcaagaacgtggagaagaaggacccaaccggtgccaaggtgaccaaggctgccgccaagaagaaatgagcatcgttgaagtggtggttatgctggctgcatttgagatatcttagcgttcgttaagttttgcccacggccatggcactcgttgcatggaccgttaatatctgctcgcaatgtgcactatgttagtcgtttaaaactcgtttatttctattcggttaaaaacttggatgctctgagtcttattgttgcccttcggttgttgtggaatgcgagtacttacagtgct

SEQ ID NO: 22079 - DNA, 2453 bp, Oryza sativa
  ref <308>: DATABASE ACCESSION NUMBER: AK072286
  ref <309>: DATABASE ENTRY DATE: 2001-12-06
gagcattttgactcgcggtgccgccgtccagcgacattctcacgccccccatctccttctccgcccgcttcttttcggcgacaagaacctctctactcgccgccgcttgcgtcgcgctcggcttcgcgcccttcgttctccgcctcctttgtgtgtgggggggaccggccggatagctggttgtggccgctgtccgtacggttcgaagctgtcactagttcttctcgtcgtcctcgggcgggcagaggttctcgcccaccaaaccggcacgccataactctcgggggggaaggaggtcaggattgttgtggtggggaattggagggaaatggcgacggagtggtccgacggtggcgaggagttcttgctgccggatgagttcctcgacgacgacttcttctccgaggaggagaaggccgccgtggccgcgaggagcgatagcagcgacgaggaggattgcttggccggcctctcccgccgcctcgccgggcttcttggtgacgacggcgagcgcgacgcgcctcccaaggtggtttgatttttcttggttctttcaaagggggatgatgtgtcgtggtttttgattggtttttcgtgtgcaggcggaggtgacggttggttcgccgcagtcgacgctgtgtgggctgcccaagtccggccaggagagcccgaacggcggggcgtctcaggtgagctcgccgccgtcgtcgccgttggagcagaagccggcggacccgtgggacatgctctatgaggcggcaggtcaggtggcgcgcatgcgggtcaccaacagcatcccggtgccgaacaatccctacggcttccccgcccacggtggctttgccgctccggcgcgcaaggcctcgccgccgcctcccgtttctccaccggcaacaaaggtcgctcccgccgcctactaccatccgctcgcccagttgcttacacagcgccagattcaagccgcacaggtacttggttcatgcagagattcttcagttgcaccgtcgttttccgcggttttttctccccgacatttttctcctgtttcagtttcatctcctcaagcagcagcagctgctgaagttgcagagggatcggcatctcgccgcggccgccgcgtggggcgcgaggcagacggcagcggcgaagaccgccgggtgcggagtcgccgcgtcgcctgtcgacatgaaccctgcggcgtggcctcccttgcagaagcagcagcacgcgccggcacccggagtcgggggtggcggcggcggcggcatgcgcgccgtgttcctcaccccgcccggcgccaagcgcgagcgcaacggcaccggcgtcttcctccctcgcccggccggcgcaccggcggagccaagagaaagacaggctgctcgactgttcttgtccccgcccgtgtcgtgcaagcgctcaatctcaacctcgacgacctcggcgcccagcctcgctaccccggcggtttcgttctcgatcacgacgctttgattaaccggagcaacgccatgctggccagccagaagcggcgcgcgtctccagccgtgccgtcgccggcgccggcgcctgcgctctgccacagttcgtgaacttttttgtgtcggccggagcagacgaaggatgatgcaccaagattccggcggcccccttctggctttgcgtcaagtttaatcatattaattaaagttagtaacagtacttcgtctgttaggtggtagtattagccaaagagggtagtaggaggcagtagtatcatcagcgttaggtttgtttgtttgattggtgatatattggttttttggtgtggacggaaagcggcggagatggagacggagacgacgtgcagtagaggaaatccatgtcttcggtttggtggtttggcagagtggtttggaaggaataataataagtggttcttttggagggcgagagagaaatgttagcggcttgtgcagcttgcaagcaagaagtgacaaggtatcatcaaagtggtttatggatgggtcatcttgggggagccaaaaataaacccatttctacatcatccatggctttgcttgctttgggtgcttgccaagaagtgaagtaccagcgcacacccagctataaggtctctctccctcctccctcctttttgcagtcttttacttgcaaaagaagcttgccgtgggctccgtgaataagggcgttcctttcttaaggaaaaaaaagaaaaggaaactatgaatttaattgccatttttcttgtactagcttataggtgccctaaccttctgttttggttcggtacaataagattcttatttaggggtgtagtagttcggtgcttagccgcagcagcagcaaagttgggctgggtgttgttaaacaacagttgtatttgtaccatcaaagccttaatatatgaatgatggtgagtatttcttactagttgacaataaatacatgattat

SEQ ID NO: 22080 - DNA, 1597 bp, Oryza sativa
  ref <308>: DATABASE ACCESSION NUMBER: AK099264
  ref <309>: DATABASE ENTRY DATE: 2002-08-28
ggaacacaaaagaaggggagaaggggaaggatagatagatcgccgccgccgccgtcgtctccgcccctctccagccaccagatccagcgaccatggggcagggcaccccgggaggcatgggcaagcagggcggcgcccccggcgaccgcaagcctggcggcgacggcgacaagaaggaccgcaagttcgagccccccgccgccccctcccgcgtcggccgcaagcagcgcaagcagaagggccccgaggcggccgctcgcctccccaacgtcgcccctctctccaagtgccgcctccgcctcctcaagctcgagcgggtcaaggactacctcctcatggaggaggagttcgtcgccgcccaggagcgcctccgccccaccgaggacaagaccgaggaggaccgatccaaggtcgacgacctccgcggcacccccatgagcgtcggatccctcgaggagatcatcgacgagagccatgccatcgtctcctcctccgtcggccccgagtactacgtcggcatcctctccttcgtcgacaaggaccagctcgagcccggctgctccatcctcatgcacaacaaggttctgtctgtggtcggaattttgcaagatgaagttgatcctatggtttctgtgatgaaagtggagaaagctccgctggaatcctatgctgacattggtgggctagatgctcagatccaagaaatcaaagaggcagttgagcttcctttgacccatcctgagctatatgaagacattggcatcaggccacccaagggagtcatattatacggagaacctggaacagggaagacactacttgccaaggctgttgctaactccacatccgcaactttcttgcgtgttgttggaagtgagcttattcaaaagtatcttggtgatggtcccaaactagtcagggaactgttcagagttgctgatgagctttctccctcaatagtctttatcgatgagattgatgctgttggaacaaagaggtacgatgctcattcaggaggggagcgtgagattcagagaactatgttggagcttcttaaccagttagatggttttgactctcgtggtgatgtcaaagttatactagcaacaaatcgcatcgaaagtcttgatccagcattgctacgccctggtcgcatagatcggaagatagaatttcctctgccagatattaaaactaggcggcgcatcttccagatacacacatctaagatgacattggcagatgatgtgaacctggaagagtttgtcatgaccaaggatgagttttccggtgctgatatcaaagcaatatgtactgaagctggacttcttgctttgagagaacgccgaatgaaggtgacacatgctgacttcaagaaggcaaaggagaaggtgatgttcaagaagaaggaaggtgtgccggagggtctttacatgtgatgtgctcactggtcgccagtgacggggtgggtaaccttgtaggacgaatatatatttgatttatcacataggctatgctgccttggtttgtaaaatacttgtgaaatttgttttgttacttcttgggatggagttggatagaacaaattgcatttctc

SEQ ID NO: 22081 - DNA, 1759 bp, Oryza sativa
  ref <308>: DATABASE ACCESSION NUMBER: AK072287
  ref <309>: DATABASE ENTRY DATE: 2001-12-06
gcaggcaatccgcgaggctgcgcgtcctcctatccatcccggtctccgccatgagctcctcgtcgtcgtcgtcgtcgcggggcgcgctggcggcggcggcggtgccttccctctccgccgacgaggccggcgcggcggcggacgaggcgttcttgaggtacacctcgccgagcatgcggcggagcggcggcggcggggttgccatcgtgtggttcaggaacgacctccgggtgctcgacaacgaggcggtggtgcgcgcgtgggccgcctccgatgccgtcctccccgtctactgcgtcgatccccggatctccgcggggagcacccactacttcggtttccccaagactggagcattgagggcgcaattcctgatagagtgcttggaggatttgaagcgcaacctgacgaaacaaggtctcgacctgctcatccgccatgggaaacctgaagacatcctcccttcaattgcaaaggctgtcactgcacatacggtctatgctcataaggaaacctgcagcgaggaactcctggttgaacaccttgtgcgcaaaggcttggagcaagttgtgattcctcagggaggagcatctaaccagaagaagcctcgaaatcccaagttgcagctcatctggggagcgacattgtaccatgtcgatgatcttccattctccgtgaacaatttgcctgacgtatatacacagttcagaaaggctgttgaatctaagtcctcagttcggaattgtagcaagttgccaccgtcactcgggccgcctcctggttctggcctggatgaaattggaggttggggaacagtaccaacactggagtcactaggcctaagcatgacaaagtcagagaagggaatgcatttcgtgggaggggagagtgcagctctgggaagagttcatgagtacttctggaagaaagaccagctgaaagtctacaaagagaccaggaatggcatgctaggtccagactactccaccaagttctccccttggcttgcttctggcagtctttcgcctcgttatatttgtgaagaggtaaagagatatgagaagcagagaatagcaaatgattctacatactgggttttatttgagttgatatggagagattacttccggttcatatcagcaaaatatgggaactccatttttcacctagggggtccaaggaacgtagagtccaagtggagccaggatcaggcactgtttgaatcttggagagatggtcgaactgggtaccctcttattgacgccaacatgaaggagcttttagcgacaggtttcatgtccaaccgtggccgtcagattgtctgctcatttctggtccgagatatgggtattgattggcgaatgggagctgaatggtttgaaacatgcctattggattatgacccagcttcaaattatggtaattggacatatggagcaggagttggcaatgatccaagagaagaccgatacttcagtatacctaagcaagccaagacatatgatcctgatggagagtatgttgcctactggttgccagagctccgatcaattgcaaaggaaagaaggaatttcccaggagcttcatacatcaagcaggttgtcccactgaaatttgatggtggacatcagaagagagatcagcagttcaacaggcagagaaggccaggccacatgtatagaagacaaaaataataagatgcatatatgtatttattataatttacaccatatatcaatacgaagtgaagcagatttac

SEQ ID NO: 22082 - DNA, 3387 bp, Oryza sativa
  ref <308>: DATABASE ACCESSION NUMBER: AK072288
  ref <309>: DATABASE ENTRY DATE: 2001-12-06
gggctgcttacatgcaaaaaaactcccataaacccctcctcttcgagaaaatccctttttgttcaaccacgacgcgaattcccaagcaacccccccacacccagctgagtagctgacgcagcaccagcagtcgcggggaaagggacacgtctcgccgccccagcttcccgcctccctcccatcccgccgccgcggacgcgtccaagccacagcaacagcaaccactccgacgaacacctcgcctgcgcgatggtggcggcggcgctggacgcgatggcggggacgaggtgggggaggtggctggggctcgtgacggcggtgtgggtgcagtgcatctccggcaacaactacaccttctccaactactcccactccatcaagacgctcatgggcctcacccagctgcagctcaacggcctctccgtcgccaaggacgtcggcaaggcgttcggcctcctcgccggcctcgcctccgaccgcgtccccacctggcttctcctcgccgtcggctccctcgagggcctcctcggctacggcgcgcagtggctcgtcgtgtcccgggccgtcgcgccgctgccctactggcagatgtgcgtcttcctctgcctcggcgggaacagcacgacgtggatgaacaccgccgtgctcgtcacctgcatccgcaacttccgccggagcagggggccggtgtccgggttgctcaagggctatgtggggctcagcacggcgatcttcaccgacgtctgctccgcgctcttcgccgacgacccggcctcgttcctcgtcatgctcgccgtcgtgccggccgcggtgtgcgcggtcgccatggtgttcctccgcgagggggaggttggcggcggcggcgcggacgggcgggaggaggaggaggaggatgggtggtgcttcgccgcaatcaacacgctcgccgtcgccatcgcgctgtacctcctcgccgccgacctcaccggcgtcgggggaggcggcggggtcgtgtcggccgtcttcgtggccgtcctccttgtgctcctcgcgtcccccgccgcggtgccggcgcacgtggcgtggaagtcctggatgaagacgcggaagctcgcgaacgccgacgtcgaggaggcggaggagtgcgcgtccgccccgctcctcgtggcgaaggcgacggcggcggcggcggcggaggcgcgcggccccggcgagaagccggtgctcggggaggagcacacgatcgcgcaggcgctcatgtcgctggacttctggctcatgttcgcgtcgttcctgatgggcgtcggcacggggctcgccgtgatgaacaacctggggcagatgggcgtcgccatgggctactccgacgtctccctcttcgtctccatgaccagcatctggggattcttcggccgcatcgcctccgggaccatctccgagcacttcatcaagttcgtctccttctcccatccctttccccttccatctccgtacacaaaattgaaccgcaaaatccccagcgcttattattccaaaaaaaaaaatccccagcgcttactgtcgccatagatccgtagctccgtagcacggattaggtgtggcattttctttcgctagagttggaatcttggagcccactagcccgccattggtgatggatgggtgctgcaaccatgtcggcatccgtagtggtggtgcccaggttggagcaaggcgagcatttccaagacagagtcaagatggtcaatagaatttcagatattgcaacttgcccactttaattgtagtactatagtatgatcattatactaagctgtaggattcccagattccctcggatacatctgcctaggaataggatggatcaagttgacagactgagagaacgagagagcttagttgggattggggaaaatggaggttttggttctagttgggaatgggggaactgaagggtttggttcttgattcctttggaaggatggcttacactaatctgcaatataattagcaattgtagagacaaataatcatctttaggtatctgcacctgctggttagaatggtgataagatagcagtagcacaagttgtgtttaagctgtaccccgtagtacttatctgcaggtactatccatggagaattggtagtcctatgctttcagtggtcactacctaagtacctaactgcagtccatactatatggttactcaattcacatgtatagagtacatgttacctttctgtgttagtggtcatgtgtgcatagcacatcatgtacagctggtgtttccattaagaactgttatcggattatcaacattggcttccttttcttttttggatcaacctattctggaagagcaattcgacatattattagtctgaccaaatttatgtaaaactagggagtcaatgtctacaacttaatgtgtccacttcgtagtcttaatccaatgttcatttcatttctgtatgcgtttccctttcctcaaatattttgctgagcttctgaacgtgacaaaatttcaggacaagagcaattccacgccccttgtggaatgcagcttcgcaaatcctgatggccgtgggctatgttgtgatggcagttggtatgccaggctccctcttcgtcggctccgttgtggttggcatctgctacggtgtccgcctggcggtcaccgtgccaacagcatctgaactgttcggtctcaagtactacggcctcatctacaacatcctcattctcaacttaccactcggctccttcctcttctctggccttcttgctggcctcctctacgacgcgcaggccaccaaggtacccggtggtggcaacacctgtgttggtgcgcactgctaccgcctcgtgttcgtggtcatggcgattgcctgcgtcgtcgggttcggtttggatgtcttgctgtgcttcaggaccaagagggtgtatgccaagatccatgagagcaagaggcagagcaggtcggcagttgtgcagagggtaagctagccaaaacctacagctatgagaaaaatggtacagattcgcgcaattgcatcaagattcaatgattcaacgagtgcaggttctgtaaattttgtgcaaataagaggatcccatgtcttgattctttggaattagatggatggatccattcaatcggtatagtttaactgccacggaggtttctaggggctgattcgagcaatgtttgccctgtgtgtgtaattcagtactagtactgactactactgactgagaggctgcagattgtggagttgtctgatccctcggtgtaatcagtttagtcagtgtatccttgaggaaatgtattctcggttttagcctgtacgatgaattgttgtgcaattagcctgttggcatataaattcagatcaattcaagcc

SEQ ID NO: 22083 - DNA, 1505 bp, Oryza sativa
  ref <308>: DATABASE ACCESSION NUMBER: AK099265
  ref <309>: DATABASE ENTRY DATE: 2002-08-28
gtaggaattgaaggatgatgctgctcgccaaggagttgggcctgtcgccgccggcagcggtcactcctcgccggaggccgccgcctgccagggtccccgcctctccctccggtggctcgcccgtggccgtcggagacctctggctccggaccaaaggagccggaggaggaggagacgggttcgggagccacagccacgagagcgagatggatttggccatgctcgtcaccgacttccttgagaacggcggcaccggaggcgccgattcccgcgccagcagcgactccgactccgccctctccgaccacctcgccgataacatttctatctacaagcaaggcggcgatgagaaagaaaacgagctactctccatggtccactcgctgttattctcgatccatgagtcagaccttctggctttcaaaagaggtcaatgcagtgccagctgcatccgtcatttacttgtgaagctcttgagatattcgggatatgatgcagctgtttgcgtatcaaaatggcagggattcgacaagatacctggaggtgatcatgagtatatcgatgtcatcatgaatagtgatactgaatatcgtctgatcattgatatcgacttcaggagccactttgaaatagccagggctgttgattcttatgacagtctgctcaattcacttccggtggtctatgttggcactcttcccagactgaaacagttcttgcatgttatggtagatgctgcaaaatggtcgcttaagcagaactctatgcctctgcctccttggagatccttgccttatctccaagcaaaatggcattccaagtatgagaggatagacctgcacattgagcaagacttccgcagcacagcttcagatcacgcactatgcattgggcacctcaaaaggctgaaatcctccctgcagtcagaactggataccgaaaggttgcttatgatgccaatcaagactgatatgaagcggagggcaaagtttgagaggcggcggcgccgttccttgctcagcttctgattcatatttgtgcttcttggatactgaagtactgagagaaggaagaatagcttcccatactttttttctgtgataaaaggagttctttttaacagttttggacatacaagggaaatagatgacgggtactaacaaggcaggagagttgagagagtgtgccagcttttttttgaaggcatatacaaaaacataaaattctttttggatttcatttttgttcttccggcgatgatggctgctagtggttaatctgctgcataccatgtgcaatgatgagtgtttacagcgtttttttcctccttatattcattcttttatcacatagatggaccttgtgtattttgaacacacttccttttcccccttgttgtagagtggacatgatacatgctgttggttcacctttgtaataatagaatgttcaagctttagttacactactgttttgaaatgatatactctaaaatgttctggctt

SEQ ID NO: 22084 - DNA, 1606 bp, Oryza sativa
  ref <308>: DATABASE ACCESSION NUMBER: AK072289
  ref <309>: DATABASE ENTRY DATE: 2001-12-06
gcttgctccaccacaacaccgtcgactcgaggcgcacgcaaacgccggtagcgaggagaaggattgcttcttctttttttttttgtgtgtgtgctgtgttcttgggtttcttggcaatggtgattggggccgagatcaaggacgagatggaggaggcgccgccgctgctgctcgacgaggccgcgcgccctcgccgcgtcgcgctcttcgtcgagccgtctccgttcgcttacatctctgggtacaagaaccggtttcagaacttcatcaagcacttgcgcgaaatgggggatgaggtgattgttgtgaccaaccatgagggggttccccaagaattccatggtgccaaggttattggttcatggagctttccctgtccaatgtatggaaaagttcctctctcgctggcactcagtcctaggattatttcggaggttgcaaagttcaagcctgacatcattcatgcatcctcacctggaattatggtttttggggcacttgctattgctaaactgctcggtgtccctctagtgatgtcctatcacacccatgtcccagtatacattccaagatatacatttagctggcttgtagagccaatgtggcaagtcataaggttccttcatagagctgctgatctaacattagtgccatctgttgctatcagcaaagattttgaaactgcccatgttatatcagctaatagaatacgcctttggaacaaaggtgttgattcagccagtttccatcccaagttccgcagtcacgaaatgcgagttagactaagtgacggtgagcctgaaaaaccattgataatccatgtaggacgctttgggcgtgaaaagaacttggattttctgaaaacggtaatggataggctgcctggagtaagaattgcatttattggagatggaccatacaggagtgagctggagaagatgtttgaggggatgcctgccgtgttcactggaatgatgcaaggcgaagagctatcacaggcatatgccagcggtgatgttttcgtgatgccctcggagtccgaaacacttggtcaagtagtcctggagtccatgtcatctggagtcccggtcgttgcagctcgtgctggtggtgttcctgatataattccagaagatcaggaagggaagaccagcttcctgttcaccccaggagacctcgaagactgtcttggcaagattcagctattgctgacggacaaggaattcagagacaacatggggatgacggctagagccgagatggagaagtgcgactggagagcagcttccaagaagatccgcaacgagttctacaatgctgcgatctggtactggaggaagaagcgcgcagaattgatcaaaccgttgcagtggctggcgcagatgttcctaccagcacctgaggtcaacagaatcacacaacactgaagcctcaaggggatgcttctgcagccatgatccggtccttgtaaatttctgatctatagtgcagtgtcaataggtgagatagttcctcttttttttgtatggaattggaattgtgaatggtatggcaaagccatttgttgcctgtattgttgtagtggacaatgtgttgccttgttggg

SEQ ID NO: 22085 - DNA, 1525 bp, Oryza sativa
  ref <308>: DATABASE ACCESSION NUMBER: AK072290
  ref <309>: DATABASE ENTRY DATE: 2001-12-06
gaagcaggattagataagcaaaacagccacctaagcccacgccgcgaagtcgccgccaccgccatgatctccgcgacggccaccgccgccttcctcgccgcggcgccggcctcctcctcctcctgcaccacccaccgccggcgcagcggccttcccgccatctccgcgtccctcgcaaccgcctcctccactgaggagccgctgctggtgcgggcggcgaggggcgaggacgggctgccgcggccgccggcgtggatgatgcggcaggccgggcggtacatggcggagtaccaggcgctcgccaagcgccacccctcgttccgggagcggtccgagacgaccgaactcatcgtcgagatcacgctgcaaccgtggcgcgccttcgcgcccgacggcgtcatcctgttctcggacatactcacgccgctgccggccattggggtgccattcgatatctccgactccaaggggcctgtgatccagtctcccgtgaggtccgaggagcaggtgagggagctcacccccattgacttcgagaagctccggttcgtcggtgagtcgctcaagattctacgcactgagattgatggacaagctgctttgctaggatttgtgggggccccatggacaattgcaacttatgttgttgaaggggggatgaccaacacttacacaaatataaagagcatgtgccacacagcaccaaatgtgttaaggggacttttgtctcaccttgcagacgccatatctgaatacattatttaccaagtaaactctggggctcaatgtatacaaatatttgattcatggggtggacaacttccacctcatgtgtgggagcagtggtcaaaaccacatatcaagcagattgtgaataagattaagattgaatgccccaatgtaccacttgttctctatataaatggaaatggaggcttgcttgagcgaatgacggacacaggagtcgatgttattggtcttgactggacagtggatatggcagatggaaggagacgccttggtaacaaaattagtgtacaggggaatgttgacccagcatttctattttctccattaccagtactgaccgatgaaattcatagggttgtcaaatcagctggtccaaaaggtcatatactaaacttgggccatggtgttcttgtaaaaacaccagaagaagctgtagctcatttctttgatgtcacgaggagcttgagatatgacacacttttccaaggttgtgttactgaagttttggagcctgttgcttaacaatggccaattgtcagatattttttttaatcagctgatccatggtgtaccatcgtagttttgtctgcaagctatgttgctccttttgttggccatgtctttgtaggaatatcacgattcgtgaccaggtcaattcaattttattcattactcttaatagctgtattccttcatccatccacaaaacaaaaacaaaaaggcatgccacctggttttacaagaaaagccagagtaggttcaaggtgttttgtcc

SEQ ID NO: 22086 - DNA, 1930 bp, Oryza sativa
  ref <308>: DATABASE ACCESSION NUMBER: AK072291
  ref <309>: DATABASE ENTRY DATE: 2001-12-06
gggcgggcttaatccactgtggagatctctcacttccacggggtctcttcttcctccgagaaattcttctttggctaaagccgctgatctaattttcttttcgatccacagaggtccgcagctggtgtcgtctggtgctgcgggtatcgtcgctgccatggcggatcagtcggtaaggatctgcgagctgtttctgtttaatctcttggttttaggggtgcgaaaccttcgacgtttcggttgtttgaccggatctcgacgcgtttttacggcggatttgcttttgtctggaatttgcttgtgttgaccctagcttctcttgtagatctggaagaagctcttctcttaatttcagagccttaactaatacaagtaacagtttgtttgttccccccaaaaactgaacccccatgtcccaagttggatcagtcccctggcgtggatagttagatctgtagaatttgcgctgtagtttttgcatggtcatacattttgttacatctcggtaaattttatggttgttccgtttcctcttcagttttttgtttttttagctgtgtcctatcatcatcagcctctaatctgaagcaaattggctggtagactagatatgaaaccaaagttgagccacatgaaccaactcaaaaaggaaaatatcccctagctgaatgattaaattgctacctgattaggttagtgtgtctggttgtgtataacgtgtttcaagaattgacatcactagataattttactcttgccggtctgctgaattgctattttatttatgatacatacatgatcgtttaatcgttgcttaatttaactttgtcctcatggcattcatgactaccttttcattagtgtagttccgttcaataaataattaagagcacaattgtgtgctctcatttggagtgttttataatttatgttctgtgaatccactggaactgtatgttggcatgattgcctcttttaaatgtatatgttcttgctttcaaacactttcaggtgttctgaacacttgtgtcttgttgttctgtatgcatccttatatcagttaaccgtcatatctttctctgaatggcaaacctttacacacattctatttcgttttggctgacctcggactagtttttggaatcttacttataggctagttgctagtgtagaaaacatgtaaatgtatgaaatgtcagactcaataatgtattaaaattaagcttcgtctgcgcagtgataaatctgtatgaataaagggtaacagatatgtagtggaactgaacagtccatattgaacataatttgtcgacatgctctgttgacatgcttagacatgctgatctgtgaagtcagcttttgggtttcccatgtgtacaaaagggtgtacatgtctgctctaatttgttcatactaaccttgtaatatataagtttgaagggttaactattttgatttttccagctacctaaatcgcaattatattttcaatctttagggtggtttctgatagtttatttttttgttcttcagaacaacatgatcatcgaggaggtcaacaagggcctgaaccctggaacgatagtccttcttgtggttgcaactctcctgattcttttctttgttggaaactatgcgctctacatgtatgctcagaagacgcttcctcctcggaagaagaagccagtctccaagaagaagctgaagagggaaaagctgaagcagggggtttctgcacccggagagtgaagagattcgtcagtttaccaatgttactgattttatcctgagcttcttttgcatgataagaattatcagctggagcggcagtgtttacagtaactatgttatgtagaagctttgtcctaagtggtttacatttgtattagacgccttatttgagcaatctgttgaacagcactgcaaattg

SEQ ID NO: 22087 - DNA, 1695 bp, Oryza sativa
  ref <308>: DATABASE ACCESSION NUMBER: AK072292
  ref <309>: DATABASE ENTRY DATE: 2001-12-06
gacgctccccctcactttcactccacacacacacttcacggttcgcgcgacgaacaaacgggcagaaaaaccctgccacgacgacccacgactgagccgagcgtacgcacgcacccacgcacgccatgggggcgctgcggcggtggctgccgtgctgctgctgctgctgtcgcggcggcggaggaggtggtggtggtgggagcgtgggggatgggctggtgtgggacgtggccctgaaggcgcacgcgtcgggggactactccgtggccgtggcgcaggcgaacgaggcgctggaggaccaggcgcaggtgttcgtctccccggcggcgacgctcgtcggcgtgtacgacggccacggcggccccgaggcggcgcggttcgtcaacaagcgcctcttctccctcatccaagagttcgcggcgcagagcggcggcatctcggcggaggtgctcgagaaggcgttcggcgagacggaggaggagttcgtggcgtcggtgcagaggtcgtggccgtcgcagccgaggatcctgtccgtcggctcgtgctgcctcgtcggcgccatcgaggacggcacgctctacgtcgccaacctcggcgactcccgcgccgtgctcggccgccgctctgccgccggcgccgcccacggccgcaagggcaagaacagggtggttcccgagcgcctctccagggaccacaacgtcgccgacgaggacgtccgccgcgagctcaaagagctacaccccgacgactcccacatcgtcctcaacacccatggcgtctggcgcatcaaaggaatcatccaggtgtcgaggtcgatcggcgacgtgtacctgaagaagccggagatatgcaagagcaacccgatgctgcagcagacgatctgcccgttcccgctgcggcgaccggtgatgagcgcggtgccgacgatcaagacgaggaagctgaggccaggggaccagttcgtgatcttcgcgtcggacgggctgtgggagcagctcaccgacgaggcggcggtggcgatcgtggccgggagcccgagacggggcgtggcgatgaggctggtcagggcggcgcagctggaggcggcgaggaagaaggacgtgaagtacgagaggatcaggacgatcgagaaggggcagaggaggcacttccacgacgacatcaccgtcgtcgtgctcttcctcgacaagtgccgcggcaaggccggccgcggcgacgagatcgacggcaccgacggccccgtcgacgtcttctccctcagccccgacgaccgggaggacccgaccaggccagtgctccgttgatcgacggcggccggagcttcaattccagccgccgccggtggtgtgtgtacgtacatacgactgttcttggttctttaatttgctccccaaatcgaggtttgcatttggcgcgaaattggccgtttcagccagaaaggtttggttttttaagttgccagttgccacgcaggtctggtgttcatcaccctcaaatcgttttctggttcaaagcttcaaaattcaatttgttttggttggttttctagaaataatgctgcaaccacttcatcggagagaactacgtgtaatttagttgtgaagagtagacagtagtagtactgtagtagtgtcgtgtcttgtaaattctaaacataacaagttgctcaagcttctccattggagagaggcatcc

SEQ ID NO: 22088 - DNA, 1508 bp, Oryza sativa
  ref <308>: DATABASE ACCESSION NUMBER: AK099266
  ref <309>: DATABASE ENTRY DATE: 2002-08-28
ggcgcacttcacttcgctcaccacatcaccacctcactccactaaccagagagagaacgcagctagtagcattattagcatcatgaccgcgatggcggcggcggcggcggtgttggtgtcgttgctgctggtggcggcggctgcggggcagcaggcggcgctggtgccgggggtgatgatattcggggactcggtggtggacgccgggaacaacaaccggctggcgacgctggtgcgcgccgacttcccgccctacggccgcgacttcccggagacgcacggggcacccacggggcggttctgcaacgggaagctggccaccgactacaccgtcgacaacctggggctcacctcctacccgccgccctacctcggccagctcgcccagtccgacaaccgctccctcctccacggcgccaacttcgcctccggcgcctccggctacctcgacaccaccgcctccctctacggggcgatatcgctgagccggcagctggggtacttcaaggagtacaagacgaaggtggaggcggtggccggcgggaagaaggcggcggcgctgacgtcggagtccatctacgtggtcagcgccggcaccagcgacttcgtgcagaactactacgtcaacccgatgctgggcgccacctacacccccgaccagttctccgacgtcctcatgcagcccttcaccaccttcatcgaggggctgtacggacagggggcgaggcggatcggcgtgacgtcgctgccgccgatggggtgcctcccggcgtcggtgacgctgttcggcggcggaagcggcggcgggtgcgtggagcggctgaacaacgactcgcggacgttcaacgcgaagctggaggcggcctccgacagcatcaggaagcagcactcggacctcaagctcgtcgtcttcgacatctacaacccgctcctcgacctcgtcaccaaccccactgccgccggtttcttcgagtctcggagagcgtgctgcgggacggggacgatcgagacgtcggtgctgtgcaaccagggtgcggtggggacgtgcgccaacgcgacggggtacgtgttctgggacggattccaccccacggacgccgccaacaaggtgctcgccgacgccctcctcctccagggcctccagctcatctcctgatccatccatccgtttcctgagaatgacggacgcatgcacagccaacagcgctactagcttcttgctctcgcttctgcttctcaactactctactctactcctgtgaacttaattagttaagttgctatttgtttctcctgctagcgatcgatcgagtagccgccgtacgtgctgcatgctgctgtttcggttgccctgcttgtttagttttgtttttctctctatcgtgcagtcatgtgcacgggcttgggcttagttgttttgctgtagtatgaatgaactgcttgcttggtgtaatatgtcatgtacatgcgcttggattgtactatcccgctagcaatgggtgttttgc

SEQ ID NO: 22089 - DNA, 1304 bp, Oryza sativa
  ref <308>: DATABASE ACCESSION NUMBER: AK072293
  ref <309>: DATABASE ENTRY DATE: 2001-12-06
gattctgacgtcatccaaaattccaaatccatggcgacctcaccgcgatccccgccgggggcgccccctccgccggagttcgagatctcgcggcagtcccgtctcctcgcggcgctgtccaagaaggtgatagatctcgatgagctgaggatgctggctgctcagggggtccctgacggcgccgccgtccgtcctactgtgtggaagctgttgctgggctatttgccgagtgatcgtgccctgtgggagcaggagttggcaaagaagagatcacagtacgcagcctttaaagaagaattccttagcaaccctatggaaattgcacggcaacgggaattagaaggccaagggagtgagaatgcagggagtatatataatgggttacttcatagatcagaggttacacaagaagagcacccattgagccttgggaagacaactgcatggaatcagttctttgagtattcagagattatcgagcaaattgaccgtgatgtgaagcgcactcaccctgacatgcattttttctgtggagactcatcttttgcaaagtccaatcaggaatctctgaaaaatatactgattatctttgcaaagctgaatgccggaatacgttatgtacaagggatgaatgaaattttggcacctctcttctttgtgtttcggaatgatccagatgataaaaatgctaactttgcagaagctgattctttcttctgcttcatggagttacttagtgggtttagagacaacttctgccagaaactagacaacagtgctgttggcattcaaggtactctctcaaaactgtcgcaacttgttgcgaagtatgatggagagcttcagcgttatttggaaataacaacagaaattaatcctcagttctacgcattccggtggattacgctactgttaacccaggagttcaactttgctgacactattcacatatgggacacactattaagtgatcctgatggtcctcaggagaccttgctcagaatctgctgtgcaatgctgattcttgtccgaaaacgcctattggctggtgatttcacttccaatctcaagctcctgcagaactaccccccaacaaacatcagccacctcctttacgtcgcaaacaagctgcactgaactcaactgaacctcgtctggaagacctgaaacacactacccctgctacaatgtattcggtaaaaactgtgactgcattgcagaaccacgtaccattacgaatgctaatcacagccagtccattaataaaataatttggatccctacctgcttgggattccagttgc

SEQ ID NO: 22090 - DNA, 3947 bp, Oryza sativa
  ref <308>: DATABASE ACCESSION NUMBER: AK072294
  ref <309>: DATABASE ENTRY DATE: 2001-12-06
gtttgcgtaggtctcgtttttcttgtcctaattccccaatccatctcaggatctctaccgatccatggcgatgtcctcctcctccttccccaccgccaccgccaccgccaccgcctccttccccaactgggtgatgctggagcgatttgtcttccgcagagacgacgacaagtcattccccgacgacaccaaggctacactgagggcatccggttccggatcccacaagaccccctttaccatcgccttccgtatcgccgaccctccggcgatctcccgcctgtacgtgcagtggccacagggcccgaatccggaggagatggtggcaagccacctcgtggcgacccaccgcaacctcgttctcgtatgcttctgctacatcgtcgagtgccctgttccggcttgcccgcaggactacttcatcttcaccgcgtccggcgacgacccagtttcctcgccgctactcaaagccctccccccatgtacctaccagccaaaagggggggaacccctcccatgtacctaccagccagaaggcggcttccccccatctgatgttgagggcgacggcaacctgcggtatccattggagtttcgatccgtcggcatcttgtgccaaggcgaagagtttgccgtcgccgagctgcaggtcctcagaaacatcaatgctaatgtcaaagccagactgtgcgtgctccgctcggccatatcctccaaaggtgaagatggagatggaggcggccggtgggatatcatggagctgccaatcgtgtacggcagcggcgaagagtactgggacatcttctactggaccactgacactgtgatcgccttccaaaactacctctgctgggtggactacgaccgaggcatgctcttctgcgacgtactgcagaaaaggcctggaatcgccttcatccggtttcctctggacagcttccctaacggtagatctcgccgccatttctcccaggtgtaccgtggtgtgtctgtcacaccgagtgcgacggctctggcgccctcaagtttgctgatgtcaaccggctcgatagcaagttgttaggctccctagaaccaggacggggctataccatcacctgccacactttgaggacgttagggctggatgttggggccattgagtggagcaaagactttgcgatcacgtccaaggagatttggtccttcaagggccctgagctcgtgcctcatgaagttctcctgtttcttaccgtgagcatggagatgccgaatgtcatgcacttcctcacctgcgactatgagcacgtgatcaggaagatgtcggttgtgaccattgacctagccagcaagaccgtgttgtcagttattccatatgttaatgggcaggaggacctttccggtgaggatgccgacatggtcagggcaaagtcaagctatccccagtccttcctcccctctgagttttccaagtacttcaattcaatctaacatggaagaggaataaccaggaatgagcatttgtaggagctagcaggaagaggaagaaccagggatgagtgttctgaattagtggtttacaaagtgctaaatgtttactttcatgtatttatttcttgcgtcgctatgaacttgaatgtcacacttcggaactccttgtagtgcagtaccaactagaggcattttgtggatccatttacacctaatatgaaaaatggttaaatcatcgagcaactgtgttgcaaaatatatttctccgtaggtaagcaggggacaaaggatcgtttggctgtttcaaacatcgctactgctcgctgttcagcagcatcagcacgcttttaggcagcagctgcgtgcttttttgcaaaaaaaatcatgtatgaaagttgttttaaaaaaaatcatataattccattttacaagtttaaaataattatatatgattctgcttcttattgatttgagcaaatattattcgaatgggggaggaatgtctaccttagattcagctagccactgcacgaaagtggtttatatccattttgttttgcaaatagggaggttgtgtgattagagcttgatctcacatttcttttgttagagcaaaagcactacctaatttgttttgcaattttacctttggagattagcctggttggttttagaggattagccatggggattagtctctctttttgccgggatgaccgaaggaggtcacccaatgttattaagatagaggagaaaggattagtctctctaggtttagaggatcaaattgagggaatgatccatggggcaaccactactcgatagtgtataaaatttgttcactgatttgtttatttttgggtaactgtcagaaaaaagattgtattattgttgtttgattccacacagcatgtagcgcggcaagaatacatagtccctctgcttctccgtagtccttggctctcttgatgatttttcatgcatatgtatgctagatcatacagataaagctagttctgtatgttttgtttacttctgaagatggcttacttttgttcaatttttaacataataataaataatcttcagttttggttgtttagcataatagcatttcacttgaattcacttcagttcagttttgttcaatggagattaatagcatttaattttgtaaatttacatggatatatttgtctctcctacaaacactacttaactagttttgtctttgtatctttatatgattatatattttttttatgatttgccttcttgcaatctgcaattgcttgcacggcttgcatctcatggtttgcagaatatataccccacatttcagcttctctaaattttataggtcctgacatcttctctgaatttttatcttatatttttccttttgtactaatcataatatagaaacgaagttctaaagaatggtcgtcaattctaatttatggctttttaggtagttggtgaagtgtacctagttttgtcaattttgttagcaatgaagatactaataagacagttttgtttgctaccaattgtactttgttttgtgtaaatggacagtacctcctactgattaacctactaattatacttagttttgtgtaatttgttagcaagcctactaatagtaccctgttttattagaatgcattgtttgtaattttctcctttcactattctctttgttttggtcaccaaatttaattgatgtagttatgcaacatttttgtgttttttttaaagttgcaacgagaaggttgtgtgtcccatttgtagttttggtattttgcccgatggttgctttgtaggttagctcgacggttgcttgctggcctagtcatagtctagctgcaaacttcttgtcttttgagtactaaaagcacacttttgttcgttttgtgtgtaatatttaggagctgcattattttatccttttgtttattttgctttgttttgttttgtaagctaaaagtacttagttttgtcaccacactgttagctcatatattctaaaatgttcactaatatgttcaacttaattagttttgtaacctcctaaaatagttctattagttttgtaaccttctaaaatatgaattagtttttgtctggctgatcttcctttggttaggtactacaaagtcttaattcagacatatttcatctatattatttggtcaggctggcatttgaagttcttattttagtcttatactatagtttttttacatttgttaaagatgataatttatttgttagcactgagcatgtttagaaatctgaaatatgaaaacatgcatgttctcatgaaaataaatattagttttgtttaaattccaatccacatattttttaagcaatgtcagaaattaccatgcttcacttattgacctagtgtatgtatagtatttgatggatcatgttgatttggatttgctatactaacttgttcctattcc

SEQ ID NO: 22091 - DNA, 1871 bp, Oryza sativa
  ref <308>: DATABASE ACCESSION NUMBER: AK072295
  ref <309>: DATABASE ENTRY DATE: 2001-12-06
gcagcacaagcaagcagcttgaagcaacccaccacagcttccttcttcctctgcttcagcagagcaggggagcagaggagggagaggtcactcattcacaacctcatacagaaggaagaagaagaagaagagaagaagattcacacatacatctatagataaaatatatttatacatatagagaatactcagagagtagccaagagaggaggaagaagaagatggtgttggtggcgattggggtggttgtggcggcggcggtggtggtgagcagcctgctgctgcggtggaacgaggtgcggtacagccggaagcgcggcctgccgccggggacaatggggtggccgctcttcggcgagaccaccgagttcctcaagcagggacccagtttcatgaaggcccggaggctcaggtacgggagcgtgttcaggacgcacatcctggggtgcccgacggtggtgtgtatggaggcggagctgaaccggcgggcgctggccagcgaagggcgcgggttcgtcccgggctacccgcagtcgatgctggacatcctggggcggaacaacatcgccgccgtgcagggccccctccaccgcgccatgcgcggcgccatgctctccctcgtccgccccgccatgatccgctcctccctcctccccaagatcgacgccttcatgcgctcccacctcgccgcctggtcctcctcctcctcctccgccgtcgtcgacatccaggccaagaccaaggagatggccttgctatctgcactcaggcagattgccggcgtctccgctggcccactctctgacgctctcaaggcagagctctacacccttgtgcttggcaccatctccctgcccatcaaccttcctggaaccaactactaccaaggcttcaaggcaaggaagaagcttgttgcaatgctagagcagatgatcgcggaacggcgatcctccggtcaggtacacgacgacatgctggatgcgctcttgaccggtgtcgagggcaccagggagaagctcacagatgagcagatcattgacctgatcatcacccttatatactctggatatgaaaccatgtcgacgacctcgatgatggctgtcaagtacctgtcagaccatcccaaagctcttgagcaactcaggaaagaacattttgatatcaggaaaggtaaagcgcccgaagatgccatcgactggaatgatttcaagtccatgaccttcactcgagctgttatcttcgagacattaagattagctacagttgtgaatgggctgctgaggaaaactacccaagatgttgaaatgaatgggtatgttatcccaaaaggttggagaatatatgtttacacaagggaaataaattatgatccattcctgtaccctgatcccatgacattcaatccatggaggtggctggagaagaacatggaatcacatccacacttcatgctgtttggaggaggtagtcgaatgtgcccggggaaggaagtaggcaccgtagaaattgcaacattccttcactatttcgtgactcaatacagatgggaggaagaaggtaacaacacaatattgaagttcccccgagttgaagctcccaacgggttacatatccgcgttcaagattactgatcctggaacattttgcgaagttagataggaattcaaatcagatagaaaataagagtgcaattctgatgctgctgccctgatgacaggattagaacagccgtttggctcttgtaacatatgtccatgaaaataggaatattatagagataatataggcattataggaccattaggaagctaatgtagattgccatcagatgctcctgtattcttttggtccatcaattgttgaactaaaac

SEQ ID NO: 22092 - DNA, 1570 bp, Oryza sativa
  ref <308>: DATABASE ACCESSION NUMBER: AK072296
  ref <309>: DATABASE ENTRY DATE: 2001-12-06
ggtggccggcgagctcccgtccattccctcgtctctctggataggggatctggaaaatttgctgctctcttgatcgagcggtgaaactttctcaccattcatccatccggcgaaacttccactgatgaatcggacttcccaaacctttccacgctctcgctccaaatgaccaaaagccagaggaggagggtttcgcagcaacaacgtgggcgcccacggcccgcgcccggtcagcgaggaaacagatcgaaaaaaaacaaaagccgctgacgtcacgatctcgaggctcgcgattcccaacaatctctttaaaaagcttcctctcgccgaatccccctccacctccaccacccgccgccgccgccgccgccgccgccatggcctccgacctgcgcccgccggagcaccaggtggcggggcaccgcgcgtccgccgacaagctgggcccgctcgtcgacggcgaggggctcttctacaagcccctccagaccggggagcgcggggagcacgaggccgccttctacgccgcgttcaccgcgcacccggccgtcccgccccgggtccggggcgccttcttcccgcgcttccacggcacccgcttcctcccggccccagccagccccggcggcgcgccctacccgcacatcgtcctcgacgacctcctcgcgggcctcccgtccccctgcgtcgccgacgtcaagatcggcgcctgcacgtggccgccgcgatccccggacccctacgtcgccaagtgcctcgccaaggaccgcgagaccaccagcgcgctcctcggcttccgcgtctccggcgtccgggtggtcgatgcccggggcggcgccgtgtggcgcccggaccggtcggagctgaaggggatcgacgccgccggggtccgccgcgtgctccgccgctacgtgtccacgggcggcggcgacggcctggactgcgcgctcgccgccgcggtgtacggaggggagggcggcgtcctggctcagctgcgggagctcaaggcgtggttcgaggagcaaaccctgtaccacttctactcggcgtcgattctgttcggctacgacgccaatgcggcggcggcggctgctcccggaggtggaagcggcggtgtaagggtgaagctggtggacttcgcgcatgtcgacgatggggacggggtgattgaccacaacttcttgggcgggctctgctcgctcatcaagttcatcggcgacattgtcgccgaggttaccgagaaggcgtcttcagatcattcttgaaaattttgtcagcttggagatcagatgattaaacggtccaacattgtgttcttgcaaatgtcacacataataaagtgccatcaaatggagaaagagtcaattgtttgaaagaggaaacttcaccgagctgccggtaacgtaaatgcgaagcgactcaccggcagctctcccggcaaacttacggcaactgatacctttttttgcatacccccctttaaaaccatgggattcggggtgcattggatcttactctttagttgtattaaagaaatggtgaacaaaagatgggcgttgtcattccaccg

SEQ ID NO: 22093 - DNA, 1572 bp, Oryza sativa
  ref <308>: DATABASE ACCESSION NUMBER: AK072297
  ref <309>: DATABASE ENTRY DATE: 2001-12-06
gatccgtgtccatagaaattcctctatccttgattgattctttcttttattgtttttttttctcttcttcctcttggagggggaggagatttggggaataatcaacgtacattacccagtctcacactcccacgatcccgtcaagggccgccgcaatgcgcgtcctcgccgtggccctgctcgccgcggcggtgttggcggcggaggcggcggcggagctgcaggagtttcgggaggcgccggcgttccgcaacggcgcggggtgcgcgggcgcgccgacgatccacatcgccatgacgctggacaccacctacctccggggctccctcgccggcgtcctctccgtgctccgccacgccgcctgcccggagtccatcgccttccacttcgtcgcctcctcggcgtcccccgcgcgccgcctcgcggcgctccggcgggccctcgcggcggcgttccccacgctcccggcgaccgtccaccgcttcgacgcgcgccttgtccgcggcaagatctccacctccgtccgccgcgccctcgaccagcccctcaattacgcgcgcatctacctcgccgacctcctcccgcgctcggtgtcccgcgtcctctacctcgactccgacctcctcgtcgtcgacgacgtcgcccgcctctgggccaccgacctcggccccgacgccgccctcgccgcccccgagtattgccacgccaacttcacctcctacttcaccgacgcgttctggagtcaccccgagtactcctccatcttcaccaaccgggggcgcgcgccgtgctacttcaacaccggcgtcatggtcatcgacctggacaggtggcgagccggcgggtacaccgtgaagctggagtactggatggaggtccagaagcaggaggccaggatatacgagctggggtcgctcccgccgttcctcctggtgttcgccggcgaggtgaaggccgtggagcaccggtggaaccagcacgggctcggcggcgacaacgtcgcggggcagtgccgggagcttcaccctgggccggtgagcctgctgcactggagcggcaaggggaagccgtggcttcggctcgacgccggccggccgtgcccgctcgacgcgctctgggcgccgtacgacctgctccgccgccgcggcgctcgcgacgacctcctcgccgccgtcgcctgacaatgcggggcccacgtcgctggagcgatcggtttgttcgagttcggatcggtggcctcgctgctctcgacactcgtcgcgaggtaggtgtcggcgctggggcactgacactccggcccacttgggcctccacgaatgggccaacatggctgaggttggagtggccctgtcggtactgacagccgggcccacatgttggtgatggatggcaagattttgttcgtgaggggaagctgacgacgcagcaatggttgtgtacagctgtctttttttttttgcctgtttaagggaatagattaccagataattcagattccattcgttttagacagggttaaaaattcgttgttgatgtgttccataataaaatacgcaacaaaaaaatattgtc

SEQ ID NO: 22094 - DNA, 3490 bp, Oryza sativa
  ref <308>: DATABASE ACCESSION NUMBER: AK072298
  ref <309>: DATABASE ENTRY DATE: 2001-12-06
gtcaattaacgacccatgtagaaattagctaaggcagcttagctgccgtggtcgattttgatagtgttatctgtcacacgaatccgtggcgagctcatgaatgcaggtgaactgcgccgggatgtcgttcctgaagccggcggtggagctgacgccggacgattgctcgcaggtgatggggatgaacttcgagtcgtgcttccacttgagccagctggcgtaccctctcctcaaggcctctcagagaggttgtatcatcaacatctcgtccattgcttcggtggtcgcgttctgctctcttcccaacgccgtctactcagctgctaaaggtcaaaacaaacaacctttgctatcttggacatatttcaaaaatattttttatctaaaaagaatatataatggagtatgtagtagtataccagcatcacggtttttccatgataatttatatttagcattcgatatttgttccacaaagtgtttgcttgagaattgagactcgtttcctttgactaatggatgagtaattagagtccctttgatttgcatgaaaaacacataaaatttcgaggatttcaatcatatagaatttctttttgaaattcctatttaacgcacaatcgtatcgacattttggaggaaacatagcaagagttccatcctcttgaaaaattgcttgaatctatctctctcattcgattcatacgtttttcttgccgtctaatcaaacaacagttcctgtacgtgtttttcctgtattttatcattctctattttgtatttgcatttctatcggaatcttgtgatttttttattgcactatttttacatttttgcgattcaatgggaccctccatgggctccagttaactgaacgatatcactgtggcaccttagacatttctccacttaactgatttctataaaaatcgcttaatatcatgtttgtttaggaggtggaagagttttctagaaaacggatatagcactattaccagaatttgaaaatataaggggcattttgtctattagaacaaggctttgaccagcttgttaactattactagtatctcactagaaattgagcgtgccaattggtacgcttgttttatagctcttgcattcgtttttgtgttgttaaaaagtattatgtgtcttgcaaaaagacgacatcatcaaatttccatatcttaagctattaaattgtaaatatcatattaatatttttttaatgaaaacttagttgtattttaatttttatagatatgtagtttgggaaaacaatgttaaaatatgcgtaatggagtctgtgttgatttttaaaatgacattatgttaaatacaaagctaatataaattttgcaaagttttataagaatttagtccaattttattgaaacaaaaaaggtacatttgaatgaaaattttaatcaatttttaagttaaaatttagtttagcaaatcacattattacgaaaatccttaatttttcttttttttccacactatttagggtttctttatttatctaaaatcatagttgagttttctattgaatgataaaactggtgacgatattttatttaaaggtgttctaaattttgtttaaaggagctacgaaactcgtcattttctcatagtaccatatgaaaagctgcaaatctatagaatttgtgccataaactgtacacgcttatttaccatgatgtacacgggagtgctacctattcatcttctccaacaaccggctaatctctccgagggctgggcaatactccatattgtatcatgtatgtgcacgggagacatataattttcaagcaagcaggctctttaaatggacacgtggcagttttctggacatgtgttactaaatttttagtgtgccatgtggctcaataggaggccagatttttgaccctgaaatcggttatagaagatttatctgatgaaaaatatgaacataataaagtaaggtactcgtcagtacgaatgtaactagtacaaattgtactagtactaaatactaaccaaatggagaaagaaaaggttatacgaagaaaattacatcttatattttaaaacggatgactaataaacaacctcttccgaacttcttgggtgattttaaggatataacctgtgttagcggaaaagctgaaatctctcgctcacgcttggtgtctgcagactgcagctgcctgaattctgctggacgcgctacagtagttagaaacagaggaaacagaggaatgcaaggcagagtggagcgacgtaaggttttggcatgtgtaaccttgcagcttttttgtttttctcctttttttctctctctatgaactgggttataattacaagcaaaccatggccgcctgaaatgcaagatccaataacagctactcgtatgatctggtttcttgccggcaattgagaaaaaaaaaacggctactcaatgactggttgtctggttctatccttaattcccagccggccgtatgcaagcatgcaggatacaatctactacacaacgaaatactgaaagaaagctgctaaaaatagaagtgcacaagattagtaacccaaaatctatcaagctgaatatgcttgcaccacggtcagcctatctaaagtggattaattctaagacacggacacagatcctcagtagttactgcataatactaacaatagttgacacgtggatccatggggtgtgaggcacacctattagttgaggcttccgcatagcagtaaccacaggcaattaccttcactacacatgaggcaatatactaaggttatctttggaaaacgtagattttatagaagtttaacaatttccatgggaggccgaacacaactcttatttgacctttctcatgttttgacgacaagttgtgctctttgtgatattaggagcaatgaaccaagtcacaaggaacctggctgctgagtgggcgaacgatgggatcagagttaactgtgttgcgccaggcttcattcgtactccgctcctatctgaattcgtggagggtaacgagttggggcgagcagagttcagccgtgttcccatgggccgtctcggtgaaccagaggacatcgcatcgctggtggcgtttctgtcaatgccagcgtcctcctatataaccggtcaggtcatatgcgccgacggcggtcgctgcctttcttgaagtggatggtcctgattcctgaaagatatactaattacctgctacgttgagagatatggaagaattaatggaatttgtctaccacgtgccaaccaggctaggattaatttatctgggaagagcacagattgctgggtgtgtcaaaatgatagaagttaccacatatattttaaataagtctgggaaattaggtagaatagtttgtcgggacgcgtctaatgtgggaattcccatggaacagaagatcgatctggtttctaagactaattaatcttataaaaatattgtgctggaacatt

SEQ ID NO: 22095 - DNA, 1918 bp, Oryza sativa
  ref <308>: DATABASE ACCESSION NUMBER: AK072299
  ref <309>: DATABASE ENTRY DATE: 2001-12-06
gaggagaattatccccacttccagagtccaaacctccccgtcaatggcgacggcgagctcgatccggccgccacgcgcggcgctagtcctcctcctgctcgcgctgtccttctccctcaccctcgccgcccacttcgagggctttggctccgacgacctccactccgcccacgccgacgcggcctcggcagacgacgaagacgacgaggggctcgacgtcgagctcccgccgccgccgcgcatctccctctccacttcaactccttcccctcccgtcaccaccaccaccaccaccacctccgctccaaaccctaaccccgatcccaacccgacgctgaccccgccgaaccccaccccgacgctcgatctctgggacgaggacgagttcgagggcatccctgtcccggaagcggcctcctccgacgaatcctccacgccggcggaagccgccccgtcagatcccgcggccgatgccgcggccgaggcggcgccagccccgccccggcggcccgcggagctgctccgcgcgtacaccgtcgagatcgcgtgcgtcagcttcctgatctgcttcctgctcaactacttcaccgggaagcggcagaacgaggcgatcgcgctcgcctgggccaccaggttcgccaccagggactccatcttcgacaagaacttcagcctcctcggcaccggcgacggcaaggacacgccgctcctgatgaaggaagggcaggacgtgttcaagttctacgcgagcgggaggcggtactgccaggggatgctcgccaccatggagatgcgcgcgcggcacgacctgctgtccaagctggtggagctggtgttccccaggaaggacaccatcacgttcgaggtggtgatgaacgaggaagccatggaccacgtcatgttggccgtggcgaggaagaaggcggccaagacgatgcagaaggaggagagggatctgcagaaatttgccggggttctgacctcggcacccgccgggaggagatgggttgcggatgagcttgcggtagtggccgagtcaaaggaggttgctggggatatgattactgaagccgtgctggaccaggtccttggtgacaaagcttttgagaaatttgggaaatggttcatctcacttcatttttcagatcaactggcaggctcttacaagaaagtcctttctttcaagtttgtactgccagatgcaagcaacatggctgagatgacaagattagttgctctcgtgccatactacattgatttggtggggcgttacaagctcagcaaccatgctcgttccaaaactgaagctgcaagaacaaaagcttcccaggaggctttcagggagcaacagggtctaaggcaggaagcccttcaaaggaagaaggctgagaagaaaaaacttatggaagaggcagaggccaaattgagcgccgaggcactccgcaagaaagaggaaaaagaaagggctcgtcagatgaagaagtccatgcccaaagttaaaatgctccgttcctagtaacatcaaagatatatcacagcactggctttagctattcagttgctgattagcttattgttgcctgccagactcttttatgttcttctgggccatcaacttttctttgccatggggggatacaagcgaaaggaaataggtgaagataatcttttgctgttgtttcagcttgtcgcttgttgggggattaatttgaaacgctgttttccttgtattaatatacgcaggctggaatggcgtcaagtttgatttgcccccacgatcgttcattttagttcatctgaatgttgttatgcagcagctcgtttgtaagagaactccatgacttgctgtgtaatgcgtttatagatacgctgccagaaactcaagactagatcacataatttgagttgatttatgagc

SEQ ID NO: 22096 - DNA, 1938 bp, Oryza sativa
  ref <308>: DATABASE ACCESSION NUMBER: AK099267
  ref <309>: DATABASE ENTRY DATE: 2002-08-28
gattccattccagtggtagaagatccgagatcgaggaggaggtgaggagaggagcaagaagaagaagaagaagaagaagaagaagatgggcatggagagcggagatgcccaactgccgctgctccaccaccaggcttccgcatccaatcagcactataccaagccccccttcaactggaaggctcctgctcttatcttggcctttgaattcttggagagcattgcctatgctggcatctccctcaacttggtcgtttatcttggaaccgtcctccatggaactaccgcctctaacgcagccaatgttgatacatggaacggaaccacttttcttacaccggtgcttggagccttcttggctgatacatactggggaaagtacaagaccattgccatctctacagttttctatcttattgggttgcttgtaattaccgcctctgctgtcatcccatcactacaacctgctccatgcaatgggagctcatgtcctcctgcaacagggtttcagtattttgtcttcttcaccgcgctctaccttatttcggttggcaccgggggtgtcaaatcagcattactcccctttggagctgaccagtacaacgattcaaacctcgaagagagtaaaaagaagcaatctttctttagcttgttcttcattgctatcaaccttggagtgttcatttcgggcactgtcgtcgtttggatacagcaaaatgttgcttggtctctcggattcggcatctcctcaatatgccttgttgttgccacagttgcctttttggcaggaacaccagtgtacaaggtccagcttcccagtggaagcccactcaagagtgttgtaatggtttttgttgcctcttttaagaagagaaaactggaggttcctgccgataacgcactcctgtatgaaggggatgatgctgatttaagcaatggacaatcagtcaaactagcacatactgatggtttcaggtggttagataaggcggcagtggtttttgaggaggtggaagagataaataaggatgagggtgggggtggagggtggctgcagtgttcggtaacgcaggtggaggaagtgaagattctgctgcggatgctgccgatatgggtgaccagcgtgctgtacgcggcttccttgggtcagacggccaccaccttcgtgcagcaggggaatgccatgaacaccaagatcggatccttctctgtcccggcggcatccctcaactccgccgaggtcatcttcatgatgatctgggtggtgttccaggacacggtggtcgtcccgatcgccaggcgctacaccgggaaccccgcggggctgacgcagctgcagcggatgggcgtggggcggttgctggcggtgccggcgctggcggtggcggccgtgctggagacgtggcggctgcgcagcgtcagggacggcggcaacctgagcatcgcgtggcagctgccgcagttcgtcatcctggcctgctccgacgtcttctgcggcatcgctcagctggaattcttctactcggaggcccccgtgtcgatgcggagcctctgctcggccttctccttcctggcgctctcgctgggctactacgtcaactccctcgtcgtctccatcgtcgccgtcgtcaccaccacctcgaacaagggctggctccccgccgacctcaacgacggccatctggactactatttctggctctggacggggatcagcgccatcaactttgtggtgtacgccgcctttgccaagaattataccgtcaagagactcgccgtcccgcactcgcactgatcgtctccctcatccacccaacactgccttgtattattccaatcaaccattcttgtattattattccacttgattcgttgagcatgtatataaaccaaataaaaaataaaccaaataaagggctgaatccatgcattaccttc

SEQ ID NO: 22097 - DNA, 1440 bp, Oryza sativa
  ref <308>: DATABASE ACCESSION NUMBER: AK099268
  ref <309>: DATABASE ENTRY DATE: 2002-08-28
ggcaattcccctcctccgcctcccctagtttcctctcctccccgaaacccccaattcgaatccggcggcgaattcgattggggatttcggcgtcctcgcctccgtgggattcctcggatcccgcctcggcttcccgtctcgatctgcgtctggagttttggagcagacgatttgagtttctggttcgatttggtttggtttggtttgggggcgatttggttcaaggcgcggatggcgtcttctccggtgtcgtactggtgctaccactgcagccgcttcgtgagggtgtcgccgtccacggtcgtctgcccggagtgcgacggcggcttcctggagcagttcccgcagccgccgccgcgcggcggcggcgggagcggccggcgcggggcgatgaacccggtgatcgtgctccggggagggtccctgtccgggttcgagctctactacgacgacggctccggcgacgggctgcggccgctgcccggcgacgtgtcgcacctcctcatggggtcgggcttccaccgcctgctcgaccagttctcccggctcgaggcggcggcgccgcggccgccggcgtcgaaggcggcggtggagtcgatgccgtcggtgacggttgccgggagcggggcgcactgcgcggtgtgccaggaggcgttcgagccgggcgcctccgcgcgggagatgccgtgcaagcacgtctaccaccaggactgcatcctgccctggctctccctccgcaactcatgccccgtctgccgccgcgagctaccggcggccgcggcccccgagtcggaggcagatgcgggactaaccatctggcgactcccacgcggtggattcgccgtcgggaggttcgccggtgggccaagggagcagcttccggttgcctacactgaactggatgggggcttcagtaacggcgtcgggccgaggcgggtaacgtggccggagggcgacggccatgtcgatggcggcgaaggtcggattcgccgtgtatttaggaatctgtttggttgttttggtcggagcagtcggccggagagttcatcatcgcagtcccgtagtggctgaacgcagttttctcggtaactcgatctcctattgatagtggtgaataagtaggatttagtataagaagggaacccagattataagttcttgggacttttgatgtaaatgaaaaccttgcgatttttttccactttgtcccgttttaagagtttatttagagatggccacgagcaaaatagcaaacaactggaaattagtttggaaagcaaattaggaggaagaagcacaggacttcatgaaaggaatgacagtgaatttattgggtaaatcaattgttgcaatgttgtagtcagagagaacaaagtgttgttcttacctctgtactgtttgtgtatatactggattgggccaagaagatttctgatttgc

SEQ ID NO: 22098 - DNA, 3088 bp, Oryza sativa
  ref <308>: DATABASE ACCESSION NUMBER: AK072300
  ref <309>: DATABASE ENTRY DATE: 2001-12-06
ggtacagtttgttctgtatgtgagctttggctctgattgttttcttgtacagtttgcttaaactctctccttcttaatatatactccggccggctttcgaaaaaaaatcttagcatctgctgaatgagaagagcagtctaagtgtctagtgctgttcagattcagctgcccagccgcaatccaaccggagttcatatcaagatgggaagttcagaattggaggaaaccaaggcagtcctgcacatggattgtgaaaagccaccagcaatatcttgggagaggacatttgatgatgaaggaaagaaggttgcaatgtttagcatgaccttgaatgacatgatggcaattgtgccgttgatgattaaaatgctgggactaaacctgaaagacaatgcaaaaggcctggcttcagtgtatgatccactgaagaaatggatggacaactgctaccgcggtgtacccctcggtgggattggtgcagggagcatagggagaagctacaggggatattttcagcagtttcagatattccccagtatatatgaagagaagcctatcctagcaaatcaattttcagcattcatttcgcgccctgacggaaagagatactcgacagtgttgtcggcaccgaatgccgatgtcctcaagggaatcgataaagctggcattggatcctgggactggaagctgaaagagaagaattgcacttaccatggcttgttcccaagatcatggacagtatacaatggtgaacctgaccctgaaattaaaataacttgccgtcagatatcaccgttcattcctcacaactacaaggagagcagcttccctgttgcagttttcacttttacgttacacaattctggaagcacacctgcagatgtaacactgctcttcacatgggcaaattcggttggagggaaatctgaactgaccgggaatcataagaactccagaatgacgacggcggatgggcgccctccggtgacgttcgcgatcgcgtcgcgggagaccgacggcgtccgcgtcaccggctgcccgcgcttcacgatgggaccatccaactccggcgatgtcacggcgaaggacatgtgggatcagatcaacaagaatggttcgttcgtcggggacggcaatgcggcggcggcggcgacgggagcgtcgaggcccgggtcgtccatcggagcggcggtggcggcgacgacgacggtggcggcgggtggcgcgcgcgcggtgtcgttcgcgctgtcgtggtcgtgccccgaggtgaagttcccggcggggagaacctaccacaggaggtacaccaagttccatggcaccgatcgcgacgcggctgctgagcgcctggcccacgatgctcttcttgaacacatgaaatgggagtcccagatcgaggagtggcagaggcctattctgcaggacaagagcctacctgaatggtatccaattacactgttcaacgagctctactacctcaacgctggaggcaccatttggacagatgggcagcctccgaagaacaccagcctttcgtcagcgactgagccgttcaacctcgacacgttcagtacagtcgccaacggcggcagcgcggtcgacggcattttgagcacggtggcggtggcggcggcgcggtcgaacacggcggcggcggcggcggcggcgatgggcacggcgctgctgcgcgacggcgaggagaacgtggggcaggtgctgtacctggaggggatggagtacaacatgtggaacacctacgacgtccacttctacgcctccttcgccctcctctccctcttccccgagctcgagctcaacctccagcgcgacttcgtccgcggcgtcctcctccacgacccctgcctccgccgcacccttgacggcgccaccgtggcgcgcaaggtgttgggagcggtgccacatgacatggggctgaacgacccgtggttcgaggtgaacgcgtacatgctgcacgacccggtgaggtggaaggacctcaacccaaagttcgtgctgcaggtgtaccgcgacgtggtggcgacggggaacgccggcttcgcggaggcggcgtggccggcggtgtacctggccatggcgtacatggaccagttcgaccgcgacggcgacgggatggtcgagaacgagggccgccccgaccagacctacgacctgtggtcggtgtccggcgtcagcgcctacaccggcggcctctgggtggcggcgctccaggccgccgcggccatggcgggcatcgtcggcgacggcgccgccgaggcctacttccgggggaggtaccaccgcgccaggcgcgtgtacacagacgagctctggaacggcggctacttcaactacgacaacagcggcggcgccaccagctcgtcgatccaggccgaccagctcgccggtcagtggtacgcgcgggcgtgcgggctggagccgatcgtggacggcgacaaggcgcggcgagcgctggcgacggtgctcgactacaacgtcatgcgggtgaagggcggcgccatcggcgccgtcaacgggatgcggccggacggcgccgtggacgcgtcgtcgacgcagtccaaggaggtgtggcccggggtgacgtacgccgtcgccgccgcgatgatccacgaggggatgccggaggcggcgttcaagacggccaagggcatccacgacgccggctggggcaagcacggcttcggctacgcgttccagacgccggagtcgtggacggccgacggcggctaccgggcgctgcactacatgcgcccgctcggcgtctgggcgatgcagtgggcgctgtcgccgccggtgctccacaaggagcacagggtggcggcggtggcggcctcgccggaggacgccgcactggggcaggagaagttcgacaaggtagcgagcatgctgaggctgcctgaggagcagcagcacaaggggatccttcgggcgctctatgatactcttcgccaattgctgctcccatcatgatcatgagtcatcatgatcatgagtcataacaactgatgtaagattatcattgcaattgaattacaactggaatacgctttggttccagatttaattagtt

SEQ ID NO: 22099 - DNA, 1385 bp, Oryza sativa
  ref <308>: DATABASE ACCESSION NUMBER: AK099269
  ref <309>: DATABASE ENTRY DATE: 2002-08-28
tgaaccaatccaattccgaacaagcaaggcaccaaatccccccaccatggatcaccgcctcctcctcctcggcctcctcctcctctccccggcggtggccgccgcctcagtccccggcgaggaggagccgctgatccggcaggtggtcggcggcggcgacgacaacgagctggagctgaacgcggagcgccacttcgccagcttcgtccagaggttcgggaagtcctaccgtgacgccgacgagcacgcgtaccggctctccgtgttcaaggccaacctccgccgcgcgcgccgccaccagctgctcgacccctccgcggagcacggcgtcaccaagttctccgacctcaccccggccgagttccgccgggcctacctcggcctccgcacgtcgcgccgcgccttcctgcgggggctcggcgggtccgcccacgaggcgcccgtcctccccaccgacggcctccccgacgacttcgactggagagaccacggcgccgtcggccccgtcaagaaccagggatcgtgcgggtcgtgctggtcgttcagcgcgtcgggggcgctagagggagcgaactacctggcgacgggcaagatggacgtgctctccgagcagcagatggtcgattgcgaccatgagtgtgattcatcagaacctgattcatgtgatgctggatgcaatggtggattgatgactaacgccttcagctatcttttgaaatccggtggccttgagagtgagaaggattacccctacactgggagggatggcacctgcaaatttgacaagtcgaagattgttacttcagttcagaacttcagtgttgtctctgtcgatgaggatcagattgctgccaaccttgtcaaacatgggccacttgcaattggcatcaatgctgcgtacatgcaaacatacattggtggtgtttcgtgcccgtacatctgtggcaggcaccttgatcacggtgttcttctcgttggctacggcgcatctggttttgctccaatccgcctaaaggataaggcctactggatcatcaagaactcctggggcgagaactggggagagcatgggtactacaagatctgcaggggctccaacgtccgcaacaaatgtggcgtggattctatggtctccaccgtgtctgccatccacacctcaaaggagtagattctgatcagtagtcccccgaccatcctgtggatggttcacagttggtgattctgatattatatataagctagaactacgaaatatacttagtttatgctccatctgcgctgttattgcagttatgataagcagcgatgatgtgaagctgcaactgaatgtttgtcctaagttatatgcttggtttgctacgcaatgctacacgctatttggaggt

SEQ ID NO: 22100 - DNA, 3623 bp, Oryza sativa
  ref <308>: DATABASE ACCESSION NUMBER: AK072301
  ref <309>: DATABASE ENTRY DATE: 2001-12-06
ggttcttctcttccctccgccaattccaggcagttctagcaaaaaggtgcctcggatgaatcgggggctccagtagggagaggagatgatcactcgagcgaagctggtggagcagctgagagagcaccagatccggtcggcgcagtcctactccgccgccctcgccgtcttctcgcccagccctcacatcgcctccaggtaaaggtccctcatcttcttgttcctgctaagatctgatgcgacgctgctacaaacatgatgcggttagggcttttagttggattgccctgattttggtggtctccctagattcagtgtaatgatcaaaatcagattcgtctccctagattcagtgtaatggtctccctagattggcttattctttgttttgcttccttgatcatatgggtattggatgatctgtgtgaatagtggcagtattttgttttttggttaatttctggttgtagcagtgcacaacaagaagggattttagtctcctttatttgggactaagtatgtgatatggtttgagtaggtagaaattcacagtatgatattaataacttcatgactaattattagctgtgcactcaattgacggcgcaatgtcttgtgaaaattagaatttcgaggtctctactaagagatcttttttgacttttgtttgagactaggattgttaaaaagctcggccatacaatatctattcgatggcaaggtgttggatatatgatctgaaggggctctaagataaggccctcttctgtttgtatgtgggtgctactcagcaatagtcaagacaatagcatagctgttgtgttttattagtatatttggataaaacaacttaattatgcaacttttcatctattcccatgatcatagtcaacggagtactagaacaaacaactgcattcatgaataatgatgcaagctatggtgtcttcacttttgtcagtagctgaatacaacaatttgtgaaggaactaaggaaaagaaaggggaactgaatactgtcagctagttgtagtttcctatacctgagcaaaactcatgcctgcagtgcatcgagactgtttcatttaagcaacctggtgttggtccaggtttgacaaaattacccaaagcaatagtgtttggttgctaacaggcctcacacttagtcacttaagaacctgtcctatccctaaacctggtcaagccctgccaacttgccaagcccacctaccttggccaggccaacctcagtttgctcaagtttaatttttacaacttatccagttatccctagactcaggaatatgcctagcaagtggcaagcactgcataagtttagcactttatccattatatgcactgcagtgtaatggagaggtggctaagatgatatgggatgtcctcatgtccatgtatgtaacccatgttttaagtttgttgatcacaccaattcatggcttgccatttcatgcttcaagagacttggattgtctgcatggcatggcgtgccagttggaaggcttatatgacagccaatggctaattgatggattaataaagtgaatctcattgtctgtttagggcctgtccgaaaataaattatagttgaaggagctaagcaggaataaataggtcactacaactgatgcgaatagacaggcttggtccagttggtacttagtagtaacatttctattaaagaaaagattggccatttatttttttctgtttttttgtttgttctattttttggtttagttttcattggctaaaccatcatatttctttagtactacaaaaagaacgactcacgattttccaaagttcaacatcaagtccatcacttgagttgtggccttacaaacaatataccataagataaacctgcgaccttgaagaacctttaaaaaatggtgctttgtgttagggtttaggacttatgatgaaaagttcatagtagagatagtatgtttatgtttataattttgaacagagtcttttttacccactatttgttacatctattatctattatgccagaaacttgcttttatttatcttgcaagatgggcagcttccctttctcatacgaagaggcagtcatgaaaatgttgcagtgaatatttgaatttagctgtaatgctttatacatgcttctgcataaatgtgtatataaaatatagtggatgccagacttataggagcaagcgaatgttgctttaaactgttttcacgaacactttactgtgtagtctacagtgttctgtaaacgggtctactaggctgtttattaggctacataaagggaactgatgctcataactgtcgggttgccagtgagactacagtccagctaagccatattaacactactaggtaggtgaccaatacgaggaaggtgactgaatgaaaaccggttactgatttttagaaactaggcaatctactttgttgtgtactctgttttctgattatatgtatttacttaatgttgtctaagcaaaacctattggccagtgaatcatcttatattttccatgcagcattgctgtcattttatacatgactgatgacacttgtggtactgaattaaggcttgtaactgtcttcaaaatatttagttgtagtgctaacataaactatgctttgtgttggacccctacaaacctattttgtttgattccctacagtctgcatccaaagtaattgtaactattgaaactaaaagacaaattgataatgaatgccttcgattttcattgcaacagaggattttcattctatcatagaattcactatcctgaattgtactacttccgccccgtaatataagggattttggagacttatattatgggacggagggagtattatattaggcaattttgtgacatacttagcttgtgctggagtgaataaaggaaacatcgagtttatagtgaacacaatgtgctcatttttccaattgaatgcgatagtcctgaaattgttcataccctttctcagagttaagaactagcaaactgaatgtagcatggttaatgcaaatgagctcttagtatttgcaatctggaaatccttgttgattttttaaagtctaaactactatatagaaagtatcttgcttgtctataatgaaactgatagaggaaatactatagcttgtgaaaatgagctttaggtaggtattcgcaactggaattcctaggtgattttcatttcggtaggccggtagcacaatatataatctgttggttgttgctatcctgcttctgcttctgttttgacttctgaggcctttgttattgctcttaaatccatgatcctttatgttgcaggcgggatctcaaggttgctctcttctatgctatcttgttttgttttgtcatggtgtcctgctatgttgccctttacttgagatggttcagactttcagccatctttgtagttttcggaattctccttccagtaggtctcaaaatatctaggcatagaaggctgaagaggaaaagagaaaggagattgttgttacctttgtccatgtgaatatatttttgatatcttgtaacattgtagtaaaaccgcgcaactgcaaataggaaattgcctgctttacttaattt

SEQ ID NO: 22101 - DNA, 1993 bp, Oryza sativa
  ref <308>: DATABASE ACCESSION NUMBER: AK072302
  ref <309>: DATABASE ENTRY DATE: 2001-12-06
ttggagagagagagagaaaccaccccaaaattagcgaggcgaggaggaggaggcggaggaggggagccgcaggaatggcggcgatgcagagctggcgcaaggcgtacggcgcgctcaaggactccaccaccgtcagcctcgccaacctcaactccgacttcaaggatctggatgtggcgatcgtgaaggcgactaaccacgtggagtgccctcccaaggagcgccacctgcgcaagattgttgccgcgacgtccatcgctcggcctcgggcagacgtcgcctattgtatccacgcgctttcccgccggcttgcaaaaacacgcaattggattgtagccttgaaaacacttgtagtgatccatagacttcttcgagagggtgaccctacttttcgagaagagcttcttaattttgcacagagggggcgtattttgcagctctcaaacttcaaggatgactccagtccaattgcttgggactgttctgcatgggttcgtacatatggtctgtttctggaggaaagattggaatgcttcagggtcctcaagtatgacgttgaagctgaacgtttgtccaaacaaggtcaaggtcctgaaaaggggcacagcagaaccagagaattggagtcccaggatctgttagagcagttgccagctttgcagcagttactatatcgacttgttggatgtcggccggaaggagctgcaaataataactacttggtgcaatatgctctagctttggtgctaaaagagagcttcaaaatatattgtgcaataaacgatgggattattaaccttgttgataagttttttgagatgccaagacatgaagcactcaaagcccttgaaatttacaggagggcaggccaacaggctgggagcctatctgacttctatgaaaattgccggggtctagaacttgctaggaatttccaatttcccactctgagggagccgccacaaacatttcttgtcactatggaagagtatgtgagggaggctccacgcatggttccagtgcgagaaccattggaattacctgagaggcttcttctgacatataaacctgaagaacaagaggaagattctgtgcctgatcctgtcgaagaggaaaaaccacctgttgaagaacctgttccagtaccacctgttactgaagctgcttcacctcctcctcctcccaagactaaggtggcagatactggtgatctactgggattaaatgatccgaaccctagtgtatcagcgatagaagagagcaacgctctggctttggccattgttccagcagatgctggtgcttcaacatccagcaccgctacatggcaagataaaggatttgatccaacagggtgggaactcgcccttgttaccactccaagtaacacgaattcatctgctgcagatagtcaactgggtggtgggtttgacaagctcatcttggaaagcctatatgaccagggggactacaggcagagacagcaacagcagttatatggttcttcagctcccaacccgttcatgtcaaatgatcctttcgtaatgtcgaaccaagttgctcctccaccatcggttcaaatggctgccatgtctcagcagcatcaacagataccaactatgatgcaagcgaatccctttggaccaccaatgcaaccgcagcatgtgggcatgggccctgcaacaaacccatttttggattctggttttggcccattcccaatggcgaacaacgggcatcagcaagccaacccatttggtggcacccaacttctgtaggttgcatagaagaagagcatatcgtgtcctagcaaatgcgattttcgtgtgattatattatgcattgtgcctggccttacttgtatgtcactcgtgtaattgattttgtgtattggcctcgccacacggggctggcaagcaacccttgtaaagaaattagtggcctgtgtagcatcagttatatgtcaataaatagtatgacatgattacaaacc

SEQ ID NO: 22102 - DNA, 3631 bp, Oryza sativa
  ref <308>: DATABASE ACCESSION NUMBER: AK072303
  ref <309>: DATABASE ENTRY DATE: 2001-12-06
gtaatttcttcttcgctttgctcgggcgaaaaaaaaaagagagaaaaaggtgggaaaaatataattcgtgaggcgccggaacacgtccacttcgtcggcggcgaccaccccggagcataccggcggcgagggggaggaggagaaagctccccgaggaggaagaaggccgaagctgcctcaggtcgccggaaccctaggattccccggcggaggtggaggcgcggagagggggcgtcctccagatgcggccgtccgggatttgaatggggggcagatctccggggcgaaggaggcttctagaagcgggctgagttgaaaacctagggttaggtttggtggggttggagctttcgtgcttggtaaccgggatgggtcggagctcgggaggtggaggaggacgaggaggaggggaaggggaggggtgtggggaggcggaaaccggcatcaccgattgctcgccggggatcatcgtgtgggtgcggcgacggaacgggtcatggtggccagggaggatactcgggcccgacgagctcccggcgtctcaggtaatgtcgccgaagacaggaactccggtcaagctcctcggccgtgaggacgcaagcgtcgattggtataaccttgagaaatcaaagcgtgtcaaggcattcaggtgtggagagtttgatgcttgtattgagaaggcattgacttctcgaggtactcctgtaaagagaagagaaaaatatgctcgcagagaagatgctattcttcatgctcttgaattggagagaaaacagcttgcatcaaaataccagaatcaaggcttcaggagtgatgacatctctagtgtcccttttgctgatatgaggagagagtttgataactcttctacagaatattactcaaggaacaatacacaaaaacctcagtttcctttaggaaactcagcaagtcaacagtgcaaagatctcagcagtactcgttacaaaagcaaaaagagtaaaaaaagaaaaggagatagctcaaatctccctgggaagacaaaagggcttgagcagaactttccgtatgctggttcaaaaagagacttttcagaatctcttgctttggaaggtgcagaaaatactctcagtaatcggaacaatggatcttctcatttaggacatatgcaagcaggaccaaatctaggaagtgatggaaaaaatacacccctcacaaagaaaatatcagaggaaagtgtttttgaagagtctcttgtcaaaaaacatgacagatgtcgaccacttgctcaagttgtgcagagtagtttgaaattgcctcattcctttcagcgtgatgatgattctggccctgttttaattgaagaagggaatgaccctctgactactatatatcaggcccaacagggctggtcgacatacatgcctaatgattctggagaaactaataaccatggagatatacctcctacacaaatcacttcaatgggagcacactttgagaccgaaggctacctcaagcagcctgattcgttttctgcagagcaaaaaatttcggagtttgctgagaagcaaagatctgattcttgtgagagggaatgttcagaaactgagacagaagatgatgctgaacttttgcaaagatatgctaagaggcaatccccggggtcagatgcatgcgatccttattccattcaggcttctaaaaagtcaaggcatgtggatggtgatgttgcggatgatatggtggccttctctactggtattcctcaacaaaatgtcttaaaggaggaggatggttcatctgagctaggtgtatcccagtggcatatgaaaggtaaacgcaaccaacgtagtgcgttgaagaggcctatgggtaagacagatggaaatatatcgttagacagatctaatagttcactgaaagggtcattgtatagggtcaacgaaagtaatccgaatatggagagtactggtgcatccagccatcagtattttggtcgaagtttttatcagacccaagagttggattatgattacgataatgcagatctaactaataaagctaggggccatgcagaagttagatattatggtaaagactaccccccatctttgacacctacaagggatcttgaacagagttacacttctttcaacaacactgaaacttattgcaagacttctccaccaaataagaatggagatcagatgtcttctcttggtaggaaagcatgcttggaaggagcttcattgtatcgacaaaattattcctcccaacttggttacatgggcccaatgctatttaatgttgacctgaatgtacaggctggctatcaaggggagcatgttccattggtttctttgatgagcagactgaatggcaaagcaatagttgggcatcctatccaaattgaaatacttgaagatggttcaactgaccaccttgttttggccagtgatgattttctggaacatagcacctctgcatcacctgcttggcgtacaggcagaaggactgctatgccaagaattccacgttctaattcaacacgggtgaccttggatgatggtgacgatgagggcctgtgggatatgaatccgccctttagtagatcctccacccccttcaatcagcagtttaggctttcaaaacgaagcaacaccagttttcggagcccattgtcacatagatctcaaaagaagccctctaattccaaaaaaggaagctcatcaagtcagaaagtcagagccctttcttccatttcaattggaaaaaggcatcacagagaaggtcgtcaagcaaagctgcacaatattttgggtgatttgatcaaaccagagggagcaattccacttgtcacgtgtgttcctgcaaaggtcgtcttcagtaggataatggaagctgttgggaggccatctctttctatcgctcaccgtgccagagtggctagtcctgccatacgggatgcacagcgttagcttgctatggttggcattgtttgatctggttcagactttgcaacttttatatgtacattctctggcattgctgtggcataatgttcatacatcaaacgtgctcatctctgactgcagtggatgacgtaaagattgagaaccattagttgtattccattccaaatgccatatcttgattaggcaatctgatggataccttctccggagaatagccaaccacctccctgaagtagcttgttcgcagagcaataagaatggtgaccactacttggattggctgtctcctgtactgtaaagtactaacttcagcattttataccatgtctgtttagttgaatttttacatacatagccaacaatcaataggttgtcatgtatattgctacacctatattcagatgtagtagttatttactgtttagaggaacctgtttcacctttatgttcagaagcacatatttaggtagttgatgtaacatatcagaacaggtacaccaaatgatgtaaacagtctatcttcgctgttaaccgtcgtatcacagtatatgtcaataaccagatttggtagttctgaaaacttctacagtgtgttatatatggcattctttgtgtcaagaacagatctaggattgtgatatacttcgcatacatcttcatacatttacattacc

SEQ ID NO: 22103 - DNA, 1639 bp, Oryza sativa
  ref <308>: DATABASE ACCESSION NUMBER: AK072304
  ref <309>: DATABASE ENTRY DATE: 2001-12-06
tccacgaacgaggagggggaggaggaggagcaggtggtgaacccgtgggaggtgtcggcggggaaaggcgggatcgactacgacaagctcgtcgaccagttcggctgccagcgcctcgacgacgcgctcgtcgcccgcgtcgcccgcctcaccgcccgcccccctcaccgcttcctccgccgcggcctcttcttcgcccaccgggatttgaacgagatactggatttgtacgagaagggggagaagttctacctctacacggggagggggccctcgtcggaggcgctgcacctcggccatctcatccccttcatgttcaccaaatatctgcaggatgctttcaaggtgcccctagtaatacagctaactgatgatgagaagttcttatggaagaatttgactgttgaggaaactaaaaggcttgcccgtgaaaatgcaaaagatatcattgcttgtggatttgatgtcgaaaggactttcattttctctgattttaattatgttggaggtgctttttatgaaaacatggttaaagttgccagatgtgtgacatataataaggttgttggaatatttggattcaccccagaggatcatataggaaaagtcagctttcctcctgtgcaagcggttccatcattcccttcttcatttccacatctcttctctgggaatgaccaactacggtgcttaatcccatgtgcaatagaccaggatccttatttcaggatgacccgggacgttgctccaagaattggttaccagaaaccatcattaattgaatcgagatttttccctgctcttcagggggagaacacaaaaatgtcggccagtgatccaaattctgcaatatatgtgacagatagtgctaaagaaataaagacaaaggtttgctttaagcattgtattttagtggaaaactactgcaattttatattttacctgaggccattcaaattttggtcttcaattaagtcaagcgtcctgtagccttatggttctgcttttcatgggcctgtcatttattttaccattttttccaggtgaacaaatatgcgttctcaggtggccgggactcaattgagctccatagaaaacttggagctaaccttgatgtggatgttccaatcaagtacctgaacttcttccttgaagatgacaatgagctcgagcacataaagaaggagtacaaggaaggaaggatgctgacgggtgaagtgaagcagcgccttgttgcagttctatccgaactggttgcgagacatcaaagagctagagcactagtgaccgaggagatggtcgatgtatttatggcggcgagacctcttcccaatatgtttggctgagtctgatgtcaaaaactgcctggagatatttgctactagctggataagatgtccgaagtgatctctagaatttggaagcagcattcgtgtgtttcatgacttatatttgtaggctggccactcgtaatatttggtggcacgcttgattttgcaaatcagttgaggataaatttatttatcttaaagcctgctccatcaatatagaaccaacgtctttttgtattgaatcagaaatgttacaacagttttgagcttaatcagaacaatcaagaaacaaacagctttgtcgtccg

SEQ ID NO: 22104 - DNA, 1527 bp, Oryza sativa
  ref <308>: DATABASE ACCESSION NUMBER: AK072305
  ref <309>: DATABASE ENTRY DATE: 2001-12-06
gatcatcagagcttgttcagactgtgtccctgttcttgctcagcttctaatccagggatacacagagatatcgcccttttttggcagtgattatctctctctctagcttggttgagagagaagaacagcagctcttgcttgcctccttactttcttcttggtgttcttggagagagagggagaggattagaggttgtgatagatgggtaattgctggtttagagggagcttaattgttaacagagtctcttctaatgcgaagccagagactcccaagatccagagcccatcggagagggaccggagcgacgagagcaagctgccatcgaacgccaaggaggtggaggcgatgcggttggactcgtcggcgcgcaacccgctcgtcgccttctccttcgaggagctcagggcggtcaccagcaacttccgccaggactccctcatcggcggcggcggcttcggccgcgtctacaagggcgccgtcgccgcctccgccgccggcgacggcgacggcgccgagccccagcccgtcgccgtcaaggtccacgacggcgacaacagcttccagggccaccgcgagtggctggcggaggtgatcttcctgggccatctgtcgcaccacaacctggtgaggctcgtcggatactgctgcgagggcgaccaccggctgctcgtctacgagtacatgccacgcggcagcgtcgagtcccacctcttctcccgggtgatggcgccgctgtcgtgggcgacgcggatgaagatcgcgctgggcgcggcgagggggctcgcgttcctccacgaggccgagaagcctgtcatctaccgcgacttcaagacctccaacatcctcctcgacgaggagttcaacgcgaagctgtcggacttcgggctggcgaaggacgggccggtgggggacaagtcgcacgtgtcgacgcggatcatgggcacctacggctacgcggcgccggagtacgtcatgaccggccacctcacggccatgagcgacgtctacagctacggcgtcgtcctcctcgagctcctcaccggccgcaagtcgctcgacaagtcccgccccccgcgggagcagacgctcgccgactgggcgctccccctcctcacccacaagcgcaaggtcatgtccatcgtcgacccccgcctctccgccgccgccgccgccgccggcgcaggcggcgagctgccggcgagggcggtgcacaaggcggcgatgctggcgtaccactgcctgaaccggaaccccaaggcgaggccgctcatgcgggacatcgtcgcgtcgctcgagccgctgcaggccgacgacgaggcgcgcgacgccgccggcgcctgagaagaagggagagggacgcagatgttgttgggattaattaattaaagctgtatcataatgaaaatcaaaagatttggtagtgcagcaagggggtaggtgtagtgattagcggttgagttgagctgagtgtacgaacgttgttaatgtgcagggaagatgattaattaattaattaattactt

SEQ ID NO: 22105 - DNA, 1475 bp, Oryza sativa
  ref <308>: DATABASE ACCESSION NUMBER: AK072306
  ref <309>: DATABASE ENTRY DATE: 2001-12-06
gaatggatcatccgagaaccgccgcattgcagctcggaccttcacctttagggagctcgctgcggccacaagcaacttcagggtcgattgcctgctcggtgagggcggttttggaagagtgtacaaaggctatttggagactgtcgaccaggttgtcgcaataaagcagctcgatcgcaacggactgcaaggcaacagggagtttcttgttgaagttcttatgctcagcatgctgcaccacccaaatcttgttaaccttattggatattgtgccgatggtgatcagaggcttttagtttatgagtatatgccattaggttctttggaagaccatcttcacgatcctccaccaggcaagtcacggcttgattggaatacaaggatgaagatagctgctggtgcagcgaagggtttggaatatttgcatgacaaagccaatcctccagtcatataccgagatttgaagtgttcaaatatcttgcttggggagggatatcacccaaaattgtctgactttggattggcaaagctcggcccaattggcgataaatcccatgtttccactagagtgatgggtacatatggatactgtgctcctgagtatgctatgactggccagctgactctcaagtcagatgtttatagttttggtgttgttctgttggagatcattacaggacgaagagctatcgacaacacccgagcagcaggggagcaaaatcttgttgcatgggcccggcccttgttcaaggacaggaggaagttcccccagatggcagatccagcgcttcatggtcagtatccatcgagaggattgtaccaggccttggctgttgctgcgatgtgtgtccaagagcaaccgaccatgagacccctgatcggggatgttgttacagctctcgcttaccttgcctcccagacttatgatccagaggcacatggcgtccatcacacgtcacgtttgatgtctcccggcacacaaggtgtatgagggatgcagacttaggctgaggaggtgctgtagaacagaaagcaggaattaaggcttcagaaagcctagaatattttttgctagatatggtacctgaggagatgttgctgacagtccatggagatgaccagcccagagattttgttcatagcaagagaaagagaatcatagagagaaatgagatggttcctggtttctgcaacatggaatggtgatagattgatttgttttctcatgatagggatggctgctgttgttgtacatgtgaatttctttctcgagtctgtatttacatcagtgtaggagtagcctgtagcgtagtacatttgggttcaaggaatttttgtcatctctttgttccctgtgggtgtgagtttcggttgcgtgctggagggttgtcagctgcagtttcagttgcctggtgatgttattgcgtatgcctcagacagtatgccatcacttactattgatgcggtttcttatc

SEQ ID NO: 22106 - DNA, 2010 bp, Oryza sativa
  ref <308>: DATABASE ACCESSION NUMBER: AK072307
  ref <309>: DATABASE ENTRY DATE: 2001-12-06
ggctcctctcactcctcactccatccactcgcatccccctcccctctcgccctctcccgcctcctcctccttctcctggcagcgatgcgctgacagcggcagcgatcgcaaggaggcagcggcagtggccccttctccagcggcggctacccccttctccttgcagcggtaccttctcccggtagcggtggcggctgcaaggagacagcggcggcggccgcaaggaggcagtggtggaggtccccttctcattgcagcggcggtggccccttcttctggggagcccatggagcttgttgaacttgctggtattgatcattgtcgccgccatgatctgcggcgagctatgtcgtcgtcgtcgtcgtcgtcgtggcgacgagaatggtggcgccacgaggctgcctccggggccatggcggctgccgttcgtcggcagcctgcaccacctcgcggtgatgaggccgcgcggggtggtggtgcaccgcgcgctggccgagctggcgcggcggcacgacgcccccgtcatgtacctccgcctcggcgagctccccgtcgtggtggcgtcgtcgccggaggccgcgcgcgaggtcctcaagacgcacgacgcggcgttcgccacccgcgccatgagcgtcacggtgagggagtccatcggcgacaaggtcggcatcctcttctccccctacggcaagaagtggcgccagctccgcggcatctgcaccctcgagctgctcagcgtgaagcgggtgcgctcgttccgccccatccgggaggagcaggtcgcccgcctcgtcgacgccatcgccgccgccgcggcgtcgtccacggcggaggcggcggcggtgaacatcagcaggcagatcaccgggccgatgacggacctggcgctgcgcgcaatcatgggggagtgcttccggtggcgggaggagttcctggagacgctggcggaggcgctcaagaagacgaccgggctcggcgtcgccgacatgttcccgtcgtcgcggctcctccgcgccgtcgggagcacggtgcgcgacgtgaagctgctgaacgccaagctgttcgagctggtggagtgcgccatcgagcagcatcgggagcagattagagcggctcacgacaacggcggcgacgacgacgacgcgcatggccatggcgacaaggagtgcttcctgaatactctgatgagaattcagaaggaaggtgatgatcttgatgacactcaccatggcaaccgtcaaagctgtcattcttgacatgtttgcaggtggaagtgaatcaacatcaacaacacttgaatgggccctgtcagagcttgtgaggaaccctcatgtgatgcaaaaggcacaagcagagatacgacatgctttgcaaggcaggactagggtaactgaagatgatttaattaatttaaagtacccaaagaacataatcaaggaaacactacggttacaccctgtagcacctctacttgtcccaaaagagtgtcaggagtcgtgtaaaatcctcggctatgatgttcctaagggaacaatcatgttcgtaaatgcatgggctatcggcagagaccctagatattggaacgatgcagaagtgtttatgccagagcgttttgagaaagttgcagttgatttcagaggcacaaactttgagttcaaaccatttggagcaggacggaggatgtgcccaggaataacatttgcaaatgcaacaatcgaaatggccctcactgctcttctataccacttcgattggcatctccctccaggtgtaacaccggatgggttggacatggaggaggaattcggcatgagcgtttcaaggaaaagggatctttatctacgaccgacactccatatgggacttgaaacaatatgatgaatacacgcgtgttgtcatggaaaatgttgataatagccgaatggtgtatgtacctagtagaaaaaaaatactttctgcaaattatagtacctatacttacaagatgtttgggaggtaggaactcctgtg

SEQ ID NO: 22107 - DNA, 2452 bp, Oryza sativa
  ref <308>: DATABASE ACCESSION NUMBER: AK072308
  ref <309>: DATABASE ENTRY DATE: 2001-12-06
gatcaaccgcctctctcattaattagcggaccatttctaattcacccctcgcatcttttcgaattttcgagagctcaaagcctcgaaccattcccttcttcctcgtcccaatccaagttccaaccatccagggcgggggttttcccgttaatccgcgcctctccgtgtcggattgaattgaagcggagagggggaggaggaggtggaggtggaggtggaggagggcggcgggtggcgatggcgatggcgaggctgacgccgaacggcgtggcggcggcgctggcgggggacacgaacctgaagccggtgctgcagatcgtcgagctgcggggcgtccaggtcaacggcgcgggcgtcacgcgcggggagaggttccgggcggtggtctccgacggcaccgccgcgtcctccgcgctcttcgccgcgcagctcagcgaccacgcccgatccggcgccctccgacgcggcagcattgtgcagctcagcgagtacgtcatcaacgaagtcggccccagaaggattattgtcattctgaacctggaagttcttgtttcggagtgtgagataattgggaatcctacagcgctttcagaaactggatctcctatcccaaatccgacaagagtagagcaatttaacggagcacctcaatatggtttgatggcagggaactcatcaaatacaaccacaaagcctagtgacaatgttccattgttccaaaattcgatggcaggaaactcctctaactttgccactaggcccagtgacaaagttccggtcttccaaccaacagtccagccatcttatcgccctgcacctaattacaaaaaccatggagcaatcatgaaaaatgaagcccctgctagaataatccccatatctgctttaaatccttatcaaggccgctgggctatcaaggctagagttactgccaagggagatatccgccgataccataatgctaaaggtgatgggaaagtattctcttttgacttgcttgattctgatgggggagagatacgggtgacatgcttcaatgctcttcttgatcgattctatgaagttgtggaagttggtaaggtctatgtggtatcaagaggaaacttgagacctgcacagaagaactataaccatcttaacaatgagtgggagattttattggagaatggatcaactgtggatctttgtcctgatgagaacagttccattcccacccagcggtttgacttcagaccgatcaatgaaattgaggatgcccagaacaatgctatccttgacatcataggtgttgttacatcggtcaatccttgcaccacaatacagaggaaaaatggcatggaaactcagaaaagaactatgaacctgaaggatatgtctggtcgaagtgttgaggtaaccatgtggggtgacttttgcaacagagaaggctcacagcttcaaggaatggttgaacgtgggatctttcctgtgctggctgtcaaagcaggaaaagtgagtgatttcagtggcaagtctgtcggcacaatttcttcaactcagctcttcatcaaccctgattctgctgaagctcatagtctcaggcaatggtttgatagtggaggaagagatgcttctactcagtccatatccagagatatcacgcctggagcatcaaggaatgagatccgaaagacagtagcacagatcaaggatgaaggtcttggaatgggggacaaacctgactggattacggtgaaagccaccgttatattcttcaagaatgagtccttcttctacacagcttgccctaacatgattggcgacaggcagtgcaataagaaggtgacaaagagtactaatggcaattggacctgtgacaaatgcgatagggagtttgaagagtgcgactacaggtatctcctgcagtttcagattcaagatcactcgggaacagcttgggtgacagcattccaggaggctgggcaggagttgcttggctgctcggcaacagagctcaacgcacttaaggagcgcgaggaccctcggtttgcagacaccatgctcaattgcttgtttcaggaatatctgctcaggctgaaggtcaaagaagaatcatacggcgatgagcgcaaagtgaagaacaccgcggtcaaagtggagaaggttgatccttcgggtgaaagtaaatttctgctggatttgatctccaagtcctcggcgctacattagcagactgtgctactctatcagctgctcgctcgtgcgtggtgaggtgagcgaggtgaggtgttgcagtgcccatagccctcgccctcctgctcgatttttgtgccggtactttaatattaacgccacttaatagtttatatccagattagtgctttaatagtttatatccagattagtgctgatatttccatttttgtgccggtactttaatattaacgccacttaatgtatcagcttttatacc

SEQ ID NO: 22108 - DNA, 1355 bp, Oryza sativa
  ref <308>: DATABASE ACCESSION NUMBER: AK099270
  ref <309>: DATABASE ENTRY DATE: 2002-08-28
gatatagtcctaaccaacagtcaggaacagcaacaaaagtaagccaagaatctctctgcctcccaccaacaaccacacacactcacagctttggtcatggaggtcacccccaaccacacgcagaccgtctccggctgggccgccatggacgagtccggcaagatcgtgcccttcgtcttcaagagaagggagaacggggtggacgacgtgacgatcaaggtgaagtactgcgggatgtgccacacggacctgcacttcatccacaacgactgggggatcaccatgtacccggtggtgccggggcacgagatcaccggcgtggtgaccaaggtgggcaccaacgtggccgggttcaaggtgggcgaccgcgtgggcgtggggtgcatcgcggcgtcgtgcctcgactgcgagcactgccggcggtcggaggagaactactgcgacaaggtggcgctcacctacaacggcatcttctgggacggcagcatcacctacggcggctactccggcatgctggtggcgcacaagcggttcgtcgtgcggatcccggacaccctcccgctggacgccgcggcgccgctgctgtgcgcgggcatcacggtgtacagccccatgaagcagcacggcatgctgcaggccgacgcggccggccggcggctcggcgtggtcggcctcggcggcctcggccacgtcgccgtcaagttcggcaaggcgttcggcctccacgtcaccgtcatcagcacgtctccggccaaggagcgcgaggccagggagaacctcaaggccgacaacttcgtcgtcagcaccgaccagaagcagatgcaggctatgacgaggagccttgactacatcattgacacggtcgcggcgacgcactctctgggtccgatcctggagctgctcaaggtcaacggcaagctggtgctcgtgggcgcgccggagaagcccgtcgagctcccttccttccctctcatcttcggtaagaggacggtgagtgggagcatgacgggtgggatgaaggagacgcaggagatgatggacatttgcggggagcacaacatcacctgcgacatcgagatcgtgtccacggacaggatcaacgatgcgctcgccaggttggcgcgcaacgacgtccgctaccgcttcgtcatcaacgttgggggcgactccaagctctagactcatgctactatcatattgctacctagtaccaacctccatgcctttcttaatttaatttattggaggctctgcacgcagaatgggacagttcgagctgtcgttttctcgttggccacgtgaagtaactgtacgcactttgtacttattcgagaaatgatcagtgataaatcacc

SEQ ID NO: 22109 - DNA, 3151 bp, Oryza sativa
  ref <308>: DATABASE ACCESSION NUMBER: AK072309
  ref <309>: DATABASE ENTRY DATE: 2001-12-06
gtatgtactccctacaaagagaccaccaccaatccggctaccccatcccccctcctctttctctcctcttctcctctccacaaaaacatttctactgcttgctcgtctagtattccccacctccctttccttgccttcctcgctgcctcctcctcttcctcctccgtctccgctagggtttccgcgccgccgccgccccgatccgagatgccgccggccgccatggctccccctcccccgccgcagggctcctccacaggggatccgctctacgacgagctgtggcacgcctgcgcggggccgctcgtcaccgtgccgcgggtgggcgacctcgtcttctacttcccgcaggggcacatcgagcaggtggaggcgtccatgaaccaggttgccgacagccagatgcgcctctacgatctgccctccaagctgctttgccgtgtcctcaacgtcgagctcaaggcggagcaagacaccgacgaggtctacgcgcaggtcatgctcatgccggagcccgagcaaaatgagatggcggtggagaagacgactcctacgtccggccctgtgcaggcaaggccgccggtgaggtccttctgcaagacgctcaccgcgtctgacaccagcacgcacggcggcttctctgtactccgccgccacgctgatgagtgcctccctcccctggatatgacccagtcgccacccacacaggagctcgtggccaaggatctgcacagcatggactggcgcttccgtcacatctttcgcgggcaaccgaggaggcatctccttcagagtggttggagtgtgtttgtcagttccaaaaggcttgttgctggggatgctttcattttcctcagaggagagaatggtgaactccgtgttggtgttagacgagctatgaggcagctgtccaatgtgccttcttcagtcatatctagccaaagcatgcacctgggagtccttgctactgcatggcatgctatcaacacgaagagtatgttcaccgtctactacaaacctaggacgagcccttcagagttcattataccatatgatcagtatatggagtccgtcaaaaacaattactctgttgggatgaggttcaggatgaggtttgaaggagaagaggcaccagagcagaggtttactggtactataattggcagtgagaatctcgacccagtgtggcctgaatcaagttggagatccctgaaggtgcggtgggatgaaccatcaactattccgcggccagatagagtctctccttggaaaatagagcctgcttcatcacctcctgttaacccccttcctctttctagggttaaaagacctaggccaaatgctcctccagcatctcctgaatctcctattcttacgaaagaagctgctactaaggttgacactgatcctgctcaagcacaacgaagtcaaaacagtacggtcttgcaaggtcaagaacaaatgaccttgaggagcaaccttactgagagtaatgactctgatgtcactgctcataagccaatgatgtggtctccatccccaaatgctgcaaaagcccaccccttgacatttcagcagagaccccctatggataattggatgcagttgggaaggcgtgaaactgactttaaggatgtccgttctggctctcaatcttttggtgattccccaggcttctttatgcagaattttgatgaggctcctaaccgtcttacttctttcaagaaccagtttcaggatcaaggttctgctcggcacttctctgacccatactactatgtatctccacagccttccctaactgttgaatcaagcacacagatgcacacagacagtaaggagttacatttctggaatggccagagtactgtgtatggtaattcgagagaccgaccacagaatttcagattcgaacagaactaatcaagttggttaaatcagtcatttgcccgacctgaacagccaagagtgattagaccgcatgcatcaatagctccagttgagttggaaaaaacagaaggcagtgggtttaagatttttgggtttaaagttgatacaaccaatgctcctaacaatcacttgagctccccgatggctgcaacacatgagcctatgcttcaaactccatcatcattgaatcagttgcaacctgtacaaactgattgcattcctgaggtatcagtaagcacagctggaacggcgactgagaatgagaaaagcggtcagcaagctcaacagagttcaaaagatgttcaaagcaagactcaggttgcttcgacgaggagttgtacaaaggtccataagcaaggcgttgcacttggcagatctgtggatctttcaaagttcagtaactatgatgaactcaaagctgagctagacaagatgtttgaattcgatggtgaattggtgtcttcaaacaaaaactggcaaattgtttatactgataatgagggtgatatgatgcttgttggagacgacccatgggaagaattctgcagcattgtgcggaagatttatatttacaccaaggaggaggtccagaagatgaattcgaaatcaaatgccccaaggaaagatgactcttcagaaaatgagaaaggtcatctgccgatgcccaacaaatcagataactaggttcagtgaagcgagatgatacaagaggtagatcgcatggagtcttgagagagagatgccattctgcgggtcccagtcaagtaaaccccctgatgtgttggtgatcacccctgcccccccttttgcttatctgatggctgatgcaatgcaaaccctatggctttagctagtatgagatgtagactgcctattgtttatccttttgttcctttttcttctcttggcagaaagatttagggccaagatttatcattattgctattgcccctctcaactcctcccaactctctgatgtaaatatttatctacgtagccagccacccagccagaagtagagcagtagtagtagagttaccccctaccttgtattaaccagcagcctattcccccggataaatttgtgtaagctctgtagctcgagataaaaaaaaatggcgatcgaacgaacgaacaaatggcgtatgtattgtctgatctttgatataaatatttatcaatgaatgtatcatagatggat

SEQ ID NO: 22110 - DNA, 1094 bp, Oryza sativa
  ref <308>: DATABASE ACCESSION NUMBER: AK072310
  ref <309>: DATABASE ENTRY DATE: 2001-12-06
gaatctataaacaaacactcaagacaattaacacgacaaatcatggagagatcagccaccgtctttgtagcgctcaccttgctcgtcgccggcagcgtcgtcgtcgtcgtcgtcgtcgacgcctgcgacggcgtgccgaggatgtcggccgtggaggcgtgcaagcaggcgagcgtgggcccggccatgtcgcggacgtgcgccgagacgctgggaacctcggcggacgagcagggggcgacggacttcatggtggccgccgcgaacgccgcgacggagtcgtacaaggctggcaaggaggccgtcggcaaggtgctctccaacccgctggcgcccgacggcgagcggctgccgtgcctcgtgtgcgcgaacaagtacgacgacgcgtcgatgctcgtcgccagcaccgccgacgacgccaagcgctgcaagctgagcgccgacagcctccccgacctcgtcaccgccgtctctgccgtcgacgagtgcgccacgaagatgttcgaggagagcgggaacacgacgtcggtgtacgccacggccatcaccaatcgggattggaccgtgctcgttctgcgcctcgctacgttggttgtgccgcgccagcaactcagctagttctgccatgcatcaccaatcgtgcgattggattgctggtcgccctcccttgtccttcctcgttctaaggccgtgttttgtttccctcatattcccaactttccatcacatcaaaagctttcctacactcataaactttcaactttttttccaaactcccatttctttaaactttcaactttttttaggaactaaacacaccctaaatatggctgatatcaagcattaaaaactttagctatgaataaattttaaaatacttacgttagaaacgttgagaccatatgtatagaccaaatttttaatatatttgttgatgttttttatatattatattgtactagaaaagatgcccgtgtgttgcaacgggtgaagctattttaatcttattgttgttcaatgtgattcactatgagaattcgcttggatatttttttttctagaaattaatgtcaagttaacatttgagttttttt

SEQ ID NO: 22111 - DNA, 1369 bp, Oryza sativa
  ref <308>: DATABASE ACCESSION NUMBER: AK072311
  ref <309>: DATABASE ENTRY DATE: 2001-12-06
gtgcgataagccctaatcgtcgccaccccgcccgcctccatggcgaccgccacctccttcttccagccgctcacgacccccatcgccggcgccggcgccggcggtgccgcccggctccgtcgcgggaccctcgcactgcccttccccacccgcacgaggcctctccggcggccgacgcccctcctcgtcgcgcgggccaagcgccccggcagccggaccgcggcggcctcgaggcagcccgcgaaccccagcgacgtgccgaagcgggaggcggacgaggaggtggaggtggaggaggagatgccctggatccaggacaaggcgctggacctcgtggagttcaccggcaccgtcacgcaggccataccggggccccgcgtcggctccagccccgtgccgtggctcctcgccgtgccgcttgcctacgtaggcgtgtcgtttgtgctcgccgtcgtccgcaccgtccgcaggttcacctccccgcgcacccagaagaagcgaagggtgagcaagaatatttttttgctgaagtcactagatgagttgtttcagaagggcagggaggcagtggattttccagctctccaagaactaatggagaagacaggatttgacatggatgatgtagtaaggaagtacattcgatacacactgaatgaaaaaccattcaaccctgatgtagtcgtggatctcatacatcttaggaaagcgtcaatgttagaagatgctgaagttgctgaaattttgaatgagatttcaagacgaattgttcgggaaaaaggaccagtagtcatggacttagctgggtttacagaacaaggttttaagcgtaagcttgctgtgcaaacgttgttcggaaaaatcctgtacttatcagagctccccgagttctgctcacgcgatggctcactcgttgtcaaagaaattttcggagttacagatgaggatgcagacagcattaggattcacatactttctgaaaccagtgatattgagtcattagagaagatggtcgatgattctgaactggggcatggcccctcgcctttatcatgaagggcattaatggtaaaacataactgagcaccttggtggatagctggtgctgctctgagttttgagtcatcgaagaagagttccaggatactcagctggaagttttgtaaatcctattaggattataacttgtggcagtatctccaacctttctattattacttgagctggcaaaagtgttgtttaagagcctggtagttatgagttatacaaagcgagaatgctgattgaattaattatacatattttaagtttttgtttcgacttacattccttgtctcttctggaggaaatgaaccaagtttgtagattt

SEQ ID NO: 22112 - DNA, 1412 bp, Oryza sativa
  ref <308>: DATABASE ACCESSION NUMBER: AK099271
  ref <309>: DATABASE ENTRY DATE: 2002-08-28
gacatttcgtgatcgatcgattgatttcgtgttgtaatcttgcgtgatcgatcatggtgtgtcaattaatggcaagggcgtggtcatggagccccagcccggctcgccggagaccgccgagctgcccgcgcctatggtgctagagccgccgccgccgccgtcagatgaggcggcggcggaggaggaggaggccggcgttaagcctgataggcaatcatcttcatcgtcttcgtcgtcgtcgtcggaggaggagaaggaggtgtccaaggacgtcgcggtagagaccagcgtcgtcgtcccgtcggtggtcgccgcctcgccggacgatgaggccgccgccgtcgcttccggtgacggcggggacgttatcaaacacgacgatgaggccgtggtcagaccggacgattgggcatcgtggccgcagcagccggctcagaccgtcgacgacgtagcggcggcggcgacgacgacgccgcaggcggcgccggagatccagacgatgtcgctgcagccggcggcggtggcggggttcgatccggagaggatccccaagtccatcttccaggcgaagcccccggggtcgtcgtcgcaggcggagtggagcgtggcgtcgaacgagtcgctgttcagcatccaccacggcgcccggccgtccggcgacctctgcggcttctacgccggcgagagcaggtcgcatttcgactacttctacgacgaggccatggccggcgccgccggcgaccacacgtcggactggaagctggccaccgtcgccgaagggtcgcctggtggcagcgcgcggtcggacgccaccgacggcggcggcggcgcggccaagcaaaaggcggccatcgacttccgccgccacgagagcggctccgccggcagctcgagcaacttctccttcgccttccccatattggcggagacgacgacgtcgccgaggaagagggactacggcgggatgtaccatccgctgaagaaggaggcggagcagcagcaggcggcgtcgccggcgtcggcgttcgaggagatgacgccggaggaggagcggcggcggcggcggagctggtggtgctgctgctgcggcgagtgctgcggctgctgctggttcgcctgctcgtggtcgtcgtgctgctgctgctgccggtggcggtggtgcagccgctgcagctgcagctgcccaaccttctgccgccgcaactagtgcctctctgctcctgaccaagacatttttggcgggaaaagatgaagggaaaaaaccgagaccaactcggctaatcctgatacagccatagttaaattaattattgctaccagattaggcatcactgcatgagaggatcatatcatatgtatgcatgtgcagatgggtaaaaagatgaagatgatattgttcactgttgacaagg

SEQ ID NO: 22113 - DNA, 3215 bp, Oryza sativa
  ref <308>: DATABASE ACCESSION NUMBER: AK072312
  ref <309>: DATABASE ENTRY DATE: 2001-12-06
tgggagctttgagctttgctaatcttggggcgttgagggagcttgagctcgctgctaatggcggagagcgatggcggcgaggctagcccgagcggtggcggcggcggagaggggagccccgatccccggcggccaccggctcggccgcagctcaccaagtcgcgcaccatctccggctccgccgcgtccgcgttcgacagatggggcaccagcaacagcagcagcagcatcctagttcgccgctcctccacagcgccgctcccgccgggcgcggcgccgcgggggctgctcaccgtggccgtggacgagccctcctacgcggcgcccaacggcggggcggccatgctcgaccgcgactggtgctacccgtcgttcctcggcccgcacgcctcgcggccgcggccgccgcggtcgcagcagcagacgccgacgacgacggctgctgctgctgccgacagccggagccctacccccgccgcgccgccgcagacggcgtcggtctcgcagcgggaggaggagaagagcctcgcttccgtggtgaagcggccgatgctgctggatgagaggagatcgctctcgccgccgccgccgctgcagcgcgccccgcgatttgatctctccccgtatcttgtactaatgctggttgtaactgtcataagtttttccttggctatatggcagtggatgaaagctaccgtactccaggaaaagatcagatcatgctgtagtgttagtactgtggactgtaagacaactactgaggcgttcaagattaacggacagcatggttctgattttatcaactccgcggactggaatttagcttcctgcagcagaatgcttgtttttgcgatacctgtattcttggttaagtacattgatcagcttcgacgaaggaacacagattccattaggctaagaagcaccgaggaagaagtgcctctgaagaagaggattgcttataaggttgatgtgttcttctcaggacacccgtacgcaaagcttcttgcgctcctgttagccacaataatcctcattgcttctggcgggattgcgctttatgttgtcagcggcagtggattcctggaggctctttggctttcatggacttttgtggcagattcaggaaaccatgctgatcaggttggcctgggcccaaggattgtgtccgtgtcgattagctctgggggtatgctggtgtttgccacaatgcttgggcttgtgtcagatgcaatatcagagaaggtagattcctggcgcaagggaaaaagtgaggtgatagaggtcaaccatatactaatcctcggatggagcgacaagttgggctctctcctgaagcagctagctatagcaaacaagagtattggtggtggtgtcgttgttgttctggcagaaagagacaaggaagaaatggagatggacattgggaagctagagtttgactttatgggaacatctgtaatatgtagaagtggcagtcctctaattctagctgatttgaagaaggtttctgtttctaaagcacgtgctattattgttttagcatccgatgaaaatgcagaccaaagtgatgcacgggctttacgtgtggtcctgagcctgactggagttaaagagggtttaaggggacatgttgttgtagagatgagtgaccttgacaacgagcctttggtgaaactggttggaggtgaactaattgaaacagttgttgcccatgatgtgattggacgtttgatgatacaatgtgcactccaaccaggcctggcacagatatgggaggatattttggggtttgaaaacgcagagttctacattaaaagatggccagaattagatggcatgcgatttggggatgtcttaatctcatttcctgacgctgttccatgtggagtaaagattgcttcaaaagctggaaaaatcttaatgaatcctgataatgattatgttttgcaagaaggtgatgaggtccttgttatagcagaagatgacgatacttatgttcctgcctctctaccacaggtgcgaaagggttttctacctaatatcccaacccctcctaaatacccagagaaaattttgttctgcggttggcgacgtgacattcatgacatgataatggttctagaagcatttctcgctccaggttctgaattatggatgtttaacgaggtgccagagaaggagagggagagaaaactgactgacggtggtatggatatttatggactaacaaacattaaacttgtacataaagaagggaatgccgtcatcaggcggcacttagaaagtttgcctctggagacattcgattctattttaattcttgcagatgagtcagtggaggattccatcgtacattctgattcacgttctttagctacacttcttctaattcgcgacattcagtctaaacgtcttccatcaaaggaactaaaatcacctctgcgttacaatggcttctgtcacagctcctggattcgggagatgcagcacgcatcagataaatcaataattatcagtgaaattctggattccagaaccagaaaccttgtatctgtctccaaaatcagcgactatgttctatcaaatgaacttgtcagcatggcattagcaatggtagcagaggacaaacaaatcaacagagttcttgaagaactttttgccgaggagggcaacgagatgtgcatacgttcagctgagttttacctctatgagcaagaggaattgagtttctttgatataatggtcagggctcgtgaaagagacgaggttgtcattggctaccgccttgccaacgatgaccaggcaatcattaatccagaacagaagtctgagattaggaagtggtcgctagacgatgtttttgttgtgatctcaaaaggtgactaattttacaatagcacctcacttttttcgagttagtaagtatatattctaacactagtgctgctaaccaatgctaactgaaatgctttaagttgctaaccaggcaaacacacgtcacagtacagttctgatctcatatgttgctagctctgtacatgttgatttgccatctccatagcatttagttgatcttaacataaataattacacatcagcatttgaaactgttgttactaattgacattacaaaattttcagtgcgtcgattcagcagagataatttgtaaattgtaactactgtttcattttgaagagcatgctaatcattg

SEQ ID NO: 22114 - DNA, 2104 bp, Oryza sativa
  ref <308>: DATABASE ACCESSION NUMBER: AK072313
  ref <309>: DATABASE ENTRY DATE: 2001-12-06
gctccgcaccaccactccctcctcctccatctcctccgctcccgatctcacaaccaccgactcctcctcctcgcgcggcggcggcggcggcgtgagccagcagcagccatggtgctgttctcggtgacgaagaaggccaccacgcccttcgacggccagaagcccggcacctccggcctccgcaagaaggttactgtattccagcagcctcattacctccagaactttgtgcaatccacatttaatgcccttcctgccgacaaagtaaaaggtgcaaccattgttgtgtctggtgatggccgctatttctcgaaggatgctgttcagatcattacaaaaatggctgccgctaatggagtaagacgtgtttgggttggacaaaacagcctcatgtctactccagctgtatctgctgttatccgtgaaagagttggtgcagatggatcaaaggctactggtgccttcattttaacagctagtcacaaccctggtggtcctactgaggacttcggaatcaaatataacatggaaaatggtggacctgcccctgaatcggttactgataagatcttctctaatacaacgacaattactgaatatctcatcgcggaagaccttccagatgtcgatatttctgttgtaggtgtcactaccttcagtggacctgaaggcccttttgatgttgatgtttttgactctactatagattacataaagttaatgaagacaatctttgactttgagtcaattaaaaagcttctggcatctccgaagtttacattctgttatgatgctctccatggtgttgctgggacttacgcaacacgcatctttgtggaagagcttggtgctgctgaaagctcattgttgaactgtgttccgaaggaagactttggagggggccatccagatcctaacctcacctatgcaaaagaacttgttgaccggatgggccttggaaaatcctcaaatgctgaacccccagaatttggtgctgcagctgatggtgatgctgatcgcaacatgattctgggtaaaagattcttcgtaacaccttcagattcggttgccattattgcagccaatgctgttcagtcgattccttacttttcttctggccttaagggagttgccaggagcatgcccacatcagctgcccttgatgttgtcgctaagaatttgaatctcaagttctttgaggtgcctactgggtggaaattttttgggaacttgatggatgctggaatgtgctcaatttgtggtgaagaaagctttggcactggttctgatcacattcgtgagaaagatggtatttgggctgttctagcatggttatctattcttgctttcaagaacaaggacaaccttggaggcgataagcttgttactgttgaagatattgttcgccagcactggggtacttatggtcgccattattatacacgatatgactatgagaatgttgatgctggagctgctaaagaacttatggcaaaccttgtcagcatgcagtcgtccctttctgatgttaacaaattgatcaaggagattcggtcagatgtttctgatgtggttgccgcagatgagtttgagtataaggatcctgttgatggttctgtctccaagcatcagggtgtccggtacctcttcggagatggttcccggctggtgttccgcctctctggaactggctctgttggtgctactatccgtgtctacatcgagcagtatgagaaggattcttccaagaccggcagggattcgcaggatgcccttgctcctctggttgatgttgcactgaagctgtcaaagatgcaagagtacactggccgatctgctcccaccgtcatcacataaacttttcaagagccattctagaatgcttttgaggctacccatgaactttctttatggcctcctgtttgatagcctttttacatctctccccgaataaacgtgtatgtatcaactgttctcgttttcttgccaatactgcgtttctgctgcaggtccggtaaagtgtgcggcgataatgttgtcagttctgaaactgaagagggtactttatataagcgatatatcgatgttttttttgcttatctgt

SEQ ID NO: 22115 - DNA, 1859 bp, Oryza sativa
  ref <308>: DATABASE ACCESSION NUMBER: AK099272
  ref <309>: DATABASE ENTRY DATE: 2002-08-28
ggttgtattccccttccttacccccaaaatcgaaatccctaattcgacgccatggccgcgactggcggcgccgccggggagaagacggccagcagcctcctgctcggcgtccggggctacacgtccaccctcaagaacgcctccaccgccagctgcaggttgagcgccggccatcccatcgaggtgactttgtgggaggcgtccccgcctgccctctcccacttctccgtccactgccccgatctcccatccttcaatggcaatctgcttggcgcgcctaaagccatcgccgccgccgtcgacgacgccgacggccagctcctcctcctcctccgagtccccatcgatcagcttggtgccccgcatgacaacgactacttggtctaccatccggatcccccgtctccgaaactggatctgctccccaacccgcctccccctaccctcggtgaccaccagctcgccatactcagctgcggcgacgaccgctacgtcgtggccgccctccacgtctggagtgagttcacttccacgctgcgcctgtacagatcttcttgttcgtctgggagttggacatcggaggaggtgtccgtggaggagccggtgagggacaggctgtgcccgatcccggactcagccaagaggcagctgtaccacgtcaccaccaagaccatcacgctcggaggtgcgaagggcaccgtgggctgggttgatctctggcgcggcatcctcctctgcgacgtgctcgacgaaatgtctccaaggaagctccgcgacatgccgctgccgtggccggccaagggcaattggaggaggtacctcaatgaagatgtgtccttctgtcgggacatcgccatcagccaacacaagggttccatcaagtatctggagatggagatcgtttcgccaagaacggtgaccaccaccatacccacctccacctctgcagatcctacttcataccttgaatgggttcgccgcagcagagaacctcagccgacacggcgacgctccgtgttccaccctggttcgtggagaatcactacatggagcatgcctatcccggtcacttcatgggacgactggcgccgtgactgcactgctgaatcgcgtgaagtccatcttgacaccaacccaagtcaccattacgagttgcttcatagcctcatgctcagcaacagcagtgatgaacacagggaggaggctcaaggtcaaggggcaacctcttccttgtccctaggtcgcctgcgtttgtgttacccggccttgagttgcatcgatgatgatgttgtttacctcttgggcaacgctgctggcaggggtgctaagacgggaggaatgatggtcgctgttgacgtcaggaacaaggagctgcgaggagtggccaagcttgaccccgaaaagaacaccctctactccatgcgatgctaccttgcaactgggatctccaaacgcctcaacactaccacagacacaagagttggacgacctgaggaggatgcagaagccgccgagtagaatgtgcgaacccagtgacatatatgcatcatactgcagcctgcctggatgcaaatattatcgtatcagtggtttgttggcttgaatgggggttaaggagttgtgctgttgctgggcatatatagttttgtgacaagaatcttatccaggttgcttactttgggttgatgataaaagtaggagtagacgtgaataacattaatatatgttggcttattttttgaggggatgttggcttatttatgtggcactaattgtctttatgcctttgagttaaacacaaaacaatgatccaactctttgaacctgtttgtttcaagtaatgagttgatgaatttttc

SEQ ID NO: 22116 - DNA, 3042 bp, Oryza sativa
  ref <308>: DATABASE ACCESSION NUMBER: AK072314
  ref <309>: DATABASE ENTRY DATE: 2001-12-06
gagcgcggccaatggcgccacccgagtcaaccccctctcgcggcacaaacccacccaccccgcaatcgcaatgccatcgcgtcacgccgcctgccgctcccgcctcccccatgagatgacccctcccccgccgccgtcccatgtgctcgccaccgtcgatgcgacggcatccgctgctccctctcctcgccgccgtccttgtcggcgccgccgtccgcgccgggaagatcgccacggaggtggtcgtgccggacttcgtggcgtcgtacctgctgttcattgacacctacggcgtgttcctccagtccggcggcggcggcgcgttccaggccgtcgtgtacaacccggcggggcagcaggaccggtactacctcgccgtggtgcacgcgccgtccaagacctgcgtctgggtcgccaaccgcgacgcgcccatcaccgaccgcgccgcgccgctgcggctcacggcgagggggatctccgccgaggatcccaacgggaccgtcgtgtggtcgacgccggcgttcgcgtcccccgtggcggcgctccggctcgacgaatccggcaacctcgcgctgctcgatgggaggaaccgcacgctctggcagtcgttcgaccggcccaccgacgtgctcgtgtcgccgcagcggctccccgtcgggggcttcttggcgtcggccgtgtcggactcggactacacggtgggcggctaccggctcgacgtgacggcggccgatgcggcgctgacatggaacgggtcactgtactggctcctgtccatcgacgtcaaatccaccagagatcgcgacggcgccgtggcgtctatggcggtgaacggcaccggcctgtaccttctcgccgcggacgacaccgtcctcatccagctccccttgccggacgccaagctgcgtatcgtcaagctgggcgtggaagggaagctggtcatcacaagctacgcttcggcgaacgccacgtcgccgtcgccgacggacgctgggttcgtcgcgccgaacagcgggtgcgacctgccgctctcctgcggcgcgctcgggttctgcgcgcccaacgggaacgcctccagctgcacgtgcccgccgctgttcgcgtcgtcgcatgacggtggctgcacaccggccgacggctccaaggcgatgaccgtcgcctcctgcggcggcgccggtggtgatgccgccccgacctcgtacatcagtctcggcaatggtgtcgcgtactacgccaataggttctcacggccagacatggtcggctccaacgggtcgtcgtgccaagcactctgctccggcaactgctcctgcctcggttacttctacgacgagtcgtccttgtcttgcttcttggtgcagcaccagatcggctccctggttaacgccaactcgaggcgaggcgacatggtcggtttcatcaaggtccagagctcgcagtcaccggggtcgccgagcggttcatcttccaacaacagcacgctcatcgccatcctcctgccgacgatcgtcgcgttcgtgctcgtcgtcgtcgtcggcgccgtcatcgtcgtgtcgtggcgcaagcaagagcggcgcgcggggaggcgggcctcgcgatccagggacgtgcagctccggcgccaccgctcgccggcgtccgactcggcgcaccttgtctacggcaacgacgacgacggcaacgacattgtgatccctggactcccgacccggttcacgcacgaggagatcgaggacatgaccaacagcttccgcatcaagatcggcgccggcgggttcggcgccgtgtacaaaggcgagctccccgacagctccgccgtggccgtgaagaagatcgaaggcgtcgggatgcagggcaagcgcgagttctgcacggagatcgccgtcatcggcaacatccgccacgtcaacctcgtcagcctccgcggcttctgcgtcgagggccagcgccgcctgctcgtgtacgagtacatgaaccgcggctcgctcgaccggacgctgttccggccggccgccggccagccgctcgagtggaaggagaggatggaggtggcgatcggcgcggcgagggggctcgcgtacctccacttcggctgcgaccagaggatcatccactgcgacgtcaagccggagaacatcctcctcgccgacggcggccaggtgaagattgccgacttcgggctcgcgaagctcctcacgccggagcagtcggggctcttcacgacgatgcgcggcacccgcgggtacctcgcgccggagtggctcaccaacacggcgatcaccgaccgcaccgacgtgtacagcttcgggatggtgctcctcgagctcgtgcgcggccgcaagaaccgcagcgagcacgtgagcgacggcgccggcgccgccaccggagacgactccaactcctcgaacgggacgacgggcagctcgtcgcgcggcgcccggagcgattacttcccgctcatggcgctggaggggcacgaggcggggcagtacgccgcgctggccgacccgcggctggaggggaaggtggtcgccggcgaggtggagagggtggtaaaggtggggctctgctgcctccacgaggacccgcagctgcggccgagcatggcgatggtggccggcatgctcgagggcaccatggaactgtgggagccacgcgtgcagtcgctcgggttcctccggctctacggccgggggttcgccggaccggccgacggctcgggcggcagcggcggcggcatcaagcaagccatggcgggttccaatggggaccacacaaggtcggggacgacgacggtgacgacgatgagcgggtggccgtcgtacatgtcgtcgtcgcagctctccggtccaagatagggcggcgcacaccggcgagaagattgtgttgttagagatagattatacggttgcattgatcattttggttgatttgtaaacagagggattaatttgtgcattcgtgaggtctatacaaattttgtcctgttttcccatctgcttttctcaagaaaaatggaaggataagtgagtttttttttcc

SEQ ID NO: 22117 - DNA, 1727 bp, Oryza sativa
  ref <308>: DATABASE ACCESSION NUMBER: AK072315
  ref <309>: DATABASE ENTRY DATE: 2001-12-06
gagaaggcaggcaaaaggcacactcattcgcgggccgcacgtgcagcggcggcgcggcgcgggtggatcgccgacggcgagaggagcaatggtggcgcccggcggcggaggaggaggggcggcgtcgtggccgtcggagggggagcttgatgttgttcgagcaaaggtagtggagattagtggaaggggtgcaggagaggtcagggtggttgcttgcccctacaggatttgccctctgggggctcacatcgatcatcagggtggaactgtcacagctatgaccattaattatggtgtacttctcggttttgtggcctctgatgatgccgagatttcactccaatctggtcaattcgaaggtgtgatacgattcagagttgatgacttgcaaaagcccattgaaaacccagaaaacataaactgggagagctatgcaagaggtgctgtttatgccctgcaaaattttggatatgatctcaagaagggtattataggatatatttctggtgtgaaaggacttgacagttcagggctcagttcatctgcagcagtcgggattgcctatttgatggctttagaaaatgtgaatgatctggttgtatcaccagtggacaacattcagttggacaagtccatcgaaaataaatatttgggtcttgaaaatggtattctggatccatcagctattttgctctcacggtatggctatctcaccttcatggactgcaagaccgccacacattcctacgtctacttctcagtgttgagtaaaagtcagcaatgtcaaggagaactaccattcaagattttgttagccttttcagggctgcaacataacctaccgaagaagagtggatataatacgcgagtttttgagtgcaaagaggctgcccgtgctcttttatgtgcttcaggctgtgaagatgcatcaagtattcttcgtaatgttaacccagccatatacgaggctcagaagtgtatattagaagaaaatctcgctaggagagctgagcactacttctctgagatgaagcgagttgtcaagggaagagatgcgtgggctcgtggagatcttcgtgagtttggccagctgatctctgcatctggtcgcagctccatactgaactatgaatgcgggagcaaggagatgatccagctgtacgagatcctcctcaaggcacccggcgtcctcggcgcgcggttcagcggcgccggcttcagaggctgctgcctcgccgtcgtggagagcggccacgcggaggcggcggcggcgttcgtccgggccgagtacgagaaggcgcagccggagctggtgagcaagatcccgccgggccgccgcgtgctggtctgcgagcccggtgacggcgcccgcgtcatatagctcaccgcccaccgccgttctgccggtctcgccggagcagcctcgcattgccgtgcccggcgcgccgcgaaggcggtggcgtcgtggcgacgccggcgtgcaaggatggacggtggtcgcttgggcctcggcgcggcgagctcccccggtttacgcgtacggagcttggctagttccagttgagacttgagagtgggtgtaatggtaatggtataggtacgaactgtccgtgtgtatacgggtacagactacagagtgccagcttttgtccgtgtatgtgtagaaccaattgatgatcaatttttgataaatatctcagcaataagcagcgacgtagatatgtact

SEQ ID NO: 22118 - DNA, 1880 bp, Oryza sativa
  ref <308>: DATABASE ACCESSION NUMBER: AK072316
  ref <309>: DATABASE ENTRY DATE: 2001-12-06
gaagtaagctcgcatgagtgagctcaccatggaccaagaaatccaactgaaccagaggccatcgccgcagcgacagcaacaagcacaagaacatggcggcgccaccgcaccggcgccggcgccggcgacgccacaagatgatgaacagcaagggcaccaagcagctgtcgccaggcatggctgcggcggcgcgacagccgaacgccaccaccagaccaagctcacgctactcccgctcgtcttcttcatctacttcgaggtggccggcggcccgtacggcgccgagcaggccgtgagcgcggcgggcccgctgttcgcgctgctcggcttcctcgcctcccccttcgcgtggggcgtcccggtgtcgctcgtcaccgcagagctcgccgccgcgctcccggggaacggcggcttcgtcgtctgggccgaccgcgccttcggcccgctcgccggctccctgctcggcacgtggaagtacctcagctgcgtcatcaacctcgccgcgttcccggccctcgtcgccgactacctcggccgcgtcgccccggcggtcgccgtcccgggaagcagggcgcgcacgggcacggtgctcggcatgaccgtcttcctctccttcctcaacttgggcggcctaagcattgtcgggtggggcgcggtggccctggggttcgtgtcgctggcgccgttcgtgctgatgacggcgatggcggcgccgaggacgcggccgcggcggtgggcggcgcgggtgcaggtgaaggggaagagagactggaggctcttcttcaacacgctcttctggaacctcaactactgggacagcgcgagcaccatggccggcgaggtggagcggccggagcggacgttcccgcgggcgctcgcggtggcggtggtgctcatcgccgtcagctacctgctgccgctcatggcggcggtcggcgccacggacgcgccgccggaggcgtgggagaacggctacttggctgacgcagcagcgacgaagcttgtgaggaatctcaagggaccagctacaagtattccactctaccaaaactacaattcactgcatcatcggcgggcggtggctcaagtactggacggaggccggcgcggtgctctcctccgtcgggttgttcgaagcgcagctgagcagcggcgcgttccagctcctcggcatggcggagctgggcctcctcccctccgtcttcgcccgccgcggccccggacgatccgccaccccgtgggtcgccgtcgccgcctccgccgccgtctcggtcgccgtctccttcctcggcttcgacgacgtcgtcgccaccgccaacctgctctacagcctcggcgcgctgctcgagttcgccgccttcctccggctccgcgcgagggaggagagcccctcctcgctcaagcgcccctaccgcgtcccgctgccgctccccgcgctcgccgccatgtgcctcgtgccgtcggcgttcctggcgtacgtggtcgccgtcgccgggtggagggtctccgccgtcgccgccgcgctcacggccctcggcgtcggctggcacggcgccatgagggtgtgcaggtccaggaagtggctcaggttcaacaccgcggttgccgccgaccatcgtctgcaactacaagatgctcctcctcctcctgctggtagagtctgaactctgaacccgttttggcagatttcgtcttgcgaaaagatgaaacacggtaagaaactcgaaatatttgctagtagaagactaattacaagctatactagtacaagactaattacatggttggatgaagctctaaagttggcgttttcatatttgttcctctaattaatcaccgtgtacgattgtggttcattatcagagacgcggtttaaattg

SEQ ID NO: 22119 - DNA, 2701 bp, Oryza sativa
  ref <308>: DATABASE ACCESSION NUMBER: AK072317
  ref <309>: DATABASE ENTRY DATE: 2001-12-06
gacccaccaaaaagtctccgccacttcaccccgatcgccgccgccgccgccgccgctcgattccccgatggccgcggagccggaggagcgcctcgacgtcctcaccgccggcggcgagaagacaggcgcctccaaggccaggtcggaggtgcacagggacggcgactaccaccgggcggtgcgcgtgtggatctacagcgagagcaccggggagctgctgctgcagcgccgcgcggactgcaaggacacgtggcccggccagtgggacatctccagcgccggccacatctccgccggcgactcctctctctcctccgcgcagcgggagctcgatgaagaactaggcatcaaacttccatctgatgctttcgagctgttatttgtttttcttcaggaatgtgttatcaacaatggcacatacaccaacaatgagtacaatgatgtttatcttgtgactactttaactccaattccacttgaggcattcactctccaagaaagtgaagtatctgcggttaggtatatgcatcttgacgagtacaagagctgccttgcaagagaaagcggagaatatgtgccttacgatgtgaatgggacatatggccaactatttagtattattgaagaaaggtacaaagacaatatcgaatcccgcagtttaaccttgcaaaagcaaatcaaccgttatgctcccatccatttggaaccagagttgactagtctatcagaaggagacagggaagccttgggatatattcttaaagcatcaatagttattgatgacatcttttatgagcaggtttggaatagcaactgcacgctgagagactggctgaaagcacgtgctaactactcttcttttgttaagttgaagtggttgtattattccattaataagagtccatggtcctgccttgatgaaaataaggcttttctatcgactgcagattctgctgtgaaattactcacagatgccaccaaatcagtttcaggatggaaggggattgagtatcgtgctgcgtttcctcgagataatcctcccggggcaaacttttatcctcctgatatggacaaaatggagtttgaattatggaaaaatggactgcctgaaaaggagcaaaaatatgcaactggattttttactgtcataaaacggcatgatgccttgttgccttcaatactagcgcagtcagatggatcaaatcaaaccaagacatcagatgatcttttcgttgttccatactctgaggagtacaaatcatcccttgagaaagctgctgagcttcttcataaagcatctgaatgttctgattctccaagcctcaagaatttgctcaaaaccaaggcaaatgctttcctttcaaatgattactatgaatctgatatagcttggatggagctggactccaacttggatgtcactattggcccatacgagacatatgaagatggtctttttagttataaggcaacctttgaagcatttgttggtgtacgggatgacattgccacttctcaagttaaactcttcggtgatcaactccgggatttagagaagcatcttccactggacaacatttacaaatccgacaatgtatctgctgctccaattcgcgttatcaatcttctgtacaactctggggatgtgaaaggcccacaaactattgcttttaatttgcccaatgatgagcggattgtgaatgaacgagggacctcgatggttatgcttaagaacatttcagaagctaagtttaggcatatcttaaagcctatagctaatgcttgcatcagagaggaacaggaagattatgttgattttgagccttattatacacatattgtttgccatgaatgctgccatggaattggtcctcattccataacccttccaactggtaaaagatcaacagttagaatggaacttcaagaatttcattcagcattggaggaggccaaagctgatatagttggtctatgggcactgaattttcttattaaaaagggtttacttcctaagagcctatcagaatccatgtatgtctcattcctggctggatgcttccgatcgatccgctttggactagaagaagctcatggaaaagggcaagctttgcagtttaactggttgtatgagaaaggggcttttgtcttgcattctgatggaaaattctcagttgatttcacaaaggttgaggacgctgtcgagagtctcagtagagagatcctgacaatacaagcaaagggcgataagcctgctgcccagtctcttctgcagtcccatgcaagcttgacgcaaccactgcgtgtggcgctggacaaaatagaacacatgcaggtgcctgttgatatcactcctatattcggcacagcaaataagctgcttgcaaacgatcagtagggtgctcggtttagcaagctacgtgcttcagtggaactctgcaagaaaacgtattttgttcgatcctaagatactccatgacaagaaaagcgaaacgggaagttaggaataaatggacaagttatccataaacaataatgttcatgtcttatttttatatttattacgtctttgattgcgagaagaccccttgtaatatttcaggattatcatcagactgctgttgttctatggtgcatgagatgaccggggaaatcacgtgaaactacactggatagcagtaatacactgatcgttctgtcc

SEQ ID NO: 22120 - DNA, 2556 bp, Oryza sativa
  ref <308>: DATABASE ACCESSION NUMBER: AK072318
  ref <309>: DATABASE ENTRY DATE: 2001-12-06
gaacgcacggcgcacttcgaaacccctcctaaaccacgcgtgacccaatcgcaatggcgacgccgccggaatccctctcaccggctgcagcggcggtggaggatgattgggaggaggcgcgggggctgctgtacgaggcctacaacgagctgcagggcctggcggcggagctgggcggcgcggcggcgcccgcgccagcggtggtggtcgtcggccaccagacggacggcaagagcgcgctggtcgaggcgctgatggggttccagttcaaccacgtcggcggaggcaccaagacgcgccgccccgtcgcgctccacctccgcttcaacccgcgctgccacgccccgcgctgccgcctcctcgccggctcgggcgcgggggacgacgaggacgaagaggccggtgtcgccggccgcgcaatgccgctcgccgacatccaggcatacatagaagccgaaaacatgaggctggagaatgatccttcccaattttcagaaaaagaaattataataaggatagaatacaagcattgccctaatctcaccattattgacactccaggcctcatcctaccagctcctggccgtaaaaaccgagttttgcagagccaagcttgtgctgtagagacccttgttcgtgcgaaaataaagcataaggaaaccataatactttgccttgaagattgtagtgactggagcaatgcaactacaaggagagtggtgatgcaggttgatcctgatcttgcaaggactgttctagtctccacaaaactggacactaaaattttacagtttgcacgagcctctgatgttgaagtctttcttcaccccccgacctgtgctctagatggttccttactgggggattatccctttttcacatcagtgccttcggggagagttggctcctgccatgaagctgtattcagatcaaatgaagagttcaagaaggccatctcattgagagagttggaagatgtcgcatctcttgaggacaagttgggaaggggacttacaaaggaggagaaaaacagaataggagtgagtaacttgagactatttttggaagaattgctgaggaagaggtacattgagagtgttccattaattattccacttcttgagaaggaacatcgtggtgcaacaaggaagctgcgtgaagtcaatcaagaaatcagtgatttggatgaagcaaaaatgaaggagaaagctcgcctgttccatgattcattcttgtcgaagttatctttgctattgaaaggcatggtggtggcaccgcctgatagatttggagaaactttaattaacgagaggataaatggaggaacttttactggaagtgagaatttcctgatcccaaacaaattgatgcctaatgctggaatgcgtctctacggtggcgcacaataccatcgggcaatggctgaatttcgtctggttgttggaagtattagatgccctccaattactagggaggaaattgtcaatgcttgtggtgtggaagatattcatgatgggacaaactactccaggactgcttgtgtgttagctgtggcaaaagcacgtgacacatttgagccttatcttcaccagctgggttttaggttattatacataatgaagagactgattccgatatctgcttttctgttggagaaagatggtgagaactgtagcagccatgatgtacttgtgaagcgtgtcaaagctgcatttgataggtttgctgaatctactgagcaatcatgtcgtgaaagatgtatggaggatttggtgagcaccactcgttatgtcacttggtcccttcacaataagaaccgtgccggattgagacacttctttgattcctttgttgcacaagagcaattatccgtgaacacacttactgcccactcgactgggctgcatgagcaatcctttggcttgaatgacaataagcaggataggccaaagggagacttcaaatcaagtaattcttcagaagcaaattcacccactgttgcatcagagactaggcttgttgatctcttggacagcacactatggaacagaaggctggcaccctcatctgaaagacttgtgtatgcactggttcaccagattttccatgggatcaaagagcattttcttgtcaccacagagcttaagttcaattgctttctcctcatgccgattgttgacaaattaccggcgcttctaagagaagaccttgaatcagccttcgaagatgatcttgacagcatatttgatgttactcagctgcgccattcacttgggcagaggaagagagatctggagatcgaattgaagcggatcaaacgcttaaaggagaaattcgcagagataaacaagaagctgaattctctccaggttagacagtaagctactctaggagaagcagagcaactagctactctagtcgagttagattatttctatgctgtaataataataatcccttagtgtgtaataataatagtctagtgtgattatgacttctttgttggatcttttcatgtgtaaatatacatatattaacccttccaatgtcgtttcc

SEQ ID NO: 22121 - DNA, 3196 bp, Oryza sativa
  ref <308>: DATABASE ACCESSION NUMBER: AK072319
  ref <309>: DATABASE ENTRY DATE: 2001-12-06
gaggagaaaaaaccgcaacgttcgatcgacgagatccaaatattaatcccacacaaattaaaatccaatccattttccaattccacattccattccattcccacatcgatcggtcactgcactcgcgctctcttcggacaccgtacgcacgcagcggccggccggcgacgtacggcgagatcggtgattcgatcgattgggggcgagggccatggcgcggtcgagcgcggacgacatggagctgaagcggtcgtgcgaggccgggatcctgagcaaggagaaggaccgggagacggtggtgatgtcgatgcgcgtcgccaagggccgcggcgtctggggcaaggccggcaagctcgcctcccgccacatggccaagccccgcgtcctcgccgtcaccaccaagaagaaagggcagcgcaccaaggcgttcgtccgggtcctcaagtactccaatggcggcgtcctcgagcctgccaaggtgtacaagatgaagcacctctccaaggtggaggtcgtccccaacgatcccagcggctgcacattcctcctggggtttgataacctccggagccagagcgtgtcgcctccccaatggacgatgcgcaacaaggacgacaggaaccgcttcctcatgtgcatcctcaacatgtgcaaggagatatacggtgccattccaaaggttgttggcatggacgttgtggagatggctatgtgggcaaaggataataccacagtaaaggttactcaagtgagcacgaaagatggacccatcgaatcactagtaggagaggctgactcgcaagttgccattcagaaagacttggtcttacagacggaagatgaggatactgaggctctccttgacacgtatatcatggccattggtgaagcagaggcattttcagaacgaatgaagcgtgaactcgtggcacttgaatctgcaaatgtttatgcacttatggaaactgaaaccgtgatagaagaggtattggagggcttagaaatagctagtatatgtgttgaagattttgatgaatggcttggtattttcaatgtaaagcttaggcatatgagagaggatatacaatctatagaatggcgtaataacaagttagagctacaatctgatagtaatgtggcattgattgatgagcttgacaaaatgctcgtgctcctgcaaataccacctgagtatgaggcatctttaactggaggttcattcgatgaaggcaacatggttaagaacattgaagcttgtgagtggttgaccagtgctataaagaacctagaagcatcgaatctggatcccatatacgtgaaattgcgtgctgtaagggagaaacgtgcagaatttgtacttctaaagtgcacatttgtgcggagggcatccgagtttttaaggaattactttcccagtttgattgattttatgctaaatgacaaaggcaacttctcacagagagggcaactccagaggcctgaccatgctgatatgaggtacaaatgcaggacatatgcccgacttctacagttcatcaagaacctggacaagagctgtttgatgcctttacggaaatcttactgccattctcttaacttgttaattcgacgggaggctcgtgagttctccagtgaactccgtgctggttcaaaggcatcgaagagcagtacaccattatttgagggtcctgcaagtgcaaaccagtcgattagtattaccgatactactgcagacgcatactgcaaaatgattacggttttcattccactgcttgttgacgagagctcattctttgcacattttatgtgctttgatgttgctgcgctagctccgtcagatgaatcagataacaataatcctgttgctgtttcagaacctcctggaagcagtgccaaaccaattaacagttcagctgagttgggagtactaaaccaattccttcaagagttgcttgatggtattcaggaggacttctatgctatagttgactgggcattcaagctagatccattgagttgtatatcaatgcatggcataacagatcgctatctttctggtcagaaggcagaggttgcaggatatgtgcatgttttgctagatgacttggagactagaatatccattttatttagcaggtttgttgatgatgcctgctaccagattgagaagtatgagcgcaatgtgcggcaaattggagttgtaccctatattccgaggttctcacaacttgcagcacgtatggagcagtatataaatggatccagggatctagttgatcaggcctatacaaaaattgtgaccattatgtttgtgaccctcgagaaaattgctcaagtggaacctaaatatgttgacattgtactattggagaattatgcagctttccagcacagtctgtacgatttagcaaatgttgtaccaacacttgctaagtattatcaccaagctagtgaagcttatgaacaagcttgctcacgccacatcaatttagtcatatatatccacttcgaaaaattattccagtttgctcggaaaattgaggaactaatgtacaacatgagccctgaggagatacctttccaagttggaatgtcgaaggtagacttccgtaagatgttgaagtccagcttaagtggtcttgacaagacaatcaatgcaatgtatagaaaactacagaagaatattacggctgaagaattacttccttctctatgggataaatgcaagaaggagtttcttgacaaatatgcaaccttcctcaaattgatttccaaaatatatcccagtgaaacagtaatttcagtgaatgaaatgaaagacaccctagcttccctgtgacaactttgctcttggagcacatctacaaggtacatgttctttgatttttgctgttgtgctttttacatattagtaccatttgtactttattgtaggatgtatcgcataattattttatctttttggtcaaatgtatgtttgaagaaaatacaattgaatttggtattcactaacattattttgtctcttttcaaagacagtatataaggcttctttaaaacatatcaactttttacctgatttcatcagaacttaaattgtttgctatgaaatacctatatgtaaataagtcctgaattagtgaggactgaacaaaagaatcggccatgattaccaaatgaagtgcactgtttttcc

SEQ ID NO: 22122 - DNA, 1185 bp, Oryza sativa
  ref <308>: DATABASE ACCESSION NUMBER: AK072320
  ref <309>: DATABASE ENTRY DATE: 2001-12-06
ggccatccatgcatcgcctccattattcatgcttcgattctccatgctttcctctactgctcattggtaacattcggcaaatttgacagatgggtatattggtcatcttggtggacctgcaatgctgccgctgcgatgccaagatcaggaaggtcctgggctgccttgaagaggagtactgcatcgagaaggtggagtacgacgtgaagaacaacagggtgatcgtgcgcggggagttcgacccggagaagctgtgcaagaagatctggtgcaaggccggcaagatcatcaaggagatcctcatcgtcgacgtctggccgccgccgctgccgcagccgccgccgccgtgcaagccgccgccgtgcgagaagcctccggaggactgcaagcccaagccctgccattgctgcagctgcgagaagcccaagcccaagcccaagccctgccactgcgagaagcccaagccctgtcactgcgagaagcccaagccatgcgagaagccgccgccgtgcaagccggaggagccgccgaagccgccgccggagaagccgccgccgaagccggagtgcaagctggtgccgtacccttacccggtgccgtacccgtacgccgggcagtggtgctgcccaaagcctgagccgccgaagccgccgccggagccaccgaaggagccggagccgccgaagccgtgcgggtgctcgcacgccttcgtgtgcgtctgaagccggcgccgccgccgccgccgccgtgcgggtgctcggggggccacgggaactgcggctgcggcatcaggccgtggccgccgcaggtgtggccgccgccgcccgtctgcccgccgccgccgtggtgctacaccgaggacaacgccaacgcctgctccatcatgtgatggccggccggcggtcggcgtcgatcacgatcatctctgctgcttaatttcattgcttgctactacctctgctcctttccttgcctcggaaatcggaataaattaaacacgaggctgatcgatgtgtttgtaattaatccatggtgtttgtgttgtgtgctgtgtgggctgtataataattaattacagtatgttcatgtaaatttgtttgtttgtttgtttatgttgttcgatatgtataattatgtacaataattaatcgtggagaggctcactaaactcataaactgtagagc

SEQ ID NO: 22123 - DNA, 1930 bp, Oryza sativa
  ref <308>: DATABASE ACCESSION NUMBER: AK072321
  ref <309>: DATABASE ENTRY DATE: 2001-12-06
gtagcaagtgcgcaccaccaccagcaacaatgtcttccccttcctcggcccattggctgagcttggtaggaagtatctggctccagaccatcaacggccccaactccgacttcccggtgtactcgtcgcagctcaaggagctcaagagcatcagccaggtgcagctcaacttcctcgccttcgcgtccgacgcgggcaagctcttcggatggttctccggggtggcggcgctgtacctgccactttgggtcgtcgcgttcgtcggcgccgcgttcgggctcgtcggctatggcatccagtacatgttcttggacagctccggcctccggtactggcatctcttcctgctcaccgcgctggccgggaatggcatctgctggatcaacaccgtctcctacctcctctgcatcaacaacttcgcgtcgaacagccgcgtcgcggtgagcctcgccaccagctacctcggcctcagcgccaaggtgtacaccagcctggccgagacgttcccggggctggccaactccaagacgaagacgtacctcctcctcaatgccgtcgtgccgctgttcgtcaccgtcatggtggcgccgtccctcagggtgttcgacctcaagagcgcggcggcgagctcggacgcggcattcctcgtcatgttcgcgatcacgctcgccacgggcgcctgcgcggtggtcggcagcatcggctcgacggcgaacgggctgtcctccaaggagcacatgatcagcctcggcgtgctgctggccaccccgatcctcatcccggtggggctcaagatccgcgagaccctgaccaagatacgggagacgcagcgggagaacaggatccatgacctcggcaccgacgagtcggagtccgtggagagcgtcgtcgtcatcgacgtcgccgccgacgcaaacgccgaggttgccaaggaggaggacgccgtggtgaagaagccccaagaggaggtcggcggcctccggctgctgaaaagcccggacttctggctctattttttcagctacatgttcagtggcaccctcggcttggtcttcctcaacaacctcggtcagatcgccgagtcgcgaggaatcgggcagacttccactctggtctcgctctcgtcttcgtttggattcttcggccgtcttctcccggcgttcatggactactactccgcgaaaagtggctactccatatcgaggacggggtccatggcgtcgctgatggcgcccatggcgggggccttcttcctgctgctcaaccagcgggacttctttctgtacctggccacggcggtgatcgggacgtgcacgggcgccatcacgtcggtggcggtgtcggcgacgcgcgagctgttcggcaccaagaacttcggcgtcaaccacaacgtcgtggtggccaacatccccgtcggctccctgtgcttcggctacttcgccgcgttcctctaccagcgggaggccggcgcccgcggcacgctcacctgctccggcgccggctgctaccgcgagacgttcgccatctggggcacgacgtgcgccgtcgggacgctgctctgcgccgcgctctacgcgcggtcccgcaattttgccgggaggctacctgtaaggataccgtcctgcctcgcccgcttagctaaccttgtgtagggtgctagaactttcttacacctctcagaggaggcctcttcttaatttaacgaccatacacgaaagcatcagccattaggcgatgtaattaattaggttttgtttctttccaccacctttttctttctttctttctttcctttggttttcttgactgattatcccacggggggatacagacaaaaggttggagcctgatcggtagatattgtgcaggctgatcaccttgttttctctgcatatattatatatgcaatcatatacgagtggttaagggc

SEQ ID NO: 22124 - DNA, 1976 bp, Oryza sativa
  ref <308>: DATABASE ACCESSION NUMBER: AK072322
  ref <309>: DATABASE ENTRY DATE: 2001-12-06
gactttcgccaatcgccatggtgcaagccgcctcaacctcctcgcgctttctccgcacaacccgtctccacggctcctccacctccaccacgccagcggagcccgcagcctccgcgtagccggcggcggctcctcctcctctcatcgcgctatctctctctctcggatttcaggatgtcgatttggcgtgtccctaattatgatgtgttggagaagtgtacagaagatatcctctctctaatcaaaccagtggagggtgaccgaaacaaacgaatatatgcaattcaggagctggcagatacaatctattcagctggggccttgagaggtgcttctgtaaaaccttttggatccttcgtatcacaactttatgcaaaatcaggtgatttggatgtgtcagttgagctgttcaatgccttgaatctccctataagtaagagaaagaagcaagataccctgagagaagtaaggagagctttgcaaaagcgaggtattgctagacatatggagttcattcctaatgcaagagttccagtccttcagtatgtgagcaaccaatatggtatttcctgtgatatatccattagcaattaccctggtcgaattaaatcgaaaatcttctactggatcaatactttggatgatcgctttggtgatatggttttattggtcaaggaatgggccaaagctcaaaacattaatgatccaaaaaatggaaccctgaattcctattcactttgtctacttgttctctttcattttcagacatgtgaacctgcaatattaccaccgctgaaggagatttatgaagggaacatcatggaggacatttcagggagggcgtactataatgagaaacatcttgatgaggtttgctccataaatatagaaagattccggcgccaaaatatggggcaaagaaatcagagctctctttctcatctacttgcatcattctttcacaagtttttccgcatcgatgccctttcggataaggttatatcgacttacactggtcggttggagagaatccaggacaatccaagatggatggacaagtcatacagcttgtttgttgaagatccatttgagaaacctgataatgctgctagagcagtcggttcctttgagttccaagatattgtcaatgccttcagcaacgcgagcaataagtttgtttctgatgcgcatgcgcttactgaccgaaatggattattgtcactgctttgcacacctgatgttggatcaaaacttggtggaagagccagtgccagccgttatacaaataccttagtgagtcctcatgacagatttttatgatatcttgactatgtggcacctaacccatacgatgatcatcatcaccagccagccagaggaggaagcaggtcaggtcagagtccacatgggtatactaccaaccggcaaactgcagtgcattaccagaacaataatcatccacaggcatataacacgcagcggcaaacaacagttcatcaccagaaccagaacaatcaacaggtgtatgctgcagggaggcaaacaggaggtcagtaccagaatacccagcgtagcaaggagaacacatcatatcgtcattcaaattggcgagcagcaactacatggcacgagccagtttgtggatgattctacaatggagaatggcagtaacgctctcagaccggcctcaccatcagcatcagttgatcataactgatggtcctaggatagcaacagattatctttagctcttgcctgacaatatgtcaatatgcatcacatttcgattcccttaggtctcgacaaacaatatgtatgagctcatgaaatttagcgcaagttattgccagccagctcgtatggttgagcgagcctggggcttatgtgcattttgagatctagaagatgtattgctgaacatgcagctctatcacttctgatgttcaatatataactttaggccatcttccttctcc

SEQ ID NO: 22125 - DNA, 1525 bp, Oryza sativa
  ref <308>: DATABASE ACCESSION NUMBER: AK072323
  ref <309>: DATABASE ENTRY DATE: 2001-12-06
gaaccgtcaagagagaagtattcggaaagaagagaaggaaaaaaagaatttttagagagaggaggaaaaaaatatccccaatcccatcatcccttcacccacccgcacgcgtctcctccgactccgatccgagctccagatctgcggcgccggcgaccaacctctccggcggcgggggcggcggcggagatccacgatgccttcgtcggagcagggggcctcgcccctgcgccgcctcctccgcgtcgacgccctcgtcctcccctccgcttgctcccaccgccttaagccttggtctctccatccccacctcctctcatcctcctaacgccatccaatctctcttctccccgtctctttctcctgctccccgttgccctcccatttcttccccttttcttctcgtagctatagggtgatacacttctctgattattgttgttgttcttcccgtgctgatttggatttaattacaagtatttgtgttggatcggttggacgcgctcactcggtttggtttggtttggattgtattgggttggatcggatcggattagccgcgctatagcgtcaggggatcagctcggctcactgtggtttttgaggtgttagggtttgagtgctaggttgtttgcttgatggatggtcattcctgtggtgatctcgggagagtgtcggaagtgatatccgacggcacctcatcgggtagcgcagacggcggcaagagcctgcctgagaagcattctgcgctggctgatgctacttctggagtggcggcggagaatgccgataatttgtcacaagctgggaagtacatggatttctccagtaccaccagcttgggggtgaagaaaggcttccagaagtgcatgacgtttccgccctctagcggcgaggcacaacagcagcagggttcatgctgtgatgcagataagaatcccaaggatgtgccaacctatgagcgctccgtgtcactgcccccaactttgaagatcatatctgctatgaaaggaagccgccaaaagaatgggatggcttcatcaactgaaagtcgccacgtcaaatgggcccctgacgtgtatgaccccccagtgacatctgtatgtcattcagtgaataacagctaccagcgtcggtccaaatcccggaagaaggacaagaataagcagaagcagaaacaaaagcaaaagggtaggtccaagaaaaaccaccagaatgctatccagagttcagcagtgctccaagctcctggcgaatttgataggctcaaggatgctgaaaccacaagtagtaattcagcaccagacgatctcaacaaacatgagaccgatatattggattatggcatcagcagtcaagacgccaaatgtggaagcagctttttgcgtgaatcggctgctaaaatgcatttctccactgctgaggcttcctgaaagaaaggaaaatgagtcctgcggattctcccttggtatgtaaatatgatggatgtgtagataaataaaatccagtttgttgttgtgtttcc

SEQ ID NO: 22126 - DNA, 1811 bp, Oryza sativa; identical to SEQ ID NO: 19458
  ref <308>: DATABASE ACCESSION NUMBER: AK072324
  ref <309>: DATABASE ENTRY DATE: 2001-12-06

SEQ ID NO: 22127 - DNA, 1914 bp, Oryza sativa
  ref <308>: DATABASE ACCESSION NUMBER: AK072325
  ref <309>: DATABASE ENTRY DATE: 2001-12-06
gcccaaagacgagacgacttttgttagtactgtttgcctcctcgtcctcctcctcttccctcctccatggtgccgcacccgcacagcaccacaccacctgcctagcgccaagctccaacagaagccgctagcttgaggcaagtccaaggaaggggggaagaggcaggaggatgggatcccccaagatggccaagagcgcgatgaagcagggcatctggcgccggaggatcggcgcgcccttcgccgccgtcctcgtcgccgctgtcctcgccgtagtcgtcttctccggccagttcgccaagggccccaacgcttcctcgcaatttgctccggtacaagttgacaacaccctgcggcccacgcgcgataagccggtctccgcagatcaagacttggagagaacggtttcttcaaagctagaaggggaggacactgagcaaattagacttgaggatggacagtctcccaacaaagaggcagcaatcgaagagcagaaaccatcccaggcggctgctattgatcaggatgacaataccttaaatcctgggcttaaacaagcttctggagatgaaaggagcgcaggaggatctgactcattgagcaaggaatctcctccacaaagtcaggaaggagacggaggcacagcagagtcaggtgcggaaccgtacatcaagtgtacggctcaatctgacataaagatctgtgacctctccaacccccggtttgacatctgtgagctgtgcggcgatgctcgcaccattggacagtcctccactgttgtgtatgtcccacagaaccgtgcttccaatggtgaagagtggattatccgagcacagtcccgaaagcaccttccctggatcaagaaggtgaccatcaaatctgtgaattcctcagaaccagaaccaatatgtacctccaagcatcacatcccagccattgtcttcgcactaggtgggctaacagcaaatgtctggcatgacttcagtgatgtccttgtcccactgttccttactgcccgtcaattcaacagagatgtccagcttatcatcaccaacaaccagccctggttcatcaagaagtattctgcaatctttagccgcctcacgcggcatgagattattgattttgattcagatggccagatcaggtgttacccacatgtcattgttggtctcaggagccaccgagaccttggcatcgacccaagttcttctccccagaactatacaatggtagacttccggttgtttgtccgggaagcctatggactgcctgcagctgaagtggacataccctataaggctgacaaagatgaccctgacaagaagccccggataatgctgattgacaggggcaaatccaggagatttgtcaacgtggcacatgttgtacaagggctggattggtttggttttgaggtggtcaaggccgatccaaagatcgattctaaccttgatgaatttgttcgccttgttgactcctgcgatgcaatcatgggcgtgcatggtgcgggcttgactaacatggtgttcctgcggtccgggggagtggtggtgcacattgtgccatacgggatcaaattcatggctgatgggttctatggtgcacctgcacgggacatgggtctgagacatgtcgagtacagcatcagtccagaagagagcacactgctggagaaatacggttggaaccatactgttatcaatgatcctgaaaccatcaggaagggcggatgggagaaggttgcggagttctacatgtccaaacaggacattgtgctcaatatgacaaggtttggacctagcctgttgaatgcaatagagttcattatgtaagtttgtgaaatgaggtttttgtgtttgttttagctacagcattctacagtcacgaaaaaaatacacttttttgttggcc

SEQ ID NO: 22128 - DNA, 3395 bp, Oryza sativa
  ref <308>: DATABASE ACCESSION NUMBER: AK072326
  ref <309>: DATABASE ENTRY DATE: 2001-12-06
gaccagttgtagtacgttccacacttccagcgatggagcaatcggcggcgaccgccttcaccaagtgcgtcgtggggaagctcctggaggtgctcgacacgaggtacaagatgctcagggacctaagccacgagagcgcctccatgcataacgacctcctcctcctcgcggcgttcatggacgaccagctccggcggtcgtcgtcatcgccggcggcggagaggccgaccgccgtgctgagggcgtacaccgagctcatgcgcgagctgacgcacgacatggaggactccatcgagcgcttcctccaccgcgtcgcgccgcgcgacgaccacggcggcgccggcgcgcccagctggccccgccgcgccgcgcggtgggtggccacgctccgcacccgcctccggttcgccgccgagatccggaagctgaagacgcgcctggaagatgagaccaaacgcctgaggaacgccgtcgaggccgctgccgccgccggcggcggtggccattcctctgccacgccggcgctggcggcggcagctccccgcggcggtcacgtggagccgaacccggtgggcatggagaagcctatcgagcatctcgtccagctgctagatgaggccggtgccggcggcgggccgcagcagctgcgggtgatcgccatcgtcgggttccgaggatcggggaagaccaccctcgcacgggcggtgtacagtcggtccggccgccagttccgcgagcgcgcatgggtcgacgcgtccaggtggacggacgtcggcgaccttctcgccgacatagtccggcaggtgtgcctcggagaatatgatgttagcgaatctcacgaggagaatcttcgaaaccgtctcaagaacaagcggtatctaattgttcttgacgacatcagcatggagcagtggaatgccatagaatcgatatttgagaacaatggtagaggcagcagggtaatcgtgacgacggccatcctctcggtcgccaacagttgcacggcctacaagtccggagccaacggcggatgctgcatccgtcgccatggctgcgtctacaagatgcagactctcggagaagcgcacgccaaggagctcgccctcggcggcggcagcgatcagcgaccgccggagctggagcacggctcggcgacgcttatggcgaagtgcgacggcctcccgctcgccctcgtcagcgtcgccaaccacctgcggtgcctgggcaatctcacggggcggcactgcgccgacctgtgccacctcctcggctccctcctgctcgacgagcgcaacgtcccgaggctcgccgggacggccgccgccgccgacagcttcgcgaggctccgccgggttctgatggacagctacgcgggcctccctgactacgccgccaggacctgcctgctgtacctggccgtcttccccaacgacggccgccgcctcaagaggagcgtgctcgtccggcggtggctggccgaagggtacgcgcgcggcggcgaggacgtgcttggcaacagcaccgacgtggacgtcgccgacggccacttcaggtcgttcgtcgaccagagcatcatcgtcgcccaccctgccgacgacgacgacgacgacgaccaccgcacgaggaggtgcaggactcacggcatcgtgcacgagttcgtcctgcacaagtccatcgccgagagcttcatcttctcctcccgtgctcctccgaggcgcaagagagtccgccacctctccatccaaggcggcggcgggaacaccacgacggcggcgctgagcacgacggacctgtcttgcgtccgctcgctgaccgtcttcggagatggcggcgacgccgtctccaacctccgaaagtgcaagctcctcagagtccttgacctcgagcagtgcaccactgctctgagcgacgatcacctcgctgacatctgcaagctctggaacctaagatacctaagcatagggatgagcagcaatgtcaccatgctgccagacaatatccgaaggctgaaactcttggagacgatccatctcagcaagaccaaggtgacaatgctgccactacaagtcgtcggcctgccatgcctagctcacctggtcggaaagttcaagcttctcctcccagatcaacgtgggaagaagacggtggtgatcagcaacgagctcgagaagctcgcgaagaagagcaacctccagacgctcgccggcttcgtcgccgacgagagccagcaagcgtttccgcagctgatgaggcacatgaggaagctgatcaaggtcaagatatggtgcgagttcggaggagaagaatccgacagtgtctcgacgacggcgacggatcacctcgccgacgctatcaggagctacatcgaggcacccaaggttgaagagaccgacgcacgctcgctgtcaatcgacatggagcaatgctcgaagcagctgatcaggtcatgtcatggagagagtaagctcctgcactccctgaagcctccatgccgcagctacctcacctcgctgaagcttcatggcgacctgttccggctgcacgggctcatctccatgctcaagaacctctacgagctctgcctctcgtcgacgacgacgaccctgaccagggatctcgtatcagccatcggcggattgcctcttcttcttcgcctcaagctggtggcgaatcacatcgagcatttcgccataggagccggggagttcagaagcttgcaacacctgctcctcgtggtgcatcgtcagaatcccatcctgctgccaaagatcgaggagggagcactgcctcagctcgtctctctcgagctgctctgcaagcatctgcgcggcctctccgggatccagatcagacacctccagcgtctcaaggaggtcgcactcgattctcgagtgagcgagggcacgaagcgagagtgggaggcagaggccaggaggcatccgaacaggcccagcatcttgctcctgaagaacagttacagtactgtcctgcctgacgacactgacagattggatgatcagatggacggggagcttgctcgggagaaatctgcacctgatgatgatgctggcaaccaggagcagattgcggaggtggaatcagaaagcagtgcatttcaattggcgaattccactatgaataattcagtcgctggaaaggaatcaacagctgatgatgctgatgaagaaggattgggaagcactaatgcagtgcccatggagcagataaattctactggctccatcaatgagaccgaggtctccaatagagggaaattcacaatgtcatattttgaggactgctgtccctaccatgaggtaataaactataaatttggcacatattatgtgaattcaactgcatttgagatattatttaattaaggttagagtttc

SEQ ID NO: 22129 - DNA, 3978 bp, Oryza sativa
  ref <308>: DATABASE ACCESSION NUMBER: AK072327
  ref <309>: DATABASE ENTRY DATE: 2001-12-06
ggtttccacgcgcagggagggagagggaagacggaaccctatacttgcgattgagtccaactgacctgtatttttgcgattttccgttaacatcgtattatttcccaaaaaaaattccaccgcttgcagccgcgcgtgcacaaccacccctcctctcctcctcatttgttcgaaaccagtggaaatctagggtttcgacggctcgcgagtggaggtcgccaggctcgtcgccccgtcctcgccggcgggagggccggtctcatcctccctctctttcgctcgtagccatagctctcttccactggttcgctctctccgtcaaaccgtttggtttcgccgcctctctccgttgagctctctgatttttccccgtgcactactcgatctgctccgggcgggcgagcgacttgggggaggatatggtgttctacttcaaggtgcggcccgaggccggcgactacaccatcttcatgggtctcgacaagttcgagaacgaggacctcatcaagtacggcttccccgaggacatctggtaacttcccgcccgccgccttttctcttctgctacgctagcttgattgattgattgattgcccgaggattggtaggaggtggtcacgtggtagtattgatttgtgctttttgtgtggaaggaattcatctggtatgtagagggatttgatggatggatgagtcgcatgtgtatggattgcagcagctggataaaaattaggttggatcttagtcttgaaactatgctgtagcttattttacgagcacagattcttattcgtacatccgtttaagtgttgtctcggttcaggaattagtgtatagcaagagatgtagtgtgaccggtcatttttactatgtttagaggaaacacacttgattccttgtggtctgtgtcatctgtatgattttcgtaattttaagtgatattgttgtgcacagtaatcacagtgaacatactctgttccccttgtgattaggaaatgcctagctagtgcaattatgtgatatgctagatgtatatattggaggcatagagttgtcctatgttttactccctccgtccaagtttgatcgtcatatttcaaaaaattgtattttcaattttgatcgtgacatttgcagtcggcagccgttccatctcgtccgatgcgctggccgtttctattcgcgtgcgaaattaatcaggttgcgcgcggacgcctcgggagcagtctaaaaaagcttgttgcatgcatgcaaaattaatggcaatcacagttggctacagatcattggttccgtcgtgcatgcatgggccattatgattagaaagatgtaagtgcaataatgagtagattagaaagatgataagtgcgtttcctgtccttggtctgtgtgtcaagccaaaatatgacgatcaaacttgaacggagggagtatttgggaagaacatttccatggtttttttttcctttaactttggcatagtgtgcctatttgtacttttggccatgatttaaatggaagacattgttgcttcttagcttccttccagatcatgaaagtctcaatacattctctcgcttgcattttttttatgtgttttttgtggaagaatttatccaacattgttttattttggtggagatatgtgccactgatccatgaatagatgtacatgttttcctggattcagctgccctgaatttactataatgcttagcgaatgatgcagaagcagtttaattttgcactttgttttccgaacttttgttttttaactacatctggatgcaaaaacatgttcaagacatacagcaagtcatacatcaaattttgagcatcattgtcttaaaatatgtcgattgatgatatgcctagatttgtctcaaaagttgtttcataatattgtaatttatcaggttgtacaaatatagtataaaagtggaaagtagtggttaacattgcagttcaagtgttcaaagacttcattgatgtccaaaatgaagtttgctgcattacttttgatggacctgtgcaactttgttcctttttggaagcttaattggcgctgggtggtacaatccttccctctacgctcaagtttggtagtatgaattatgaatctttagtgtatgatttattcaaatgctagtttgcaaacttaacacttgttagtagaaaattggaattgattatatatgtgtagtttgttcaggcacatgaatttcccttgctaacgtttggtacatattggtctatcacatttaatgcatgtacttgctttctttttttttcatttcagagttcatcttctgtacatacaaaatcgatttctaattctgtatctattttagatatggtttgctcattgcttaataaagttgttgaagtagcacagagtcatcttatcatgctttgtagctcaacgctattgttcttgaacacaggttccatgtagataagatgtcctctgcacacgtgtatttgagattaaataaaggtcagacaatggatgacataagtgaaggtgtgcttgaagattgtgcccagcttgtgaaagctaattccattcaaggtaataagactaataacattgatgtggtttatacaccatggtataatctaaagaagactccatccatggatgtgggtcaagttggttttcacaactctaaattggtgagaagcttatttcccttacttcctgtgttaggcatgtaatttagtataacttgcatttatttgaacgcttatacatttaggtttgtctagtgttatgatatcttggaagttctggaagtgatttccgtgaattctgtgtctgataatctgtggaatatatgtttcctatcaaagaatgtgtgagcaaaattagaagttacgattagtactatctggtttttgttattttgtgaaagaattagtttttagtctctacacaatctcaattcagggaagtttactttctacttccatgtttgttctttgcaaaattgactgtctgttcgtctttattgactatgcaccaatcttaacttgcgccacatgtcatgagcatgataagcattgttttctgtaatgactttgcagaataacttcaatagccttttttttgcgagttatttctatatcctaacatcaacattttataatgtggttgttatccttctttaaatgccatttaactttgaaagtgcttgattttttttcatagccttttcttgttgcagcttgcataagatttctttattggaagggttcattgttgtgatttctaaccaaattactggacacagcccaataacttaggtcctagatgtatctccttttgaatgatcttttcagtttttttatgtatcctttgtcatttgttcatttacaggttcggattgtcaaagtagaaaaacggattaatgagattgtgaaccggctgaataagacaaaagtggagcgcaagcctgacttaaaggcttaacatcttttgctacagctgaaagagaagctgtgagtgcagcagaaaaggcagagagaaaggtgcagcttagagataaaaaacgtagggaagagatggagagggttgagaaggagaagcaggctgaaatcaggagctacaagaacctgatggtccaagagaagatgacttccaacaagcaggttgcatctggtagcaagaccttggaagaactagaggatgacttcatgtgagaagacaaaataacaaattcatactgccagggttctctaaactgtgtttctgtcaaagacaggacaagcatcgccgggttgcaagcttggacaagatgatttctgggcagggccgccttgacctgttatgctacatactctaattggcctgcattgaccttgtttgatgtgttgaaacaaagcattgtgtgatctaactgtggttgatgtattattgattagttaatcatcaacctgatacaagataataaaactcgctttccttgatttttcggc

SEQ ID NO: 22130 - DNA, 5950 bp, Oryza sativa
  ref <308>: DATABASE ACCESSION NUMBER: AK072328
  ref <309>: DATABASE ENTRY DATE: 2001-12-06
ggccgtgctccatataaccatctctctcctcccaaatccgcctctctctcttcccgaatcgcgatttttttctccatttctccaccaccccaccacaggtcgagaccaaaccccacgccgggtctcctcctctgacccaatccccgaatccccaaatttgcagttgaaccaccaaactggtggagtcgattcgggcgaattcgagctccgatctgcggttgcgggagaggcgtttcgtccataccggcgcgggcgaggcgaattcgggcgatccgaggcgtatggaggaaggccccgcggatccgctgctcgggagctagggttaagaggcggcggctgcatcggcggggggcgggcgcgatctggtgatggtgcggcgcggcgccgggggacggcgaggagggatcggcggcggggatgatgcaaggctatgcatgggtggcgcgaaggcggcggtgagggttgcggcaagagtcggcgtctcgttcggcacatgtggccagtaactcgcgtagaggcagcagctccaccaccggcacagggacaagcttctcctcctccccgctcctctgttcctccgcccctgacgacctcgtatccacctgcgccgacgactcccccagcagcagcgcacaagaaggagcgtgttgattctccccgtccagcttcatcagattccttcttaaaggacgggcgtgaattccgtgttggcgactgcgctctttttcaggctgttgaagttccccctttcattgggttgatacgttggattgagataaaggaggaaggctttcccaagttacgtgtaagttggctgtatagaccagctgacatcaagcttaacaagggaacacagctgtgcgccgcaccaaacgagatcttctattctttccaccaggacgagacatccgctgtctcactgctgcatccttgcaaagttgcttttttgcgtaaaggcgttgagcttccagctggaatttcttcatttgtgtgtcggcgcgtgtatgatattgacaacaagtgtttatggtggcttaccgaccaggattatataaatgagcggcaggaagaagtaaatcggcttctacacagaacaaagctagaaatgcatgcagcagttcagtcaggtgggcgctcaccaaagcggctcaatggaccgtcgtctgcccagcaaaagtctggttctgatggtgcccaaaactgcggtctttccaaagggaagaagagggacaggggtgagcaaggaactgatccagctaagcgagaccgtgagcgtcccctaaaggctgaggatggcgaatcaggcaactttaaggtggagaatctaaagtctgaaattacaaagataacagaaaaaggtggacttccacatgctgaagctgtagagaagctggtacatctcatgcaacttgatcgaactgagcgaaagatagatttgcctggccgggtaattctagctgatattattgcagctacagaaagtcctgactgccttggtaggtttgtgcaactgcgaggccttcctgtgtttgatgattggcttcaagaagctcataaagggaagtctggtgaagctggtagtcctaaagaaactgataagcctatggaagatcttgtcctggccctgcttcgtgcactggcgaaattgcctattaatcttactgctttacaaagttgcagtattgggaagtctgttaatcatctgcgaagccataaaaatccggagatacagaagaaggcaaagtgtcttgtcgaaaattggaagaagcgcgttgatgctgaaatgaagtcaaatgatgtgaaaccagtggtatcaggtcaggctgtatcctggccaggcaaacctgggtttccagaaatttctagtgctggaaacagacgaagtggctcaagtgagtctagtctgaaaagcccagtgtctcagctttcttcatcgaaggccttgacttctaaacctgtagccgccgatgctgctgcgaaatcgagtccagtgatatctggttcttcaaaattgcaacatatgcaaccaggaaatgctgtaaccaacttgaaggagcaaccctccaaatcaactggtggcacttgtggctctgagctgcctgcagtgaaagaggagaaaagcagcagttcaagccagtctctgaacaacagccagtcatgttctagtgaacatgcaaaaacaatcggttcttcgaaggaggatgcccgaagctcaactgcagcttctggtgttgcctataaaacttccggtagttcttctcgtgtgcatcgaagaacaaacaatgggcttcttggttcagggatccagaaagaagctgccgtggcaagatcgtcttcacttgatcactcttcagtgcaggaaaaagtgtcacaatctggcacagcatgtgagaaaggagctgacatacaatcagatcagggtaacagccatagattgattgtccggttcccaaatcctggtcgaagccctgctaggagcgcaagtggcggttcttttgaggacccatcatttactgggagtagagcttcatctcctgtggcagacaaacatgaacaaagtgaccgtagagtgaaaatgaagactgaaaattccaatcctcatttaggcaatgatacaaatgctgagtcttggcacagcaatgatgttaaaggagcttcagtttctgaggaaggcgataaatcacctcgtgctatgttgactgatgacagcaagacaactgaaggagctggcagagatgtacctgtttcacgagttgcttgttcatcatatgcaaatgaaaagggaatctgttcaagtgagactgggctgactaaattgttcaaccctatgaatgctttgattgaaatcaagtactctgaagctagtcattccttgcaagctggggatgatacagcaatgaatcttcttgccagtgtcgctggagaaatatctaaatctgagttgatttcctcatctccttcgcctagaaattcatcagcaaatgaacagggctgtgaaggagacaacattgggaagctaaaagtggaatgtgatgtgagcttgccacagcatgcagggccatcaaatgaagttgagaaagtcatctctgagaagagtgaaaaaagtggtgtaggtttggttggaaaggagctgcaccgggaggatgttaatatgctgtctgtaaacaacttgttgtcacagggtgacaagggcacaacatctgctggatcgtcccctctaccagaaatagattctaaagcgaagactgaaaatcgtgaagtagaggacaccgataaatgttcacatccaccttcacgtggtgatgatggtgtaaagtcaaatgccaaacaacctattggtttcaagattgatacaaactcaaatataaaatcatctactacgagtgaatataggtctgcatttactgttcgaggtaaagttgaagatggttgtacaaccagttctgatgtgggctccacattaggtgatcaatgtaagctggctgtttcaaatagaaaaatgctccctgccgaggaaccattatgtggtggtgacaaacaagctcatggtttgttaaagccaacagatcaaaagcatcttctgggtctaccatattattcagaacacattgataaatctggtgacagtactgcaaataaattgaaattgaagccttcattttcatcatcgactgtggaggtgaataaggctgatggtttgctggttggtagtaacacggtgctgaaagaggatgaaaagaaggaacatccagctgatgttacaaaacttgctgtagcaactggagtcaaacatggtccaggaaatgggattagttctaaagaatcaaaagacaattccagtgaatcaagcagtcacacaagacctggaggcactgtctcacaggaaactgaacatagtgcacaacgcagctcaaagaaatctagcgatgatgcaggtgggaaagacgaccttgtctcatctgatgatggttcttcattctctgccaagaccaggtcaaatgccactgccaagcttgactttgatttgaatgaaggaatacctggagacgaggggcatctgtctgagccagctacctctcctgctgtgtgttcttcagcgattcatttacctcgtccttctccgtttgtatcacctatttcaagtgggctgcctgctccaatagctgctccagctaaaggcccctttgttcctcctgagaacctaataaggttgaagtctgagactggctggaaaggttcagcagccacaagcgcatttcgcccagcggagccaaggaaaatttttgagatgactctcagtgcatctggcattctggtttctgatgctgcagggaaaaaccgcccagcacttgacattgacttaaatgttgcagatgagcaatttcttgaggaagacgtctctcagagttctgttcagacaactggttctgaatctggcaacactagaagaagcaatggtcctgtacgtagtgttggctttgagcttgacttgaatagggccgatgaagttgcagagaatgggcaaattgtgtctaacactaaccacagggttgaagtcccattattatcaagaccattacctggagttttctctagttccgatgcaaatagctcaagggattttgatcttaataatggaccaactcttgatgaagctggtacggaacatgcaccaaggagtctgtcatctaaaaataccagtagcataccattcctacctcaagtcgctagcatgagaatgaacagtgctgaaatgagtaacatatcaccatggtttgcttctgccaatgcttgtgctcctgtagctataaagtcgtttttaccttctagaggagaacagcctcacccagtcgagacagcagctggaagtggaacccagaggatcatcacatcgatggcagatggtgtccaacatggaagtgatcccagccggactccagttatttcaacttcaccgactatgatgtttcaccctcctgcttatcagtatgcaggattcccttttactcctagtgtccaccttcaagcaccggggttttcaattgggtctacatcatatgcgaattctgcacctggaggaattccttatttccctacaattgctccgacgcttgttggcccagcaggtgcattacctgctcagcatactcgacaatagtgcaataaacctccctgaaggaagcagcactgttggacatgacaataatcggaaatggggaagacagggtcttgatcttaattctggccctggaagtgtggatgtagaagtgaaggacgatagagtaactttaccagttagacaaaattttattgcgccaccacatgcctttgtggacgagcatacgagaatgtatcaaatgcctccaggtgttggaataaagaggaaggaaccagagggcagttgggatgccgaacgatcttcatacaaacaattgtcatggcaatgagcttttgctggtatcatttctcagcgacttcggcatccaatgagcttgtatgtgcttgcttctcgccttaaacgacctgctttgtttatcacctgcagctctttttcttttgatattaaggtgctgtgttttcatttgcagaggcagctgcatgtggtacttgggttcgtgtactgcacccttgctggaatatacaattcatacatggatactttccttgtgatgatgtgaatgtgagaggaacgatgctttgatgtaattgctgtaaatgttcatatttcatactttcctggaaacaattttccttggcattggcagttgctttgctagattttcttagctgtcagggactcaggcatgcttctaatttgcttgggagggtatgactggagatggaaacggtataggtcctgggcctcaagaaacatctgaagccgctgtaattaggttcagtttgtttgtttttagtttcttatgacagaccaattttctctttttggagc

SEQ ID NO: 22131 - DNA, 2667 bp, Oryza sativa
  ref <308>: DATABASE ACCESSION NUMBER: AK072329
  ref <309>: DATABASE ENTRY DATE: 2001-12-06
tggcggctagcgttgtttgtggcggcggtaggcgtagcagtaggagatatgaagcggcgaaaaattcacaaatcgacagcaagccgggggctcagatccggcgtgcaatccccaaaaaatccagggaagagagcagcgagtcggagcggcgcctcctcctccgatggcccccgcttcggcagattcacctgttaccacggggaggaggagaagcgatggcaccctccggccaacgaaatcctccggtccatacagaagctgtacgacgaggcggcgcggcggctgcccttggacgagatcccggagctcgtcgactgcctcggcgaggtcggacactgcttcggcctcgccgaccccgtcagcaacatcatcctcaacgccatcgcccacctctccggatcaccgcccctccaactccaagaccacccaccgccgctcccccggaagaggacccgcaggagctacagcgagtggtgggggttcatctcatccacctctctcaacggcctcatcgccttcatgaaggtctatttccgctacctcaccggcgaccaggccaggcgctacctctacctcgcctcctacgacctcctcctcgccatcaagttggtccaccatgaccgccatctcccactcccgccatcccccctcctccccgacggtggcaagatgaagaacgccctccggatcgccgcgctcaaagcaggccaccccgcgcccgacgacctggcgcgcaccatgaccgcgcagtacccctctcatctactctcccctatcgtccacaagcttcaggggtcggacctgctcaccacccatgacgtccagtccatcaaggacctgctcctcaacgcattccaatggcccccgcccaacatggacttcttgtgctgcccaaatggtgagtcttgtgctcaagccgcccccgaccgttttgctggaatctcaccaaatcatgttcaatttcagaaactcctatacatctcggatcttacgatagatagcgcagccatagagacaaagctatcaaaatgcgtagcgaaagtgcttggtggttgtgaagaacatggacatgtgaactatgatgcctccgccatgtgagcacatattgtccctgaacatgtgcctcctcgacaccatccattgcttctacatcagggcacttgccgtgctgcccctgcccgtatcagatgactccatgcgccgcggacgcctcctccgcgcaatcctcatgtctggacaatgcttcggccccttggatcccgtatcaaacatcatcatcaacaccctctggtacgacgccgcataccctcccctgtatccaaaggatggcggtggcggcgattgtgaggttgagttgccgcaggatatctctgacacccaagccatgtctcgcattgcatcccgttccctcaacggccttgtcgccctactccgtgccatcaccaccaccaccactggctgctcgctctccaagcatgaggccgtggagtacctttggtccaggcagtgtgacctcactgacaagctacagcagacggtgatgacgaacaagaacccctactctgctgcagccaaggcttcagagcacccgcagcacaccatgcttgggtcattcctcatgtccctctgcggcgagaagcttgatcgcctgcagcacttgctgagatccattagtgatggctccggctgtgtaatctccaacgctgattgggagcagcttaacgcaatgatccaagagcagctaaccacgatgattggcagaaaaagactgcctccatttgatacacaagctttagcagcattatcgaggagaaggtcagactatgtgaaccggcaaaggtttgttcgcagcaagctggaagaattgctagtcacatactccagacagcatccttgggaaccaagatataagcttgacctcatatgtggagtggaggaacctcaatcccactactggagatgctaccatgctaacttcttggcaagcacccatggcactgtgctcaaactaaatcgtgaggcaaccacaacaccaaaccctaagcgcacactcttctttgctcaattctgggactcacaacctggtcgatttaatgaatcaaactcgaagcccatctgctgccctgttcaagatagcacatgttttggtctttgcaccacttgtgagggcaatgcaagtacaattttgcacccaccatctggatatctttttgaggatgatgttgatgacgccattgaagtttatgatgttaatgctgctattgatgtgtttggttctgcttcgtgcagtcttagtaaagataaagataaaggcctgctagagtcagatttcatatattttgatcatggaaggaatgcaaatcttacaaagattctgaatgacgactctattttatgatgaagacaatggtgatgatatagctctgctgttagatttggaggggatttattgacatatattgaggtgtggaattatttatcctcgaacccctccaatccctctgaacaaggcttaatatggatgagaaggggatcattattcaggttacaagtttgtctagtcattgtaataacagaagaatctatatttgcttttggacaatgagtcgcaacactgtatatttgtatatttgctgtaactagcaatggggccgtgctttactacgg

SEQ ID NO: 22132 - DNA, 2944 bp, Oryza sativa
  ref <308>: DATABASE ACCESSION NUMBER: AK072330
  ref <309>: DATABASE ENTRY DATE: 2001-12-06
gcctcgctgactcgctccagccagcagcagcagcagcagccactgctcgcgacggaacagacgacaccaccacgacgcccgcgtcataaaggcatgggcattgtcgcaggctagccacagcgacggggtagcagcagcatcagcagcagcagcggcaacagcgaccggcattgatagcggcagctgaggaaggaagagggcgcgcggtcgccgcaggagcggagcagggggggcatgggctgggcgggctgagcgctgagcaggagatggctggagagcgacgccctcggaggcattaatggcgtcgtccgcatcctcctcctcctccccatcctcgcggccgccgctgatggctctcccctctttttaccggcccccttggccgtccgagaggggcggcgagcagcgagccaccgactgttgggccggatccccagcggcgggaggcggccgggcgcgtgccaccgccatgggcatcgacctcaacaacaccgcgagcggcggcgaggaggacgcgccggcgccggggccggtgtgccgggatctgtggcacgcgtgcgctgggccggtggtgtcgctgccgcggcggggcagcgcggtcgtgtacctgccgcaggggcacctctccgcggccggcgccggcggcgggatccgcggggaggtggcggttgccctccctccccacgtggcgtgccgcgtcgtggacgtcgagctatgcgcggatgcagcgacggacgaggtgtacgcgcgactggcgctgcgggcggagggcgaggtatttgagaggaacttgcatggtggtggaatcgaaagggaggatgacatggaggatggtgatgaggaaaggaagtccaggatgctgcacatgttctgcaaaacactaacggcctctgatacaagcacacatggagggttctctgttcctcgtcgggctgctgaggattgctttccacctctggaccacaaacagctaaggccttctcaagagcttgttgccaaggatttgcatggagcaaagtggaggttccgccatatttatagaggtcaacctcgcaggcatcttttaacaactggatggagctcctttgtcaataaaaagaaactggtctcaggggacgcggtgttatttctccggggtgatgatggtgagctaagattgggtgttcgaagagctactcagcttaaaaatgaagcgattttcaaagcttttagtagcgaaagttcaaagatgcgcacactgtcggctgtggctgattccttgaaacatggaagtgtttttcacatttgttacaacccaagggctactgcttctgagtacgttgttccatattggaagttcgtgaaaagcttcaaccatccagtttgtattggaatgaggttcaagtttcattttgagagtgaagatgttaatgagaggcgttctggaatgattgccggtgttagtgaagtagaccccatcagatggcctggttcaaagtggagaagccttctggttcgatgggaggatgctactgactgcaacagccaaaatagagtatctccatgggagattgagatagttggtggttcaatctctgttgctcattctctgtcggcatccagttctaaaagaaccaaattatgccctcagggcaatttggacgtgccagctctgtatggaaatggtcgtccagactcggtggaaactgaaaagttccccagggtcttgcaaggtcaagaattgatgggttctaggacccatcgtgctacttgttctcctcagtcaatcgacattacaaaaagtaagtcttttgatgcttggagattccttactgatacacgaagctgcatgttgggcagttcaacaagcagacttccagtgcagtactctggctatacccaccaatctgtaagcttcggtgaatctattggattcccagaggtcttgcaaggtcaagaaatttctcagacagttcctccgtttcaaggaatgttgcctgatgcatgttcagcgaaaagcagatatgaattaaagaattatgtgtgcaccccagctaccatgaatggactatcatctgcaaatgaaggatattgtctctccctgtcaactgtgccaccttctccaccttccagtcttatgttataccaaacaggggtaccacagcttgaattggcaagcaagaacaatgacaaaagtggaaatgacagccaaccagccttgcgacagcacaagttgctcagtgaaactagctgggaccagtttaaaattggaaaggcttcaacacctgggaatgctactaagcctggtaatggtggaagggaggttgacagaactagttgccgcctttttggtttttccttgaccgagaagattatcccaacagacaaagatggtgaaaaggaagtgagttatgaaactgattgccaaaatccacggatgctagacttgtttgggtacaattgcagtacgcctggtgctcttcatgccctttgtgctgctcctttgggaatatgatgctacttgagtaactgggagggatacgtacatgtggagacgcagccactccacgcttcatcccagatgtaaacggcatcggtctggttatggtcccaccgttcctgatgctttgcatgtaggtattgctgcctcacgcctgaatacctacgtgcggtcaggcgaataaagcgactcgattgtatgtttgactgcagctctagctgtcgagtcggaagggcgatgatgtttatcgtcgttaatgtaccatcggcaccctgtttatgcagaaatgtggacctaattattatgaacttatttccttagttctatgtatggttagcttctgatctagacctagttatgagcctatttcagaagtgctatgtatggtttgcttgtcaacatttgtttctgtatcggtacaaatcactatgtttgtatgtttattatgcacttcttttgtgtttt

SEQ ID NO: 22133 - DNA, 4067 bp, Oryza sativa
  ref <308>: DATABASE ACCESSION NUMBER: AK072331
  ref <309>: DATABASE ENTRY DATE: 2001-12-06
ggtgccttctcgaacaaaccgacgcggcgacgccttccgggagcgaccgccacctgttcggcggattgccgttgaggaggatcaatgacgtcgctgcggcccctcgaaacctcgctctccataggcggcaggccgcgccgtggtctcgtcctcccgccgcccggagtcggtgcgggtgtgctgctccgccggggagcgatggcgctccctgggcggcgcggcttcgcgtgccgcgggagatccgcggcctcggcggcagagagaacaaaggagaaaaagagaagagattcttcaaagcagccattggtgcatctccaggtttgtctagagcaccaggttaagtttggtgagcatgtaggcattatcggttccacaaaggagcttggttcatgggaggagcaggttgaactggaatggactacaaatggttgggtctgccagcttaagctccctggagaaacacttgtggagtttaaatttgttatatttttggtgggaggaaaagataaaatatgggaagatggtaataaccgtgttgttgagctgccgaaggatggtaagtttgatatagtatgccactggaatagaacagaagagccattagaacttttaggaacaccaaagtttgagttggtcggagaagctgaaaagaatactggcgaggatgcttcagcatctgtaacttttgcacctgaaaaagttcaagatatttcagttgttgagaatggtgatccagcaccagaggccgagccaagcaaatttggtgggcaatggcaaggaagtaaaactgttttcatgagatcaaatgagcatctgaataaggaggctgataggatgtgggatacaactgggcttgatggaatagcactgaaactggtggagggcgataaagcatccaggaactggtggcggaagttagaggttgttcgcgggatattgtcagaatcttttgatgaccagagtcgtctgggggcccttgtatactcagctatttatctgaagtggatttatacaggtcagatatcgtgctttgaagatggtggccaccatcggcctaacaaacatgctgagatatcgaggcaaatattccgtgaacttgaaatgatgtattatgggaaaaccacatcagccaaggatgttctcgtgattcgcaaaattcatccctttttaccttcatttaagtcagagtttacagcctctgtccctctaacacgaattcgtgatattgctcaccggaatgacatcccacatgatctcaagcaagaaatcaagcatactatacaaaacaaacttcatcgtaatgctggacctgaggatcttattgctacagaagtcatgcttgctaggattactaagacccctggagaatacagtgaaacatttgttgaacaattcacgatattttatagcgaactaaaagatttcttcaatgctggcagcctatttgagcaactggagtccatcaaggaatctctgaacgagtcaggcttagaagttctctcatcctttgtggaaaccaaaaggagtttggaccaagtggatcatgcagaagatttggataaaaatgataccattcaaattttgatgactaccttgcaatcattatcttctctaagatcggttctaatgaagggccttgaaagtggccttagaaatgatgcgcctgataatgctatagcaatgcggcaaaagtggcgcctttgtgaaattagtcttgaggattattcatttgttctgttaagcagattcatcaatactcttgaagccttaggtggatcagcttcacttgcaaaggatgtagctagaagtactactctatgggatactactcttgatgcccttgtcattggcatcaatcaagttagcttttcaggttggaaaacagatgaatgtattgccatagggaatgagattctttcctggaagcaaaaaggtctatctgaaagtgaaggttgtgaagatgggaaatatatttggtcactaagacttaaagctacactggacagagcacggagattaacggaagagtactctgaagcacttctttctatattccctgaaaaagtaatggttattgggaaagcccttggaataccagataacagtgtgagaacttacacagaggcagaaattcgtgctggcattgtttttcaggtatctaaactatgcacagtacttcagaaagcaattcgagaagtacttggatcaactggctgggatgttcttgttcctggagtggcccatggaactctgatgcgggtggaaagaattcttcctggatcattaccttcatctgtcaaagaacctgtggttctaattgtagataaggctgatggagatgaagaggtcaaagctgctggggataatatagttggtgttattcttcttcaggaactacctcacctttcacatcttggtgttagagctcgtcaagagaatgttgtatttgtaacttgtgaatatgatgacacagttacagatgtgtatttgcttgagggaaaatatatcagattagaagcatcatccatcaatgtcaatctctcaatagtttcagaaaaaaatgacaatgctgtctctacagaaccaaatagtacagggaatccatttcaacagaaactccaaaatgaattctctctaccatcggatatcgagatgccactgcaaatgtctaagcaaaaaagcaaatcaggagtgaatggtagttttgctgctcttgagctttcagaagcttcagtggaatcagctggtgcaaaagctgctgcatgcagaactctttctgttcttgcttcattgtctaataaagtctatagtgatcaaggagttccagcagcctttagagtcccttctggtgctgtgataccatttggatcaatggaggatgcgctcaagaaaagtggatcactggaatcctttacaagccttctagaaaagattgaaacagccaaagtcgaaaatggtgaagttgatagcctggcgttggagctacaagcaataatttcacatctttccccaccggaggagactattatatttctcaaaagaatcttcccacaggatgtccggttgattgttagatctagtgctaatgtggaggatttggctggtatgtcagctgctggtctctatgattcaattcccaatgtcagtctcatggacccatgtgcctttggagctgcggttgggaaggtttgggcttctttatacacaaggagagccatcctaagccgtcgagccgctggtgtttatcagagagacgcgacaatggctgttcttgtccaagaaatactgcagccagatctctccttcgtgcttcatactgtttgccccgctgaccatgaccccaaggttgtccaggctgaggtcgcccctgggctgggtgaaacgcttgcttcaggaacccgtggcaccccgtggaggctgtcatgtaacaaattcgatggaaaagttgccactcttgccttttcaaatttcagtgaggagatggtggtgcacaactctggtcctgccaatggagaagtaattcgtcttactgttgattacagcaagaagccattgtcggttgatacaacctttaggaagcagtttggtcagcgactggctgcgattggccagtatctggagcagaagttcgggagtgcacaggatgtggaaggttgcctggttgggaaagatatttttatagtgcaaagcaggccacagccatagcatggatgtgcgccaatatcagtatggttaggtaaataaagtttgccgcatggatcgactgttgtaatgcgaatagccttcacgcaaaactcgaagggttgtcattagtgtttctttactattttttttggaagcaaggggaaaaaataatgcctaaattctaaaggaaatagaagtttaaggcctaactaattcaaatctttcatgccatggcctgagaatgctaatattagcacaaatcgtatggaaatgtaactagtattcaaacaactagatctcgtacggcttgttggaaaatccgttgtaattgatgtagaatttggcataacatgtaataactacaatgcgatgtttgttactgt

SEQ ID NO: 22134 - DNA, 4793 bp, Oryza sativa
  ref <308>: DATABASE ACCESSION NUMBER: AK072332
  ref <309>: DATABASE ENTRY DATE: 2001-12-06
ggagagagagagagagagagcttcgcaggcgacgatggcgagcggcggcgtggtgaagaaggagatcggcgggaaccacgacgtcgtccgcttcggcgtcaacgacagcgtcaagggggacctcgcgccgccgcacccgctccaggccagcgtccacaaggaggccaagttctgggcggacaagaagaggttcggcgcggaagccatctacggatccgccttcaacatccgcaaggatcttgatgcccaaatcctctccaagttccaaaggccccctggtgcattgccgtcatctatgctaggatatgaggcactgactggttccttagatgattttgggtttgaagattatcttaactaagaagaaaaataaggattcaagcaccaagaagcagccggcgagggaggccgctgctgcgaacagcgagtcgagggcgatggtggcggagagggagaaggaatacgaccggctgtctaagttcctcgtggtctacctcaatgctatttgagacgctgcggcctccgaggatggctgggtcctggggcgtggagctctggaattgctgctcggcggcaccgcctacacacaagcgacaagtgcgccacaaatctctctctcgatgcagcaagtgcagcggagggagctgcaactggtcgccgtttctgccatgctgatagattgcaagtacgaggagatttgggccccagaggtgaacgacttcatcttcatatcagatagtgcatacactagggaacagattcttgcaatggagaaggggattctgaataagcttcagtggaatctcaccattcctacaccatatgtcttcattatgatgctatctgcgtctgcagataacaaaagtgacaaggagtacgggctggtggcatatgcctctgctgtctatgcagccaggcccaatcctcgtcatttctatatatgaagaaattgctggatccatcctctcggctaactaggacgttgttccactagatctccattattcctagtgcaggtttatttggattacataatcccctatcgatttagttccctttattgttgaacaattggagataatatctttcacgataattcgtaccactgagcaaaattcaatgatgcaattattttatatgcaactcatttggtgaacaagatgtatcttgtggcaaacaacgagatgaaaagttacttgatccttcaggcatacctgtgattttccaatctattctttgcacgttcttggaaagattggttgtccctgatagctgtccgtagtgattcatggatactgtgtggcattttactttggggctcattttggatttgataaagaagtcaggtttgctcctaattcaattttttccctgttgatttgcaccaccttttctcaagcctgtcattttaattatatatgctctaccactctactaattaattctcactctgtgtgcaaggatgtgtggtagtgcagtcacatacttacatgttgtgagtctagattattttagtgacacatatcatgatttacaatctgacaacgaatcattctaaaatgatttgctccattaactgtcttaattatcacgaacccagatttggtttgtcacaatattaactcttgataaatcctttcacgtaaatcaacagactacactttgttaagtccgcctcccaaagaaattttgctaccttctgtccacacctctaaacaaaaccacctatgatagctaaaaaaataccaatccgaattaagataataagtttagccgtcaccatcttctcaaattgctttttgcccacataattagtcagagtgatcagctgaatgcttttcccactcagcagtgctctaaaatgttactgacaaattcattttgccaaacaaatttagttcatttacattccagaaatgtatatgtcctatcagttgaacatacttgcagggattattccttgagtccttgtctccttgaagttagttgttattgtgccaatgttgaaatattcagtatatttgctgaattttcatgctttattgctctgcaaaccatggttcctgatttctactctgtgtactattttggttcagactggttaaatgtgttggagtacttcaatttttactgtttcatgagttcaaaatataaattaatcattccagtgaagcatcgtactgtgctattctgagttgtatgctgcaaaggttaaattgtgcctccatccactttcaaactgaaattatcacggaagaatgtacagcaaatattctcttcacctatcttttctgaagtaggaatgtgtcctaatccagtttcactttttaccctgctgctctgaataatcaacagaaagagatgttctactgctttgtacttcatctctggctgctactagcactctgaagaatcaccctgagcttatcacccgtcatttcctctctctcctttctctctgtcttggttgaaattacattttgattggttctttgacaactgtggagcagattgccaagagaaggtcagctcatctgctgaagtatcctactgtgacgattataagccctgggatcagtaacactagagtccattcaagactccataagtaatgccatggcagatgtgcatatttgctcttaatataataaacaccagttgtgtaccttcggataatttatattgcagtttgtcaagaacatagctaaattctaattgagaaaggaagttctgcattgaacggatcacagttcttatgatttagtgtaaatgattcagtcaggccgtgcattttccatagttcattttcaaaaaaaccttgttctttaatgggtctatctgtaaatgcagagagcacataccttattcaaataatcaagatagatcagattattttccttttggataaaatttatcgagttaaattcaagccagatagacccacgggaagtttatatatgatgtgtgtagtatgcatgaaacttaggatgtaggttttcttagtaaagttacatcctacaaaataatgttcggatacactacactttccacattcgcatacaattactaattaaaaaaagatgttagcaccacaacagcccactgtattgtttgcaaacaaacacttcatagccacaattactacaggtggaaaaaaaaaaactacctcatctttattaacccccaccttcttgcacatactctgcatccactacttatcaaaactacaacttttagatttgttaactatgtctataaaatactatatccgtctaggaatgcgccttggattctatgtattatcaatgcaatatttaaaacttataattacatttttacaactattcatatacgagttctatacactcagtgctaggtcctaacagaatgctgaggccctcaagttcaaaagattatcacagagccggcaacaactcattgattggtcagtaaaaataaaggtaaataaagaagcgtattcagtattggaaaacgtgcaaacaaatacttattatacatattttcaaaaaaaaaaagctatgaaaaattaccatctttcaagtaaagcaacaattcttaacttaaagaaaaacttaaatatttatcgataacagtacaaacctaatgtaaaaaaaagttataaatcaatttattcaaatttgtgacaactctcacggcacgccgcgcaaccacatctagtagtttatatgggcacttgacctccctagtacaaggaaataatcattatttctccctaattaagactttccttgttgaaaaactttccaaatctctaatccttgattgtgttgttgctgcttgctgcgcatgtgcctggcttccatctttgctgcttgctgcacatgtcgccccacatgacaccttcactcttcttagagcagatacagtagcagactataagccagctataaacatatttgaggaagataaaagaggagagataagagcagataaaagaggagagattagagcagcgggctattaacacttcttttgtgttaattcccatcaagacttcttttgtggctggctattaactgtgttatggactatgcacaggtttcaaaggagcatgggggtttcatgagatttatccaggtttcttgcctaggagcatcggcctcttcttctagaatgctgagggccaaggctgctggggaagaatctgtgttgaaggaatttcctgaggctacaattatgaggcctgcaactatgattggcacagaagatcggattttgaacagatgggtacagtttgctaaaaattgattcccggtctacaaagattcagcctgtttatgttgtggatgttgctgctgctattgtcaactccctcaaggatgatggcaccagcatgggaaagagctacggacttggtggaccagagatttatactgttcatgatctggctgagctgatgtatgagacaatatgtgaatggccacggtacatcgatgttcctcttcctattgcaagggtatgaacttaaataatatcttgtgttggtcaaggcgaatggccacggtacatcgatgttcctcttcctgttgcaagggctatcgcatctcctgaaagctgatagattgggattttttttttcaatactctaagcctctaatgaaaggtgcatatggacttttattttagatgttctaactttgttttgtctctacctctcaaattgttactatatatgtactcttcaacctgccgcataggttggcacatgtttataaggtcaaatggaatatatttcttgtgtttttactacc

SEQ ID NO: 22135 - DNA, 3986 bp, Oryza sativa
  ref <308>: DATABASE ACCESSION NUMBER: AK072333
  ref <309>: DATABASE ENTRY DATE: 2001-12-06
gatcgttgccctaacgaattggtctccatccgcatcgcagagacttgtccgccgctaacccttgtactgcgccgccgcctgctgcactgacctccccgccgtcgtcgcgagccccgcggcttccggctgccgtcgccgcgagccccgtggcttccggctgccgcctcccccagcagtaacctccccgagcgccgaggcttgcggtgctcgcggcgccgccgtcgccccgagcgacagccccccgcgcgcctggtctgctcgcggtcacttagtcgtggaggagcgcgatgcgagggcaaacaggccgtggatactcgcgtcgccgccgtcgacgccgtggccggccccgcgcgcggcaaggagcggtgcatcgctgctgccgggcctatcggcggttggtagagcgctggtggtgggctatcggtgctgccaaatcgccgccgtcgacgccgtcgccggccccgcgcggcaaggagcggtgcatcactgctagcggatctatcggccgttggtagtgcgctcgtggtgggctatcggttttgccaaatcgtgtgtcctcgccgtctcagaccgtggtgggatgtttggaagaaaaaagttgtatcacactggtatgttgtttgaatggaaaatgatggtttatggtttgcaatgaaaaatgcatgattgaatgaagggtcaatatgtttgagtactgcatatatctgaaactgtttgaaagaacgtttacatcactgagttgaccaagataaaaatagagaatttgttatcatcaattataagtacttgacatgttttgctcctgtttgtggcaaatttcttcagattcttccttgtgtagatgcattatgtcttcttggacttgaatcacctcattcatggttgaattgatcaaggtggtggccactttagctctaaaagtagttgtcgtgtgctgaaataataaaacgaggaaaaattagacatgatatacttcttcagcacgtagatcgcatagcagatcttagcagagaatacttgccattgcatcgtactcgggggataggtcttttccattccagtgttcaatgcacttgagcgtaaacaatccacatgaccatctgaaattttcaattatgtttatagtgttacatttagacatcatagtaatttttatttacagatagtagaaatggttacccgtccttctgttgaggcacttgcatcgggcatattggccatttcgtgatgttcgtagaattccatttataagtcttgtgttcatcttgtttggcataacgaagatacttctctattcctttgatctgttatattgcaaagaaatataattagttgtagtgctttcagaagggaagtgtatgaaatgtgttttcattataccgtagtggtaagggttttttctgcatcatagcttgtcgtatccatatgcagtgagtccagtatttggattttttcattgacaccatccaggacagctacataccagtgggccgagtttctatttaagggtaggaaaatctacatgcggaatcatgagtaagaaatgcattttcacttatggatataatgtatacgatgtatgtattaccatttcatgctctaaatagctggcagcaactttagatctttgatcacgatatctcttgttgcatgtacctttgtctgtaccattaattttccacagctggcattgtgttgcagtttcaaggagtgcaattccctgtcctcgtggagtgtcggattgcttgtctatgatgatttgtatgtatgcatctatgacctgtccaatagcagtgcatattgtgagtgtttaattattctgttgttggttaaattagaagcaggagatagcagtgcttacagtgccgttcaaccactttgctttggatggagcctgttttggtaggataagtggtttcagatgctgtcgaaaaatcttgattcctgcaattgttgatagcaattttttgtcttcactcttagagatgtaactcaaggttacttcatccagcaggcttagatcatgtggtttcggttccctactagatttaactggctttggaaatgtttttttgtagtagatgaaatcagtttgtgacttgtgtgttggcttgataatccttccctccggtcgtctaagccttccgccaattgttgataactgctgcaatgtacaagcaattagcataatggtcagtgtagcatttgtaatgtagatgtaggtctattatttgaaaaaccagtgttggattttgctggctattgtcatcgctttcgattatgtgtggagaattagctgttccatttggttgactatcgtagttctgttaagatgcaacaagattagttagtcatttgtaatgctcattggaatatactattttgcttgcaaccttacctttgaatcatcaactaggtcttgtcggcaatctgccctggaatcaattactgtctcttcttgtttggctgctggtttaaatttacggaaagttcgtgaccttgaagttgtacccaacctgtactttattgcctatgcatgttcgaaatcataaatagtacaagtacaatatcattaacttagtacctgaatttgttatgagtacaataactgttaaaattggttctgtacctgaatatctcttctattttgaatgcaagtattctctattgagattagttttgtggatatcttgttgtccagaaactgacaaccttgttgaatctgcatgagttgtgtcataattgcatcgaaattggctgattgatgagcctacaacagagagatttaataaatgtttgaggtgagtagtttaaacttcatacagtgggtattacctcaggatctttgtaattttcaggacttgatgccttcaacagagagatttaataaaggtttgagttgaactgtttaaacttcatacattggctattacctctggatatttgaaattttcaggacttgatggaacattaacatcgtcttctatgtaaacatggtgtggactctcatcatcatcgcctcttccatgctcaggccattagcggcggtagccttccaacgtatgtcagtgtgcacattggatcgttaatgtgtacatgttcccatgcccaaaactgaaaaaaaaagagagcaagaatcactgaatgtggattgcaaatggagacgtgtaatggatactttcatacctgaagcaatgggctaggtactgagaactaactattggcttggtggtggggcataggatgtacccaatggtgaatagtacaaatcttctaagaaagtgctcatctgggtgttttgcactattgatttgtcttgccaactcatgtagggaaatgttcttccccttatgttgcttgtacattgaataatatttgtagtcttctccattcatgtgaggctttggcttgataatcataccatccgcaggcaaccccatgatacacttcacatcatgggttgttattggtattgctgttccttggatgttaattgtttcagttttactgtcatatctctcagcaatttgcccaatcagtttgcggtgaagggtgatatctggcagggcaagcatccggccaaatccaatcctctcaatttgtgatatcttactcttgtcaaaattagcaactacagcgagaaatctttgtattgaacatgcaatagtcatgtctttcataatgacaggctatgaagttcatgaaaaatagaacagcttcagaagtatggaagcataaggccaataaacaaaaaatgaccgaagctaaccttatgctcagtgaccagtgcttcagttgtgatttcatcaaagcgcggctggaccgaaggttcaaactgtgcttcatttctgacttcgtcgtcttccatttctctggcgatgttgatgcgataagagatcagactgtactttctttgtaaataatctgtaatttatatggggattaggagtgaaagtatgccatcagtcagctatttgttacgcagt

SEQ ID NO: 22136 - DNA, 4706 bp, Oryza sativa
  ref <308>: DATABASE ACCESSION NUMBER: AK072334
  ref <309>: DATABASE ENTRY DATE: 2001-12-06
gactcgaacgaaccggcgggggcgaatccttcgccccgaagcctcccactaccaattggtcccatccctcctcctcccgcttcccccccataagatcatttatctctcgtcattgttcgagcccaacacacgcgcgcgcgactcgtaggaattcggttcggattcgtgcgtgcaccgaaggaggcggaggcggaggcggcccaagcgtcggcgccacctcactctcccacccccatcccgccgcctcccccgattcctcccccaaacccctcctcctcctccgccgccgccgccgtcgccatgggtggccccctcaccgccgccggaggtcgaggagatgggggcgccaaggcggtggaaccgctccggcctccgccgccgcccgacccgaagacaatggccagatggtaccagctggaggcgctggagcgggcggtgcgggggaacaccctggcgttcctggagaccgggagcgggaagacgctcatcgcggtgatgctgctccgggcgtacgcgcaccgcgtgcggaggccggactcgcgccgcttcgccgtcttcctcgtccccaccgtcgtcctcgtgggccagcaggcgcgcgtcgtcgagcagcacaccgacctcgtcgtcaagcagttctgcggcgagatgggggtcgacttctgggacgccgccacctggcgatcccaactggaggacggcgaggtgctcgtcatgacgccgcagatcctgctcgacaacctccgccacagcttcttccgcctccaggacatcgcgctgctcatcttcgacgagtgtcaccacgccaggggcaatacgccgtacgcctgcattttcaaggaattttatcacccccagttgaattctagtgcgtcagaccctctgccaaggatatttgggatgtctgcttcgctcatttattcaaaagatttgaatccgcacaattattcaaagcaaatttctgagattgagaatctcatgaattccaaggtgtacactgttgatagtgaatcagctttgtcggagtacataccatttgcttctacaaaaatagtggactttgacgattccaacatttcatctgagctgcatgccaatattctcagttgtttgaatagattgaataaaaagcatatagaagctctggacagaaaactacatggttcatctctggaaaacgctaagcaaaggatatcaaaattgcatcatacatttgtatattgtttatataatctaggagtatggctggcagcaaaggctgctgaggtacaatcatacgaggaaaacagcctatccttctggggtgaaacattggataaaaatgttgagggcttcattagaaactacagcgaagaagtacatagagaactttcatgtttcttgaagaatggtcatattggtgaaaaatttccagctgattctcaagatgggatattgacacccaaagttcattgccttattcgaactcttctgcagtacaggcatatgcaagacttaagatgcattgtgtttgttgagagagttatcacaagcatagtattagagcacctactttcatctattcatcaaatgtctgggtggaatgttaagcacatggcaggaagccgtcctggtttgctatctcagagcaggaaaaatcatacagaaattgttgaatcttttcgaaaaggaaaggtacatataattattgccacacaaattttggaggagggtttagatgtgccaagttgtaacttggtaattcgctttgatccatcagcaacagtatgcagctttatacagtcccgtggtcgagctaggatggaaaactctgactatcttttacttgtcggaaggggggatgtggaagctcaaactaatgcagagaagtttctcgcaagtgggcaaataatgcgggaggaatctctgagattgggatcaatttcttgtcaaccacttgagaacaccttgtgcgaggatacctattaccgtgtcgagtcaactagagcaattgtgacactaaactccagcgttccattaattcattttttctgctcaaagcttccatcggatgaatattttaatcctctaccaagattcgatatagacaaggcatctggcacatgcactctgcatcttcctaagagcagtcctgtgcagacagttaatgtagaaggagaaggttctattctcaaggagacagtttgtcttaaggcctgccaagaactacatgccattggtgcactcacagattctcttttaccagaattagatgttccatgtgatgaagaacctgacatcgttgttgagaacaaaattgagcagccttcttactttccagaagaatttgtggataattggcgctccttttctcgtcttggcatatattattgctataagatctcattggaaggatgtcccaaaacagcttctccaactgacatactgttagctttgaagtgtgatttgggatctgactttacttctagctcatttaaattgccaggtgggcaagacaatgctagtgttaccatgaaatatgttggcatcatccatctcaatcaagaacaggtaattattgctagaagatttcagacaactattctttcgtttcttattggtgatgaccatttggaggttagcaatggtattaaatacttccatgagatgcaagtgcctattggagtagtctatctacttctgcctttagtttctggcagaattgattggtgcagtatgaagttctcatcctcaccaatatatgaagctaacaacaaacatatgacacattgccattcttgtaaagatattgatttactgcagacaaaagatggtcctttctgcaggtgcatccttaaaaattccattgtgtgtacccctcataataacatcttttatgttattagtgggtttcttgacttagatgcaaattcctgtttgcctcaacatgatgggactgttgttacctacaaagattattttaagactaggcatggtcttactttgacttttgaaaatcagccgctcttggctggcagtaaacatgtgaaagtgcggaacttcctccacaactgctactctaaaaaagaaaaagaacctggtgatagatatagtgttgagttgccacctgaactctgcagaattatcatgtcaccagtgtccgccaataatttgcacatcttctcatatgttccttccataatgttccgcatccagtgcatgcttctttctgtgaaattaaaggtccaattaggcccaacagtgcagcagtttgacgtaccggttttgaagatcctggaagcattaacaacaaagaaatgccaagaagaattttcacaggaatcattagaaacacttggggattctttcctcaaatatgttacaactcggcacctttttagtgaatacaggcttcaacatgaaggcatattaacaaaaatgaagaaaaacttgatctccaatgcagctctgtgccagctggcctgcagcagtaatcttgtgggttacattcatgctgaggagtttaatccaagagattggatcatcccttgcttggactatgatgagcgtgataacaaaaaaatttcctttctggcacccaatggtatgtacagccaaaggaaaatgtctattaaaagtaagaggattgcggattcagttgaggccttaattggggcttacctcagtactgctggggaaaaggcagcatttcttttgatgaaatcattagggatgaatatagaatttcacactgaaattccagttgaaaggaaaatttcaatgaaagctgaagagttcattaatgtgaggagcttagagggaatgcttggttacaagttcaatgattctttattattgctcgaagcattgacacatggctcatatcagacttctggccctacttcatgctatcagaggctcgagtttcttggagatgctattttggatcatcttttcactgaatattactacagcaaataccctgactgtactccagaattgttgacagatcttagatctgcctctgtgaacaacaattgttacgcgcatgcagctgttaaatcaggattaaacaagcatatccttcactcatcatcagaactgcataggaagatgagctactaccttgaggaatttgggcagtcatttacaggtccatcttatggctgggaagcgggcattggtctaccaaaggttctcggggatgtgattgaatcaatagctggtgccatttatctcgacagcaagtgtgacaaggaggttgtttggagaagcatgaagcggctattggaacctcttgccacccccgaaaccatcgagcctgacccggtgaaagggctgcaagaattttgtgatcgtagatcattcaaaataacctacgaaaaaaaccatgttgatggagtctcatcggtcattgctcgggtaaaggctggagagactacatactccgcaacaaaatcaggtccctgcaagttggtggcgaaaaagttggcatcaaaggctgtgcttaaagatctgattgctggtcacaaagatacagaggctgctgcagtatagtgatacttaactatttaagcgtgcaacagtagctaacaattgatatagatagttgcgcacaatagaaaagttttggttggattcatacatgtaatttggaaatgctcctttttgtgtgctcgcaaacgatgcgtgtgaacggcctcatgaattctggtaggttttcatgcttc

SEQ ID NO: 22137 - DNA, 2956 bp, Oryza sativa
  ref <308>: DATABASE ACCESSION NUMBER: AK072335
  ref <309>: DATABASE ENTRY DATE: 2001-12-06
gagggagtcacaccaaattggaaaaccgcattcctaaaaccctacccgacgaaattgcaatggcggacggcggcggcggggccggcgacctcctgagcgcgctccccgacgacgtcctccacctcatcctcctccgcctccgctccgccgccgccgcggcgcgcaccagcgtcctcgcccgccgctggcgcagcctctggaccaccctcccggagctacgtttccacgccgtcaccgacctcgcccgcgtcaccgccgcgctcctctcccacgacgccccgctcctccaccgtctcgagctctgcagccacgaccccgccccgcacgaggtcgccgccgtcctccacttggccgcgcgcagcttagcaggcaagctcctcctcgacatcgtgatgaggaagaagagaaatccggtggcggcggcggcggccgggattggggccgcgtttcacatcccctgcttccggaaggccacggagatcagcatccgcttcgcctaccttaccatccggctgcctcccttcggtgtcttcgcgaagctgtccgtgctgcgcttgacccgcttccggcttgacgacagccagtgtgatcatctcggcgacatcgtctcctccgagcggtgcccgtcgctgcaagcgctcactctctgcaattctcaaggcttgtcaaatcagccatccgctccaagactctcctcaccgttggcctctttgagctggaagaactgcagcagctcacgatttctgctcccatgcttagaacactgcatctggtccattgcttagacaagagggcggtaagagccgctgacatctctgctgcggcgttggagaaacttgggtggattggtctgtgcgattggaactcggtccacttcaatgtgatacaacacctcaagagactcgacaccttgaacctttcggtgtatggaccgccgaatcttgtcgattcttgatacccgggctctatgtcactcctccagcatttcaaagcagtctcaaatgtcgacctctatctcatttatccatctgtgagtacaccttctctcttgttgctgaactacattatcgaaacgttgaacgaaatgtcgtaatactctctttgtagttccccagcagccactgctagtatgccggcataggcacacaacattttaaaagaggattttgaaattgttgatataacccatggtccagatatcatttgtccgagtccgtgttttagtatatgtttcacattagcatctaaataagtgtcctaatcaaacgtgaatatataagttgggaggacatgtatgcactctggtatgtgtatttgcacatgattggttagataatggagaaattgagggcattcctggatcaatttccctttaaaagtgttcccattggatttctcaagccatacatatggaactttctggatgttctttatctgaagctgtatatacctcgtacatttctcaatctcctcacctccttagtcctgtgcaatgtcaaaatacacatattaattaagggatggaatggtgtacttactacaataactatattaatgaatctacaacttctgaccattgatcaagatcttcagtttccatttggtcctgttttacacattgttatgtaagacattgtatgaatctctgttaatttgcagagcatggttgactgtgagttcttgatggaggacatgaatactctccctgccattgagatcttatctctgaggtcaataacagcaggccatgcctttggaccttgtgtattccaattgcttaggacgtctactggtgtaagagagttgcacctggacttggatcatcaccttaaggtaatgcatacttattcaatgtgattaaatactttggttgctgtcaaaagtgatagaagtatttcttcttttacgcactcagcttgttcctctaactgtacacagtggtacttgatgtgtcggtctcgatactgatatgcccctccatggtgtatctattacaactaatggtctttccatattcagagtttcagactatagtgcctttgattttcctgtcagatcaactccttgcatccgattgttacatatggcacatgggatgtgaaaaattgcaatggtgatgagtgcatctctctctcatccttgtacccaccaaagagagtagtgctgctttggatttctgtgatatatgattgaaatatagctgccgatgttacttacttactggtgattgatatggatttgttagccatatattcaggttggtgacttagaagcaaaccacgccatacgataaattgaaatcttaacagtaaatattgtaattgtggtcggtgtatctgtgtaatgttttttacttcttttttgtatttctccctttctctacatgtcacagtcacttctctggaggggatagatttaaatcatatgccactcaatattatgaaaccaatgttttcagggagaagtttcttgctcatctggctgcatctgttacaagccgtcggactgggagagtatggatatctgcttgaattttctccagaaagttgaaatcaacaatttgagtggagcagagtatgaaatatgttttgtgaagcgactgttgacatgggcgccagtgctcaagatgattacagtaatgtttggtccttcagtaactgtcagcgaggaggtgtgccaggagctgcttagcttctctaggaggtgtagtccagggatttgcatggaaatttacttgcacggcaacagagccaaggttatgtatagagcagtgaacctgaagagacctagagatgattaactgacaatgaaatggcgacctggagcctagtatattcagtcaaaggagcactgtaattgggcaattttcaagcccgcctctgagatcaatctgttgtaaggatgtttgtctctcgtgatatagggattaattatgtatttgagcatggttcaatgc

SEQ ID NO: 22138 - DNA, 2785 bp, Oryza sativa
  ref <308>: DATABASE ACCESSION NUMBER: AK072336
  ref <309>: DATABASE ENTRY DATE: 2001-12-06
gtgtggccaccgcgagggtttagctttccttctcctccccgatgcctccgcctccgcctcgccgcgcgctcctcgtccccctcctccgcctccgcgccttctcctcctcctcctcctccctcgcccaccaccccccgttgccgcctcccccgcgccgccaccagttcgtcgccgccgacgccatcaccggccagggcggcggcggcaatccactggacccggcgcagctcctccgcgacgatccggtcgccataaccgcatcgctgtgggtctcctccttccgcccgcagccgaccgccgcagcgccaccgccgccgtcgctgtcgccgttcctgtcgcgcctcgagctctgggtgctcgcgtaccagaaggcctacgccgacgagacgggctcctacctgccccgctcctccatcccggcctccacgctctcctccctcctcgcgctccgcaacgccgtcctcgacgcccgcttccgcttcggcaaccgcctcacccccttcctccgctccccgcgcgccgccgccgcggcgcaggaccccgccacgctctccaagcgcaagctccgcgccctcctcaccaccccggggccggccccgttccaggaccgcgtcgtgcaggagctcctcctcctcctgctcgagcccgtctacgaggcgaggttctcacccaagtccttcgcctttcgccccggccgatctccgcacgccgccatccgcaccatccgccgcagcttcgcgccctacctctggtacatcaagggtgacctctccccgctcctccactccccggaccctgccctggtcgtcggcgcgcttatccgcgatgtgcgcgacaagaaggtcgttgatttggttcgttcggcattgctcaccccacctgtgaccgcgaggcccggcgatgaagatgcggcgaagaagaagaagaagaggaagtaccagaagaagaaggtgcttccagagggagagccgaagcctgacccctactggttacagacattctttgggtttgcgccggaggaggcactcacccagcctgattgggggcattgtggagtgctgagcccattgcttgccaatgtgtgcttagatgagcttgataaatggatggaggagaagattaaggaattgtacaggccgtccaagtcggatgttgtgggaggggaggatggagttgagcaggggaacacttcatggccagagtttgtccccacgagcggccctgacaaaacgaggaaggtggactacattcgattcggtggccatttcttaatcggggtgaggggtccgagggcagatgcagcagtgctccgaaaacagcttgttgaattctgcgaccagcggttcaggatcaagcttgacaacgagagcctcccgatcgagcatatcactaaagggatcatgttccttgatcatgtgctgtgtcgtcgtgttgtgtacccgactctccgttacacagccactggaggcaagatcatcagcgagaagggggttgggactctgctctctgtgacagccagtttgaagcagtgcatcaagcagttccggaagcttgagtttttaaagggggaccgtgaaccagacccacaaccgtgcttcaggatgttcgatgccacacaagctcacacaaacgcgcagatgaataagctcttgctgacaatggcagaatggtatcgttatgctgataaccgcaagaaggttgtcaacttctgctcatacattataagggggtccttggcaaagttatatgctgccaaatactaattgaggtcgagggcaaaggtctacaagattgcttcaaggaatcttagtcgaccattgaaggataagaaagggcagtcgccggagtaccacaatctgctgagaatgggtcttgtggactcaattgatggacttcagtatacacggatgtcgatggttcctgatcctgattacacaccattaccaagtggatggcgccctgaccatgaaaagattttgctggagtatataaagctcacagatcaacaaaccctggatgagcagcgaagctgcattagggaggaaggacttataactccacaggactacatttcaatgcttgtatggagctacaagaaaaatgcagttttactaccttcgttcaaagagaatgatcacaaaggatccacagaggacttgggttcagatacagatgaattgggtgatgaggaaataggaaatctggaccatgtcgattccccaaaggttgctgaaatgccatgagtgttgaattgatgaaaatgactactactctcatactctgaaggggcagttaacaagatagctgactgatgctgctggagttgcaagaaatcaactaactcgtggtgaacataaactatggtatagagctgtaatgtgcctgtcaaatctcttgcaatcagctgggctggttcctaagtgcctaactagatgtctgattcctactcagggacatcaaattttgtgcagcttcaacttcaacaatatttctcaatactcaggattatattggatgcttgctgcggtgagaaagaagccagaatggacattcagaggatcaaactttgctgccagactgtgcatctgcatgcagaaccagctgcttaccgccaagcttatattttagtaagactagcggccttaccaatcctatttatacatctccagcgcatttggaaaaatcacagtgtacacattctgcccaaacgtcctgttcgtgcaattttctactcatctgtagaatgttttacagaaagcagaggtcacagaatttacttataagg

SEQ ID NO: 22139 - DNA, 3409 bp, Oryza sativa
  ref <308>: DATABASE ACCESSION NUMBER: AK072337
  ref <309>: DATABASE ENTRY DATE: 2001-12-06
gggttccaatttctgagcggctgctcgttgttgttgctgtcgttgcagcggtggacctgatcaagaatgtgcaggtgcaggccatgatcgggccaccgagctcggcagcgaccgagttcgtcgcccacatcggcagccactcccgcgtccccgtgctgtcctactccgccacctcgccgtcgctgtcccccgcgcagacgccgttcttcgtgcgcgccgccgtcaacgactccttccaggccgcgcccgctcgccgccgtcctcgacgccttccgctggcgcgccgcggccgtcgtgtacgaggactcgccgtacgggagcggcatcctcccggcgctcgccgacgcgctgcagggcgccggcgccaagatcatggaccgcacggcggtgcccgtcgacgccaccgacgaccgcctcgacgcgctgctgtaccgcctcagggcgatgccgacgcgcgtgttcgtcgtgcacatgctccacaacgtcgccgggaggctgttccgccgcgcgaagatgctcggcatgatgtccgacggctacatctgggtggccaccgacggcgtcgccacgttcatggacaggttctccccggaggaggtcgacgcgatgcagggcgtggtcagcctccggccgtacgtgcaggagaccgacgccgtcaagaacttctcggcgcggttcaaggcgaggttacgccgggatcaccccaccgtcgacgatgtccgtgagcccgaccgtcctgaggttctgggcgtacgacacggcgtgggcgatcgccgcggcggcggagtcggccggtgtcgccggcccggcgttccagacaccgcagacgagcgcgccactgacggacctggaccggctcggcgtgtcggccaccggcacggcgctcctcaacgccgtcctgagcacgacgttcgacgggctcgccggcaagttcaggctcgtcgacgggcagctccagccgccggcgtacgaggtcgtgaacatcatcggcaagggcgccaggacggtcgggttctggacgccggagttcgggatcacgcaagacctgaacgccggcagcgccaagacgctgaggcaaatcctgtggcccggcgagccgcgcgacacgccgagaggctggaccgtgtcgccgagcgggctgccgctccgtgtcagcgtgccgacgaagcggggcttcacgcagttcgtcgacgtcggcaacgtcacggcgaccgggcggcgaaacatcaccggctactgcatcgacgtgttcgacgaggtcatgaagattatgccctatccggtgagctacgtgtacgacccttaccccgatagcccggaatcttacgagaagctcgtcgaccaggtgtcgtcacaggtcagtacatgccaaagttcaagagttcttgagacaatctgttcgtttgatttgttcgatcagagggacgtggattttcacccactcgttgtttacatattatctaaatagttagcaattttttttaaaaaaaatgataacatggatgaatatgaaatatatcactccacaaacatgcaatatcaaattcgatttttgttagttgaaaaaaaacaaagttaaattgaaaatagttgtacctcattcacatatgtatttgttatttttgttgcaacttgtagaagctgaattttaactgtatgtttgtggagtgatatatttaatactaatctatattgccaatttttttaaaaaaaaattataactatttagatgacatatacgaagtatgaaatcactttacccgatcagagtggttgaattgcaatgtttggtttgcagaaggcagatgcggtggtgggggatgtgacgatcacggcgagcaggatggaggaggtggacttcacgatgccgttcacggagtcggggtggtcgatggtggtggcggtgcagaaggagacgagcacgagcatgtggatcttcctgcagccgctcaccaccagcctctggctcgccagcctcgccttcttctgcttcaccggcttcgtcgtctgggtgatcgagcaccgcatcaacgaggagttccgcggcacgccatggcagcagttcggcctcatcttctacttctccttctccaccctcgtcttctcccacaaggagaagctggagagcaacctgtcgaggttcgtggtgatcatatgggtgttcgtggtgctgatactgacgtcgagctacacggcgagcctgacgtcgatgctgaccgtccagaagctgcagccgacggtgaccgacgtgagggagctcctgaggcgaggcgactacatcgggttccaggaggggaccttcatcgtgccggtgctcgagaagatgggcttcgaggggaggatgaggagctacagcacggtggaccagtacgccgacgcgctgtccaaaggctcggcgaacggcggcgtaacggccatcttcgacgagatcccctacctcaagctcttcctctcgcagtactgccacggctacaccatggtcggaccaatctacaagaccgacggcttcgggttcgtgttcccgagagggtcgccgatggtggcggacgtgtcgcgggcgatcctgacgctggcggagggggagaagatggcgcagatcgagaagaagtggttcggcgagcccggcgcgtgccagagcctgggcagcgccgtcggctcgtcgaacctcagcttccggagcttcggtgggctgttcctcatcaccggcgtggtcaccagcgccatgctcctcatctacctcgccgtcttcttctaccgcgagcgcgacgagctccgtgcggcggaggcggccgccgccgcctccggctccggctccggctccgggagccggtcgctgcggcggctgcgcgcgtgggcgcggcactacgaccagaaggacctcaagtccccgacgttcaagaggaggtggagcgacgagtccgtgaggaatggcagcgagtacgccgcgagccggacgccgaggtggggcgacgagagcccgtgcaacgtcgccggcgccgccgacgccgacgccggacggatcccggaggaagtcgtcggcggcatgagcccgttcagcatctccacgagctcggaggagaggaacggcgccgtgtctccggcggcggcggagttcgataactcgtccgatcgggcagcggtggtggcgggaacatctcaaccgcggtagatgtacatgtgacatggcaagttctcccagtagacgtgtccggtaggatatgaacattgacaggtcaagtacaagtagtgtgcaaccgtctcctcgcctgtagatagatcctagtactactgtactactaccagtagatgagaaattcagcaacttgaccgatgaagcattggcagtggctttgtaaagtgtaatatggcaacaataatatgtgattaatgtagatgtattttgggaatc

SEQ ID NO: 22140 - DNA, 2958 bp, Oryza sativa
  ref <308>: DATABASE ACCESSION NUMBER: AK072338
  ref <309>: DATABASE ENTRY DATE: 2001-12-06
gacccccaccaccaccactctccccgcctccgcctccgcctccgccgccgccgccgtcctcctcttctcgcggtcgctgcgtcctcgcctcggggctcggctcgtgctgccgccgttacgcgtgggctgatttcctcctcgcttccacgtacgccatctaggaagaggacggttgcgcgcgcggcggcggcgcggcgcgtgatctccgccgggggaggaggaggaggcgggggttgatgggttagatctggcggtttccgggcggcgtggatctgaaaccgtggtggaggtggtttggtttcggttcggggaggtcgccatcgttgctcctcgttttggccttgtgcccatttggagtcagccagctcgtgtgcggggaggaagcctctcatgtccaaaataggggcatgggtgtcggatgcggtaactgcccccctgttgcttcgcttccttccagatctgaaacccatgtgaatgctgctcctgctgctactttgagatagagcattgcgtgttcttggattggtggatgatgaggtgaaagtgaagagggggagagtgtgtttcctgtttgtgagagatttttttctctgaataaacctggagccgtggaggaggaagcagatcctatcgtgtagctcccgcggcggcggctgcggtggtggtggggaagaggaagaagaaggcggtggcggcggcggagccatgacgtacttcccggaggaggtggtggagcacatcttcagcttcctgccggcgcagcgggaccgcaacacggtctcgctcgtctgcaaggtgtggtacgagatcgagaggctgagccgccgcggcgtcttcgtgggcaactgctacgccgtgcgcgccggccgcgtcgccgcgcggttccccaacgtgcgggcgctcacggtgaaggggaagccccacttcgccgacttcaacctcgtgccccccgactggggcggctacgcggggccgtggatcgaggcggccgcgaggggatgccacggcctggaggagctcaggatgaagcggatggtggtgtccgacgagagctcgagctgctggctcgctcgttcccgcggttcagggctcttgttcttatcagctgcgaggggttcagcactgacgggctagccgccgtcgcgagccattgcaagcttctgagggagttggatttgcaggaaaatgaagtggaggatcgagggcctaggtggctttcctgcttccctgattcctgcacatcacttgtctcattgaattttgcctgcatcaaaggggaggttaatgctggttcactggagagacttgttagcaggtccccaaacctgcggagtttgaggctgaatcgatctgtatcggtagatacacttgcaaagatactactgcgtacccctaacttggaggatttggggacagggaatttgacagatgacttccaaactgagtcctactttaagcttaccagtgctctggagaaatgcaagatgttgaggagtttgtctggattctgggatgcttctcctgtttgcctgtcatttatctaccccctgtgtgctcaactgacaggattgaacttgagctatgcccccacacttgatgcttctgaccttacaaaaatgattagccgctgtgtgaagctccaacgcctttgggtactggattgtatctcggacaaaggcttgcaagtggtggcctccagttgcaaagacttgcaagaactcagggtatttccatcagatttctacgtagctggttattctgcagtgacagaggagggacttgttgcagtatccttgggctgtccaaaactgaactcactactgtacttctgtcaccaaatgactaatgctgcactagttactgtcgccaagaactgtccaaatttcacacgattcagactttgtattcttgagccagggaagcctgatgttgtgacaagccaaccattagatgaaggctttggagctattgttcgtgagtgcaagggattacaacgtttgtcaatatctggtcttctcacagacaaagttttcatgtatatcgggaaatatgcaaaacaacttgagatgctttctatagcatttgctggtgacagtgataagggtatgatgcatgttatgaatggatgcaagaatttaaggaaactggagataagagatagcccgtttggtgatgctgcactcttggggaattttgctaggctacgagacaatgcgatccctttggatgtcatcttgcaatgtcacgttaaaggggtgccaagtccttgcgtcaaagatgccgatgctcaatgttgaggtcataaatgagcgggatggtagcaatgaaatggaggaaaaccatggagatctgcctaaagtggagaaattatatgtgtaccgcacaactgctgggggcgagggatgatgcaccaaattttgttaaaatcctatagagctagctgagagtagcaaggaatcctcttattccataagatggtcggcggaatctgggaggaggccggggccgcggcaacagtggtaagctcttcaagtgtctcctcctctcctttgcagggacaggaaaaaccacgttggtgtgcctcccttatctcggagcatctggcctgggatcatcatccatcatccccccgtttcgccttttagcccgtttggtcataccgacgaggcccttatcctgttgtgcaattctgagcaagctcaggaccaccaccaatccatcatgttagctcgaccttttctctcttcttccctttattattttttcttctttttttaccttgtgtaatatgtagaacccacttccatttgcttttgacatttgccacagcggattgtgctgctgctggttgtaatgcttgttttcaagcctcctgaccgggacgtttcggggacgatgattagtttccttctctttgctcctgtgaatgcagtcagtgcctggaataatttctgcttc

SEQ ID NO: 22141 - DNA, 4987 bp, Oryza sativa
  ref <308>: DATABASE ACCESSION NUMBER: AK072339
  ref <309>: DATABASE ENTRY DATE: 2001-12-06
gtgttgatctgcttgctaaacaggaagcttataaattttatgtttataaattttaccagagcaatgtgaggagcagaggaggcgctatgtgcttataaattttcccagagcaatgtgcttataaatcagtgagtctaagctcaacaactttcttcggtgacagcttctgaatgaatagctgaacaagagggccaaaactcaagaacagctgcgcgctcataaatctagcataaatcagctactatgcagtgaaaagcacttctcttccaccgacagcttcttctatgttccaccaaaacaaaatcaaccagatcaactccctaattgctcagtaaccagagcaattttcccatttactggagcaaaaaagcaaaatcatttgctattcacccagcaaaatcatgagaagaataagttacattgtcatgtatggctcctgccccagcagcgaacgagacgcccggtcgcggatcctggccgatgccgagcggcccacggccatctcctgctggacctcatcggcgttcggcgacggcgtgggcgccgaggaggtcaccgagttcttcctccccatccagcaacgacgaggagcagatggcggctcgccggcatgtgtgaggtctgaggagatgccctcgccgtgctctcactagggacatcatggaagaggcaacagcgaggcggagaggagaggtgggggaggagggtggaggggagggtgaaggcagttttggaggcggctccgccgggaggggggatggcggtggcggcggcggccagatgcggagctccgattccactacttcactccagtaggtggccaacgcgcggggtgggagcagcagcgacgacctccaatggcggcggcggccgtctcctccctcctcgccccttcgggatcctgctactcccccggatgccacagctgctggggtcccgggcccggaggcgggcggcgcctaccttccccgcgccggcgcccgattaccgccgcggctcgccctacttgggcagtgccgaggaggagcaggttggagtgggggcgtgtggaggctcagaattcgggcgctcgcaccagctgccgagcagcactgcaatggctatcatccacggcaaggtcccatgtgaatgttggttatgggtcgccgctggtgttcccaggtttgaccaaaccggggtcaagcaggtgtctatgcgttgttggaatggtcggcaatgcagggaatcaagttggtgacgatagtgatgatggaatcaaggttaccaatgagaagcttcgtgctgttatccgcaagagcaaagaggtgttggagatccatcggaatctacttgagaagatatcggcatcagaaaggaagaagatcacttcaattatagaggacagttccatttataatgagcaagatccatttggtcaaagagatagttctttttatcatcttgatgaagttccagacgatgatgaatttagctatgacctacagatgtaccttgatagacgtccagatcaatctgaagttgttgcaactcaggattatgaggcacaactaagtcaaataagtgaaatgggacagtcagttgctgagggcactagtgatgatccatctgcttcagctgctgtagatcttatcaatatcatattggtagcggcggagtgtgctccttggtccaaaacaggtgggcttggagatgttgctggagctttgccaaaggctttggctaggagaggtcaccgtgtcatggtatgttttaatttttaaataagacttcctgaaccaatatttttggatagactcagtaagctaatcacatctaataagttctacaagtcaacacgtgatacaagcagagcaagatggcattcgagtctacaagaacttcagttcgcatacgctgcatatagtttaatcattacttagattgacttgattggagtaacaaacctcaatagacaggaaactcacaagtattcagttgtggcataattagttatacaaccttctcatatagaaccagttactacaaaataatatgatatatttggaataattgggacatgtcagcagaactcaccatatgccctattacatgaattggtgtgaaatatttaagcaaatttcacgacacaagttgttggctaaggcacatctattatgcactagagattaaaggacctaaattctgaacagtacacctttgcatgttgggtttcagtataataattgtaaatatagagtagtttcctgggcttgaattagctctggtactatgtccagagttctaacctaaacattttatcttgagagaaaatcttgccatcttgcaatagacaaatagttgaaactgagtgatgcagtagtacaggtatatgacctttctgcaaattggcacattttcaggtccttaggttgatctcttctatgtgttgctgccccctaattgacattataaactaatattttggtggttacatttgtagaagtgcttgaataggaaatatgtcttgtttcctttttccttgaatagtagtaacttgcaatgggtacatatattttataggtagtagtgccaatgtataaaaactacgcagaacctcaacagctaggagagccaaggagataccaggttgcagggcaggtatattattctgtcatgtcatgagaaccttgtaacttattgactatattctcgtttgagactatgtgtacactgtacaggatatggaggtaatttattatcatgcatacataggtggtgtggattttgttttcattgacaatcctatcttccaccacgttgagaatgacatttatggcggagaccgaacagacatcttaaaacggatggttttgttgtgcaaagcggctatagaggtaaaaatttgctcatatgtcaagtataccacgtgcctttccatgaggaaatacatccaaagtaaatcatcatttaccattatttgggagtggcaaatcctaaaacctccatccacattacacgtctggttacacagtcaacaaaccttgcaatagacaatctgaaaaatcttctttcttatttaatcttttatctttccattagtccttattttgtaatttggtgtcttgcttacgttttttatgctcaaagaaagatcagttgccttccttattgatctgttcaagcggcttttcaaggatagattttgaactaaagtattattaacatgattgacctttggttagccctgtttctctgtcttccttgatatgcttataaaacacaagattaccttgctttaggttccatggtatgttccttgtggtggctactgctacggtgatggaaatcttgtgttccttgcaaatgattggcatactgcactactgcctgtttatttgaaggcatactatcatgacaatggtttcatgatatatgcccgttctgttcttgtcatacacaatatagcacatcagggtcgtggcccattagatgacttcagttatctggatttgccagttgattacatggatcttttcaaactttatgacccatttgggggtgatcacctaaacatatttgcagctggtattaaagctgctgaccgtttgcttactgtaagccatggttatgcatgggagctcaaaacagctgaaggtggttggggtcttcatgggatcatcaatgaaagcgattggaaatttcagggcattgtaaatggcattgatacaactgattggaatcctaggtgtgatatccacctaaaatctgatgggtacaccaattattctctagaaacagttcaggcaggtaaacagcaatgtaaggcagcattgcagaaggaacttggtctcccagttcgtggcgatgttcctgtcattgctttcattggacggctagaccatcaaaaaggtgtagaccttatagcagaagcaatgccatggattgctggccaagatgtacagttaataatgttgggcactggacggcaagacctcgaagatacattgaggaggcttgagagccaacattacgatagagttagggggtgggttggtttttccatcaggttggctcatcgaatgacagcaggggctgatatactattgatgccatcaaggtttgagccatgtggattgaatcagctctatgccatgatgtatgggactgtcccagtagtccatgcggtcggtggtcttcgagacaccgttgagcactacaatccctacgaggagtccggacttggttggacttttgaaaaggcagaggcaaacagactgattgatgctctagggcactgcttgaacacgtacaggaactacaggactagttgggagggactccaaaagagagggatgatgcaagatctaagttgggataatgctgctaagctgtatgaggaagtcctcctagctgccaagtatcaatggtgatcagtccaagaagacctcgacggttgttcagtcattcatgaccgaaatgcctttttctcgtgtcagctgctcagatgcggccaccatctagttccatggcttacatcttcctgtgatttggatgaacagagttttttttgtcagatctgacatcattttcaagaaggcacatgatgaacctacttcccaggtgaatacagcagcggacgatgcctttgttggaaggtggcaaaacacatggaagattcagccgtctgccagcatgcacctctgtcctaaggagaggctccaagccccattgtgcgctctggagaggctccaaaccaccattgttcgcccctgggtaggttgttgagctcggttagatgcttttagtacagtagaatagcagatactagcggatagactagttgatatttcccctatgcaccgagtggttcggttgtaccttatttttttcttggctcttgttgtccagttcttcgatctttagacgattagcgtcccgggatttcccagatgacattgacattgatactagtgggaatttcccctgcaaatttactgtcagcttttcc

SEQ ID NO: 22142 - DNA, 2838 bp, Oryza sativa
  ref <308>: DATABASE ACCESSION NUMBER: AK072340
  ref <309>: DATABASE ENTRY DATE: 2001-12-06
gatcggctcgtctctccccttccccacctccatgccaccgacacgcgcctcaagctagaaccctagccccgatccccgatggccgcgccgcccgtctcgggggatggggcggcggcggcggcccccgtggtggccctgggcgccgcgggggcggtgggggggccgaggccgtacgaggtggccgtcgcggcggcggagctccggcccgtggactgcaacctcgcggcgctgtgcgaccacgtgcaggcggaggggttcgggtccggggcgttctccgacgtcgtcgtcgaggccatgggcgccacctaccgcctccatcgcctcatcatctcccgcagcgcctacttcaggaatatgctacatggtccttggagggaggctggagctcccacagtggtgttgcatatagatgatccaaacattgactcagaagcaattgcaatcgcgttagcatatctttacgggcaacccccaaagcttaatgataacaatgcgttccgagtacttgcagctgcatcatttttggatcttcaggatttatgtacaatatgtaccgactttattatttctgagctttggacatcaaactttttgcaatatcagctgtttgcggagagtcaagactatggtagtcatggggaacgtgtcagaaatgcctgctggggttatctttgccaaagtgccacattggaactacgagaggtgctcccaaaactttcttcacaaactttgcatgcgctccttacatctgacgaattatgggtacctaatgaggagaaacggtttgaactagcattatatgcgttgcttgcaaaggtcactctgtctgatgtagaagttagtggaaatgaaaatttgaaccttacgtcaagctctgcgaattctgatcattccatgaggaagggaaagagtccaatgaatgaagctggtgaggagcagcttatggggtctgaattgcagaacttaaaattacatgacaacacagagactataagtgcccataacactagtgatattccagatatgaatgctgaggcttccaggaggaaggtaaatgatttttccacaggaggaccatctggggaaagcacttcttatcaatttaacgaggatatctggctttctagtgaccaaacaaggaactacctctcaagaacctcttccagtaatgggttagttccaactgagtggggaaagcccaacgcaccactttggggtggtagggttgttggtcggcggcaagttagatgtgttaggggaagttcttctctttctgctgatgaatacaatgcttttatgaatatatttgaaaggggttctcttctctactgtaatatgtcatttgatgcattgttaagtgttcgaaagcaacttgaagagtttgggtttccttgcaaagctgtaaatgatggtctttggctacagatgcttctgtgtcacagagtacaagcaatagttgctgatacttgcacaaattgttgccttactggtaattcatgtgcttgtaaacaagcacatgtgagttcacatcatcactacaggcaagagcatgatcggagcagtgcttccggtactgtaggtaatatctacctcacagatgcccatggtgaaggaaatgctgtttttgggcctgtccgtgtcaatgtcagaggagcagttgatggacttgctggtattgggagaggaaattctaatgttcctggtgcagcttgggctcccacacgttacgtcttctctcgtgttccttatggacttggttcaagaaatggtcaacaaccattcgcaaatgatgaatcagaacctagagtcgactacaatggtgatatttcaggagatggtctgactgcattggttaatcttagccaagaaagcagtgcttctcatcatcagacagaaagtatatttgagacaggcattcaagttagatattctggtgctgcttctgtttcaaccccaggtggttcctctctccagatgcaagagtcaaaagagcatgaacttggatccaacttggaaactacagagaacacaactatctcgttggacatgaaaacaccacttagtcacttcccacctttccgctttggagttgagtttgaagatgtgcacaggctcgcagatagtcaggtgaagcattcgactgaagtattttatgcaggctctctttggaaggtaagtgtccaggcattcaacgacgaggatcctcatggacgtcgcacccttggactctttctgcaccgacgcaaggctgagcctttagacccattgaggaaggccaacatgtatgtagaccaccgggaaaaggtcactgctcggtatcagcttatctgtccatcgaagagagaggtcatgattttcggaagcctaaagcaggctggcacactcctacccaaagctccaaaagggtggggttggcgcactgccatattgttcgacgaacttggcgatcttctccagggtggatccctgagaattgctgcagtagtccagcttgtctaagccaaattgcccttgtatatctagaaacaatagtagtgttagcttattgcaaatggaaaaaagaaggcactaaatggcacttgcaaagtatggtaatgtcactgtaatgcaatggttctattgtatttattcccaaacgtgacgccgtcatgcttgtgtgtgtaataggaactaatatatagccaagtcatgcattcgatatcataggaccctaggtgggttcttgtggttagtttttttttaattatttttttacgctcccgctacattatatgtgttgtagcaacgcatacatgttgaaaacaaatatattgctggtaatttgcattataaatagac

SEQ ID NO: 22143 - DNA, 2924 bp, Oryza sativa
  ref <308>: DATABASE ACCESSION NUMBER: AK072341
  ref <309>: DATABASE ENTRY DATE: 2001-12-06
gtaagttactgcatctgcgtactttgatttactagtttggaaaacactggagttgcaagaaaatacttctacgtctcctgtgtcatcctctattctttgtgaaatgggttgaggttagccatatgtccaaagattaccaatttatgataaacaggaaacgcatactacgtagctatacgtgtgtcaggttcgtagttacgatcgtgtttcttatagacggaggggtacatgatatggtaacattgatttcgtaaggtttgtaaacgattcaaatacttaggattttattcctataatgccctttggatttaagtgcattataatgtccttttgattttcataagaatgagcttttaaaattatatggatatggtttcctatagcccattctgaaggaaaaataagtatgagttccttggccccagttgatttaaattaatgagctagcagattatggatttgattatagggataaattacatattttaagaaaggttaagttgcattcatggtacattaatttggcatgcgagtgtaatttagtacatgaacgtgagaagtgagagttgtagtgtgataagggtgtgatttagttgaagaactaataagtgagcatatgggtacaacaacttacaagataggttcgattatggtacaataacttaaaaaatgatataacaattaattttttcgagcattttgtcatacatattcagtttttaagtactaattttgtcaatataatcgtgaatatttgcatactttaatttgtttattctagtaattaatatataaacttatgatggtggtgctaattggatgagcaacgtaattccttattcttatagattaaatttaagattttaaggtaatatatgtagaattactatgtgatggcatattgatatcacgaaaaaactcacctagcattcggtaaccaaaatatttcatatttaaacaagttgatctaccaaaatagtaaattccgaagttcttgtaatagtaaattacactcacttactactgttgtactcggacattcaatttaaggtcttgtactggattacatccacttattaattgttatgttgtgagtgtaatttactcttaaaataaacttaacaactggagtagattgagataagtggtctatcaatgcactagaagattttttttttttttgagaaaacgtactttttgaagcgtgaatatgacctagttattgttttattttcccttgagaagagttattgtttctctccaaacaaaattccttcaaatttcctatgatatatttctcttgaaccatccaaatgcattaatattactagtgcattccagaggagcttttagacctgcattccaaactcatgtgctcgatgttcgatttctaatttttttttccttcctatgttttgagaatttttcttccaaaagagcttttattttggacctactatgagggtcattgcttgcttcaattaaatgactattttctctgttccaaaataaattaatttttagggttcaaaatttgattagaaaatatgatttatactctcttgcctaccatttctccacaagtcgacaagttttccattcaatacccttagaaccaatagttttttaattaacttggggtactttggatttttttcctcactgttatttttttaataataaaggagtctctttattttgagacaggagttgtgtggtgaacatgttttgagtcttttattataccttggatagtctatagtactatgagggaggatagtatggcactctttttgttgggtttcagtgggtcctgttcttttcttcaacaaaagttggataaacttttggatactcgtgacacgcttttgatactactaaacggtatattttgtacgaatattttctatatgaaagttgttctaaaatatcatattaatccatttttcaagtttgtaataattaaaactcaattaatcacacgttattaccacctcgttttgcgtgaaacacttaatctttatcttcatcttcaggagattcaaacaccatcgtgtatagaaatttgctcctttggagagttttagccattttgaaccacgtgaaaagatagtaatgcccttgtccttctacacatcatattagggctgtgaaaagatagtaatgcccttgtccttctacacatcatattagggttgtgtttagatccagaggcgtaaagttttggcgtatcacatcggatatacggatacacatttaaagtattaaacgtagtctaataacaaaacaaattatagaatccgcatgtaaaccgcgagacgaatttattaagcctaattaatctggcattagcaaatgtttactgcaatcccacattgtggcgcaattaggcttaaaagattcatctcgtaatttacacgcaatctgtgtaattagttattttttcgtctatatttaatactccatgcatgtgtcaaacattcgatgtgacagggtgtaaaattttaccagtaaatctaaacggggcctagatccatccatccatctgttcgtcgggttcgttgttctctactctctctctctccccatctcttctaatgtcggtcgccgcccgggatcaagagtaggaggctagtcgtcgctaggctcaaccctccccaccacttccccttctttctttccctgcctttctctccttctcatggtccctccttgtcgccgtcggggagccagagcaagagtctggtcatggaaggacggaaagagagcttgaaaggaggcttgttggccaacttttcgtccgtggagctcaatttctcttgccctcgccagcgacacctagtttcgtcaaacgtggaaaaaagaggccacagaggagcaaggggcattatcgtatttagatgcggttaatactccctccgttc

SEQ ID NO: 22144 - DNA, 3232 bp, Oryza sativa
  ref <308>: DATABASE ACCESSION NUMBER: AK072342
  ref <309>: DATABASE ENTRY DATE: 2001-12-06
gtatgagtgaagagagagagagagagagagagagcttcgcaggcgacgatggcgagcggcggcgtggtgaagaaggagatcggcgggaaccacgacgtcgtccgcttcggcgtcaacgacagcgtcaagggggacctcgcgccgccgcacccgctccaggccagcgtccacaaggaggccaagttctgggcggacaagaagaggttcggcgcggaagccatctacggatccgccttcaacatccgcaaggatcttgatgcccaaatcctctccaagttccaaaggccccctggtgcattgccgtcatctatgctaggatatgaggcactgactggttccttagatgattttgggtttgaagattatcttaactaagaagaaaaataaggattcaagcaccaagaagcagccggcgagggaggccgctgctgcgaacagcgagtcgagggcgatggtggcggagagggagaaggaatacgaccggctgtctaagttcctcgtggtctacctcaatgctatttgagacgctgcggcctccgaggatggctgggtcctggggcgtggagctctggaattgctgctcggcggcaccgcctacacacaagcgacaagtgcgccacaaatctctctctcgatgcagcaagtgcagcggagggagctgcaactggtcgccgtttctgccatgctgatagattgcaagtacgaggagatttgggccccagaggtgaacgacttcatcttcatatcagatagtgcatacactagggaacagattcttgcaatggagaaggggattctgaataagcttcagtggaatctcaccattcctacaccatatgtcttcattatgatgctatctgcgtctgcagataacaaaagtgacaaggaggtaaagagccatggcttttggttgtttctgtttaccaccagattatatttcattgctaagcgacaagtttaagcgtgtactcaagatttcttttggtgaatgctgatggagcacatggccttcttcttcgctgaattggcactgatgcagtacgggctggtggcatatgcctctgctgtctatgcagccaggcccaatcctcgtcatttctatatatgaagaaattgctggatccatcctctcggctaactaggacgttgttccactagatctccattattcctagtgcaggtttatttggattacataatcccctatcggtttagttccctttattgttgaacaattggagataatatctttcacgataattcgtaccactgagcaaaattcaatgatgcaattattttatatgcaactcatttggtgaacaagatgtatcttgtggcaaacaacgagatgaaaagttacttgatccttcaggcatacctgtgattttccaatctattctttgcacgttcttggaaagattggttgtccctgatagctgtccgtagtgattcatggatactgtgtggcattttactttggggctcattttggatttgataaagaagtcaggtttcaaaggagcatgggggtttcatgagatttatccaggtttcttgcctaggagcatcggcctcttcttctagaatgctgagggccaaggctgctggggaagaatctgtgttgaaggaatttcctgaggctacaattatgaggcctgcaactatgattggcacagaagatcggattttgaacagatgggtacagtttgctaaaaattgattcccggtctacaaagattcagcctgtttatgttgtggatgttgctgctgctattgtcaactccctcaaggatgatggcaccagcatgggaaagagctacggacttggtggaccagagatttatactgttcatgatctggctgagctgatgtatgagacaatatgtgaatggccacggtacatcgatgttcctcttcctattgcaagggtatgaacttaaataatatcttgtgttggtcaaggcgaatggccacggtacatcgatgttcctcttcctgttgcaagggctatcgcatctcctgaaagctgatagattgggattttttttttcaatactctaagcctctaatgaaaggtttgggtccaaagtatgctttcgcaaccaagtgatgaaaaaaaaaacaatctggttggggatgtcaattggttggttcatacaagaataaacctatgacattcgcaactttttcaagtgagggatctgttttttggttgcagctgacagtgtcatcacgttgtgggatcctggagctattcaaggcaaaagaataaataagatcctatcgtcttcaacgtggtgctatcatccttggtcatcagggaaaactcagaagaccatgaaccactccggccactcatagatgaaaagaatacttgtgatatactggtgtaataattgtggagcgatgattcacaaacaaaggatgctgtagttgcttaaatgcatttaagttgcgaggacagcaggacagtggtggtgaacagcgtggcattcatgacaatagagataggcaatggctgaggcagaaagttaatgctacacgggagctagctagctactactactccagaagatactgattcctagcgggcatgtggagttgtactactagttaattaatggggcatgttcaattaatgttggtcgctgtgtgaagtggatcggagtagtagtatttatatgggcacccagcaggcaggggagggatcaaaatcgagcgcacacgtactgtacttactgccagccactaacaagagtcagacaatggactcaaagaaggtcgcgtatgctgtttttatcgtcattctcctaatgacggaggtagcggccgccgctgccgctggaggcagcgcccgtgggactggtggtacaggtgatcgcgccaacgatgaagagaaatttatctttggccatctgagcaaagcaatattaatttacatagccagtcacttcccaggtcacattaaagagtgcgtcaaccacgtcgaaaaccagtgtggctgggctccggcgcctggatgcctgaaagaggcattagccacatgcgccaaataaggcgcccgctgcttcgcttcctctggcggtctggcccctctccgcataaataattgtaataaggggtcctagtgaatatatatatatatatatatgtggtactcactgcagtgagtatgtattatgtactacttattatatagtaataaaatttgaataaagtaatatttgagcct

SEQ ID NO: 22145 - DNA, 1866 bp, Oryza sativa
  ref <308>: DATABASE ACCESSION NUMBER: AK072343
  ref <309>: DATABASE ENTRY DATE: 2001-12-06
ggccgatcgaatcatttgagcttgtgggtctcctcaaccatattcgattcgtgagggaggggatcgagctctgttgcggtgttgtagatcattatcactcttggtttgtgattctcggaagtcggaagtgttcttcgcaagctcgattttcttttttttgcgatatttttttgtatcgttaaatctcgaatcccgacgagggggttcccctggtcaccgccgacgaggctccgccgcccagggccacggccaccatcaggtccacggccaccaccaccagccgtcctcgcctcccccgcctccgccgccggagtcgtccccgagccactacgtgttcgccgccgccacgccgtaccctccgccgcagtacaccaaccccaacctgccgcggtactaccctcagtacgggaactactacccgccgccgccgtccctgcaggtgcccctcccggcgccgtacgaccaccaccacaggggcggcggcgcgggggtgcccgccggaggggagttcccgccgtcggcgcacccgcaacactacccggggtggcctggggtctctgggcggccgcacccctgcggattgcagccggccatgccgacgccgtacgtcgagcaccagaaggctatcacaatccgcaacgacgtcaacctcaagaaggagactcttcggattgagcctgatgaggagtgcccgggccgcttcctcgtcgccttcacctttgacgccacccttgctggaagcatgactgtttacttctttgcaaaagaagagctcaactgcaatctaacggcggtgaaagaagacctgattaagcctgttactgtaagcttcaaagagggtcttggtcagaagttcagacagccttctggcactggaatcaacttctccgtgtttgaggattccgagttattgaagcagggggacatggatgtatatccacttgcagttaaagctgaaacaaccatgcctgttgatcaaaagttggaaggagaagatcaaaagatgaaaactccaaactcacagatcacacaggctctgtttgaaaagaaagaaagcggtgattatcaagttcgagttgctagccagatcctttgggtcaatggaactaggtatgagttgcaggaaatatatggaataggaaactcggtggaaggcgatgctgatgccaatgatcctgggaaagaatgtgttatttgcctctcggagccaagggatactaccgttctcccatgtaggcatatgtgtatgtgcagcgagtgtgccaaggtcctgaggtaccagacgacccggtgcccgatctgccgacagcccgttgagcggctacttgagatcaaagtcaacaacaaagctgaagagcagcagcagccgtcacccgattcaccgatcaaagtcaacagcaaagccgaagagcatcagcagcagccatcccaatcgctgccaatcccacacagggaagaggtgtagctgcgacaatgtcgggcgcatatgatcatgatatatgatcctagattgtggccttccgaccttccccgtatcgcgctctgcgctctcgccttgagcatggggaggagatgtaacagatgtgtaccttccagtgtatgttagcatgtaagcttctggcataatgtggcttcctgacctgacctgtgtgggtgaaggtcttagatgccaagaggagtggagtgggtgtaccatatacacatcacatggattcatgcgtgtactattgccctaacctgaagaagtggagaacatctcatacttaatgggatttccctccatcaggagtaaaaagagttacagcagatggactccagatttgtacaaaatttcctcatgattctcattatatttttgccttgatg

SEQ ID NO: 22146 - DNA, 3864 bp, Oryza sativa
  ref <308>: DATABASE ACCESSION NUMBER: AK072344
  ref <309>: DATABASE ENTRY DATE: 2001-12-06
gcggctctctccgaaaccgcgggcaggtgacggtgacggcgacggcgacctccctcccactcccaccctctcgccggagccagccagccagccaccacgtctccggcgatccgtacctcactgccgctcgctgcaaccagcacaacaccgctcctcctctcattgcgttcggaataaggcctgacattggaggtctaaaccctagctgactaccgttccccggatggaggccgcggcctccagcctctcgtcgctgctcgccaccctccgagtggtcggcccgtggacgccgccggcaacctgggagtccgtcacccaggctggcggtgccgcccgtaccgccaaccctggagggcggctccggggggatccgatctacgagctcgcatcggttccggatgcttctttggttcgtttggctttgcatgcactgcatggtgtcaaatcatcattagatgagattgaggagctctctgtgctgttcttctcatgtccggctgataggacttctcatcgtgttgcaaacgtgtggtcacgttcatccagtactacctctgtagggaatattctcaaatctatacgcactacaggtctttcagttctcttcctgtgcaagtttctgcatttttatcttttccaaagtcgagaattgaatggtcgaggtagagaaggacatgaacatgaagtttctgatagcgaagaaactgaacaacctgctccttacagtttagtgaaccaagcatttgctgcagcagttgaaaaggttttagaaggttatttttgttccttgaatactctaccagcatcaattaagctgaggcgtttggagggacaacctgatataccttccatgaccccagatggagctagttataattctaattctgaaatcactcttctggaagtttatctccacactgaggagttaagaagacatattaagtccctcggaaatatatgctttccgaagtttgcaggtctttcgttgtgccaggagggtttgacaactgattctaacttggggtttgagaacttcccatggagcactgatttgctttcctatttgtatgtccatcttcgtgtaagcaatcatcttatgatttttaaccatacaacttctataggaatatcttgaccttttgctacttgatggcttttatagttatacttttgctaatgtcttagatttgcatatcttattaacgatgtcatagatttttatatgttaattaacctgagtatttcagattcactgcaagtatatttatattctttgatactggcagtatccacctgtacagtagctgagattacatatattcatgtgtatatgatgttgtcctttctaaacataccattatataatctggtaggcaaacttcttattttttcaagcttttttgtttttatgattcagaagggagttctgatggggaaatcaactctttaaagctgtttctttcacgatttcacccttgtcttatatttccacttctgataatatagctctgagcctctgaagacctcctgattcaagaatagttttcaaagatactgccagctatttatgctagtctattctttacttgacaagaatgatatgaatattgtcttgcttctctgtcacgaatttttcaatttggataagtcatatatcattgttctgtagatagctcatgccaaatgttgaaacattcctgatattgtttctcttgaactttaggatgccgattccgttcactatggacttctaaaatatctttttgttcgttcttgtgagccatattgtaatttcatcaagtcctggatttaccgagcttctgttgatgatccttatgaggaatttctcataactcaagctaagaataagcgaactcaaggaggttcttcagacccagtagataatttcaccctgttgtccttaaagggagcaaatcatgtatctgcaccatgctttctaaaagatgtatgtggtcctcttctgcgcactggacaacaacttcaagtgctcatgaagcttctagaatcgtgtaatctttctgacactggaggagatgctcatgcatctcgtcacatcattcatctggaggaaattctcccatggtttgatacgtccatcgagtcttcaatgaattcattcactttctcaaaaagtagggtggaagcagtaatatgtcaaagagatgctatgtacaagtcaatgatagagaagctccatcactttttctcaaatgttgaggtctagttacacatactgaattacagtctattttcagttactgcatttgactaattatatatgtgaggctctcttttgctctaagagaagcaagaacatttgcttcctaaaagggcttgcatattttatgttgaaactttgctgtcagcactgaagcttgagcttttccctcaaatggacatttcatgctacctttgcttctgtttacaaccatgttttgaattattcatttgacaaaaggctggttttcaggtaattccttttgatgcggcactgaatgttctgcatataagtacaagccctctagatacagctgtttcagatgtggagctgttctatcatggcacaaatgctctaccagcttgcaatgtagcttaaagataatgatgcttcttcaacatcacaagaatcttcagataaagtggatgcattagaatcatcggaatcatcttcatcatatagttctattgatgatattgaagatgagattgatactgcttgtgataatatgcctagctcgatgttctcatcgtaccgtgcaagttcaggtgaagcaaaatgctcatctgtaaccacaaagttactttcatatgaaacctgttctgtttctgatgggattaatcctgctagccctatcaatgagaacaagaaaaaggacgacttgagttatggacatgttcctatgcactcgcagagtatagaacatgacgtggtctgtgatgctttggaactggacaatcaatacagtgaattttggccattcgacagtttcttgaagaattcattcgatatatcctctggaaaaatgagtttggctgaagagttcttatatacaggagataaaggtgcagagcaagtatcacatgccaatgttgtttgtcgacactctgaatcagggtctcctagactgccaaatagtgataacgatgaaaaatctatcaatataaagcaaccatggaatactaacattccttacaattttagcattaatccaatagtgaagaatgcggtttcttgtcatacggagcatgacttgcatggaaataggaagaaccaagcacttattggctttaattttgagtcagtaactaatccatgtgaagcatattgtgggagaagtacttcttcccttgatgagtttgaagtcagatctgcaatggctgtacagtccaatgctcaggcttctaaacagtttgattgttccagcaagcttcttcaatcgaagacaacaagtcatgcttatcttacttccccaggagacatctcagcacaaacaaatcttctagaaaatccttcgggtggggcattctgggagaaatcattagagtacactgctaaatcaatggaaatagctggagataccacttcatcatctgatatgccacttgatatagctattgacaagtgcattatacaagaagttttgctgcagtatccttgtggttttcctacaattttgtcttggtatattgctgctggtattcttttcaagtctgggcattatttttttcttgttttaatttattatagttttgaactatatttttccttgttctagcgttttggtacctcattttcttgtgaaatttttggtattgcatgatgctataaatgcattttgaagg

SEQ ID NO: 22147 - DNA, 4187 bp, Oryza sativa
  ref <308>: DATABASE ACCESSION NUMBER: AK072345
  ref <309>: DATABASE ENTRY DATE: 2001-12-06
ggtctcgtctccaccgaactcttccactcctccgcatctcgcgatctcttccccccccccccccccgcgcgccgcctctctccggcgaacccctcaccggcggcggcggcggggcgagtgggacgccgcatggagcagtaggggacggagcggaggctgcgtgaggtgaagggcgggcgcggtggcgatggcgaactacctcgcgcagttccagaccatcaagtcctcctgcgaccgcatcgtcgtcgccgttgaagatgtgagtgacttgtggctcaatgtgaaagaaagtttcgagcaacgcttaccagtgaagaaggcctgcctcaataacaaggcgaggaatcctgtttttgtggaaaacctaccagctgagtttatacagaccactgattcgaggctacgtagtcgatttccacaagatcaatacttgttttggttccgggaaccatatgcaactgttgttcttgtcagttgcgaggatcttgatgagttcaagaccattcttaagcctcgcctcaaattgattgtgcaaaatgatgagagggaatggttcattgtatttgtgtctaaggcccatcctagcaatgaccaagcatctaagatggcaaagagagtatatgctaggcttgagagcgatttcaacactaaaaaaagagaaagatgctgtaaatttgatctccatggacctgatgcggaattctgggatgattttgactccaaaatggtggactgcattagaaacacattggataggcgggttcaattttatgaagaggaaattcgcaggttaagtgagcagagattcactccgatatggaacttctgcaacttttttattcttaaggaaagcttggctttcatgtttgagatgactaatcttcatgaagattcactccgtgaatacgacgagcttgaactatgctactcagaatcagttaattctcctggaaaacatcgagaatttggaggattggatactggtgatgatcaagcggcgctgctaaatccaggatttaaagcattgacccaaattgtccaggatgatgtgttcagagaatttgagtttagacaatacatatttgcttgccaggctaagttattgtttaaattgcatcgcccaattgaggttgctgcaagaggatatgcttttgtggttagcttttccaagacgctagccttgcaggagaatggtctaccattttgttttcgtgaagtatgggtgataactgcatgtatggatttaataaaagcaacaacctcacactatgatggtacagctgttgctatcgactcagagagggagttctgtcgtattcagggtgacctctattctctgtgccgtattaagtttctgaggcttgcttatttgattggttatggagttgagatagaaaaaagtccagtcaacagtgcatctttaagcatgctaccatggccaaagccagctacatggccttctattccaccggattcatcagcagaaacaatggcaaaggagaagatgattctccaagcaaaatcaagagaaaagatcttcaatattcacaggaaaccactgccattagaaccttctttgcttcttcgtgaggctaataggcgtagggcttttctttctgttggaaatatatctgaattatatgattcaggtgatggttcaggtctggatgcaaattcaaaaccttcgcccaacaaatctgcttcgaactacatggccaggacaatgtcagggccagcgacatctgagacttctctgccagttgatcgccccatgaggttgtcagaaattcatgttgcagctgagcatgcactgaagcagacagtatctgaccctaattttatgacatcactttcatcactagaagaatttgagaaaagatatatggagcttactaaaggcgcagctgacaattatcatcactcttggtggaaaagacatggagttgtgctagatggagaaattgcagctctattctttaagcatgaaaattatgatttggctgcaaagtcctatgagaaagtttgtgctctctattctgcagaaggctgggaagagctgttggcagatgttcttcctgatcttgcagaatgccagaagattctcaatgatgaagctggttatttgacttcctgtgtgaagttactttctctagagagtggcttattttcatctaaagagcggcaagctttccagtcagaggttgttcggcttgctcacagtgaaatgaagcatcctgtgccccttgatgtctcatcacttattacatttgctggaaatcctgctccaccactagagttgtgtgatggagatcctggtacactatctgtagctgtttggagtgccttcccggatgacatcacactcgagtctctcagcttaagattgtcggcttcctctagtgcagatgaaggtcttaaggcgataaagagttcagatgctcgagttcttgtacccggtagaaatatcatcaccttcgacattcctcctcaaaagcctggatcctatgtgttgggtgctctgacgggccagattggcaagctatcattcagatcgcatggattttctcaagatggtccagtggacactgatgaattcatgagctttgagaagccaacaaggcctgttttgaaggtgagaaaaccaagggctttagttgatattactcctgctgtgtcctctgcattgcttatgaatgaacttcagtggattgggttaattgtcaagccaatagactattctttgaaagatggcatattgcatatagatgcgggtgctggactgaaaattgaggagtcccagatgattgagatagaaacttatggaagtgatgtggagcatgttggtggtactgatgcttccaagacatcatcaagctccactgatactcgtaaggttgagaaggtccctattgaagatgggaagataaaaataccagactgggctagtgatgtgactactcttgtatggtttcctgttcgtgctattgatgatacaattgcaaggggtgcatcgccagcatcccctcagaaacagagcatagtagatgggatgagaatgattgctctcaagcttgaatttggagtttttcttaatcaagtgtttgaaaggactatcgcagtacatttcactaacccattccatgtgagcacacgcgtagtagataagtgctatgatggaactctactactgcaggtgatattgcattctgaagtgaaggccactctgcatgtaaaggatatatggttggatctgcaatctggatttgaacacacaggaaagggagatggacgaccaacttcgaacttgttccctctggttattgctccttcttcgagagctggaatcttatttgtaatacgtttaagtgccttaggagatatggatgagctagaaaaggcagatagcatgttgaatattaagtatggaatatccggtgacagaacaactggagcacactctccagttcctgttaaacctgatgattctgaggagcttgtattcaagattgcggtgaagatgaagcgccctgtcctggacccatgtgtggcagttgggttccttccgttttcttcggactgcttgagggttggccagctggtcaacatgagatggagggttgaaaggctgaagaacccggaggatgcctctctgttagccgacgaaatactttatcaagtcgacgccaacccacagaactggatggttgctgggaggaaatgcggtcacgtatcgctgtcaaacaaacaaggttcaaggatagagatcacggtgacgtgcgtgccgctggtgtccggctacgtccatccgccgcagctgggcctgccgcacgtcggcgaggccaacatcagctgcaacccggcaggccctcacctggtgtgcgtccttcctccgacactgagcacctcatactgcataccggcttgatccatccatcatacacagattgtatgttaggcttgtagcctgtagtagaagagaaatgccacttacactggtcggcttgagatgtatcgccatttgcaccggatgagatgtatgctgtttttgccgagacattcttttgtgcagatgagttctttttcgtcagtaacattcagaacgtgttccattgtttcatgtaccataagataagtaacataattctccgtgtatatcaaatcaagtgatagactggattttgaagtct

SEQ ID NO: 22148 - DNA, 1471 bp, Oryza sativa
  ref <308>: DATABASE ACCESSION NUMBER: AK072346
  ref <309>: DATABASE ENTRY DATE: 2001-12-06
ggagtgcaagtgagctgcatagatttttagaggttttttgtggaatcatcttttgtgctgggagatttcttctgtttgttcttttgtttcgtcgtgccggagatggcggtggagtcgtcggacgaacggaaggccgacgaagacggagctcacgaggagctcgaggggcagttgctgtaccgcgttccggtctttgacccctccctcgccgagttctgctcgccgcccccgatcgatgacgcggcggccgcatcctcatcgtgcttcaaggaggacgccgccgacggcgccgtggaagacgcaaagtatccggcagctgcggcgtcgtcgcccgtgcagcagctcccggatagctttgtcaacttcgaaccgacggacgccgagctgagggagttcgccgccgacatggaagccctactcggacaaggcctggacgacagcaacgagctgcaggactcgttctacatggagaccctagggctaataacgccgccggtagaagaatccggccgggtgaagatggagctcgacggcggtgttgcctccaacagcagggtatctctcccatcatgccgcgctcatccgaagccggaggacgtcgaatccgccgacgtgctggacatcgatttcaactgcacctcgccggacgaacagaagtcgtcggcgagcaacggcgccgcagccgattcgcagttcttccacaggagcctggatctcaggctcaactacgaggcgatcatcgagagctggggcaactcgccgtggaccgacggccggccgccgcacggccagctcgacgacttctggcccaacgaccaccattactcggggttgtgggctgcgggagggggcgggcatggcgcggaggtggggatgatgacggtgaggccgcggatggacggcccggggcgggaggcgcgggtgacgaggtacagggagaagcggcgtacgcggctgttctccaagaagatacggtacgaggtgcggaagctgaacgccgagaaacggccgcggatgaagggccggttcgtcaagcgcccctccgccgccgccgccccgtgcgccgtcacctagacgtacgatcgcgcacggcccggcgcgcggcaccatgcgtacgtgtccggtgtcgagacttgcctgcgttcgatcgtatgcctcatggactcgattggcacaaaagttcacgcaaaatttgtcgaagctgcacgattcaagtagtataacgttgttcaattcaaaagtttttctcttccttttttttttcggttttgttggtgtttggctcggtgcttttggatctcttttatctctgttccatcgaccggagagaaagtaggcgattgtacttgtgtaaacattggtgttcatggttttgtagaaacactccataaaggaaacaaaatgacttgtatatgtaaactgggttgtgcctgcgccacacccatgtacattgagtaatcagtacatactc

SEQ ID NO: 22149 - DNA, 2692 bp, Oryza sativa
  ref <308>: DATABASE ACCESSION NUMBER: AK072347
  ref <309>: DATABASE ENTRY DATE: 2001-12-06
gagaataacaaaacatcattactactgatggccattttaatcaatcattttttggcattactctagtatagttgagtaattaacaattttttcaaaaaagtagacactttaattactcacagccactaatcacacaagtttgcgtcatctcccccatctccgggtctccggggccggacagagatcgacccagggaagaagctagccctcgccgccgccgccgccgccatcgtcgtcgaggactcaatcaatcaaccaaccaaccaatcaatcaatcaagatgatggcggcggcggctggggaaggggaggcggaggtgacgcgggaggtgatatcggtgtcgacggagaaggcgttcgaggggaaggcgctgccggcgtggtcggagcagatcacggtgaggtcgctggtggtgagcgcggtgctgggcacgttcctcagcttcatcgtcatgaagctcaacctcacctcgggcatcgtcccctccctcaacgtctccgcggggctcctcgccttcttcctcatgaagacgtggaccagcgcgctcgagcggtgcggcgtgttccccaagccgttcacccggcaggagaacaccgtcgtccagacctgcgtcatctcctgctccagcatcgccttctccggcggattcggcacctacatcctcggcatgagcaagaagatcgccgagggcttcgacgaggcggaggccaagaccagcatcaacgtcgaggagccgtcgctgggccgcctcatcgccttcctcttcctcgtcagcttcgtcggcctcttctccatcgtgccgctccgcaagatcatgattatcagctacaagctcacctatcccagcggctccgccaccgcgcacctcatcaacagcttccacacgccggggcgcgatccaggcgaagcaccaggtgtccatcctcttcaagtcgttcgtcgggagcttcctctggtcgctgttccagtggttctacgccgccggccccgggtgcgggttcagctcgttcccgacgttcgggatggtggcgtacagccgccgattctacttcgatttctcggcgacctacgtcggcgtcggcatgatctgcccctacattatcaacttctcgctgctcatcggctccgtggtgtcgtgggggatcatgtggccgtacatcgagagcaagaaggggagctggtacgacgcggggttacccaagagcagcctccatgggctgaacgggtaccaggtgttcatctccatcgccatgatcgtcggagacgggctcttcaacttcttctccatcgtgctccgcaccgcctacgacctctacctgaagcgccgcggcggcgccagcaagcagccgcaggagacgccgttcgccggcgccacggggacggagcggcaggtgctcagcttcgacgaccggaggcggacgcaggtgttcctcaaggaccagatcccgacgacgatcgccgcggcggcgtacgtgctcctcgccgccatctcggtggtcgccatcccgcacatcttccggcagctgcggcccaagcacgtggtgtgggcgtacgtggtggcgccgctcttcgccttctgcaacgcctacggcacgggcctcaccgattggtccatctccagcagctacggcaagctcgccatcttcatcttcggcgcgaacatcggcgccaaggacggcggcgtcgtcgcgggcctcgccgcctgcggcctcatgatgggcatcgtctccaccgcctccgacctcgtccaggacttcaagaccggatacctcacgctcacctcaccccgctccatgttcgtcagccaggtgctggggacggggatgggatgcataataagcccgatggtgttctggatgttctacaaggcgaacaacatcgggatggaggaagggttcccggcgccgtacgccaagatctaccgggggatcgccctcctgggcgtgaacgggtgggaccagctcccccgctactgcctccgcttctgcctcgccttcttcctcctcgccatcgccatctgcgccctcaaggaggtggccaagcagcgcgggtggtggatccaggacttcatccccagcgccctcggcatggccgtccctttcttcctcggctccttcttcaccatcgacatgtgcgtcggcagcctcgtcctcttcctctggtcccgcggcgaccccgtccgcgcccacaccttcgcccccgccgtcgcctccggcctcatctgcggcgacggcatctggtcgctgccctcctccatcctctcgctcgccaacgtcaacccgcccatgtgcatgcgcgtcttctccaccgccaccaacgacaaggtccagctcttcctcaggacgctgcccacgccgccatgatccatccatccacttcaagctcaagctagccttccatcgatcttgccacgcgtacgtgtaggttgattaattagttctttagtgattatacttaattaattaattgtcgattggtttatatatattagccttgtaatgtaagtgtagaagagaagcagctggtgtagcatacatatgtactctctctctctctctttactgattggttcttaaattcatttgttatacttcacatgtacaaattaaggccttggatggatatatgtccatgtaaaagattgatagcatgcgtgctttgcatattcatgatcaattgtgagaccaactgc

SEQ ID NO: 22150 - DNA, 3262 bp, Oryza sativa
  ref <308>: DATABASE ACCESSION NUMBER: AK072348
  ref <309>: DATABASE ENTRY DATE: 2001-12-06
gactactcccactcccacttcgctccactccacgcttcccccatgactcccctgctcctcctcctcctcgccctcgccgccggcgccggcgccgcctccttccccgccgacttcgccaacctcttcgccgccaaggccgcgctctccgacccgtcctccgcgctcgccgcgtgggaccctggcctgtccccgtccctctccccgtgccgatggccgcacctcctctgctccaacccgtcgtcctcctcctccgccgccatcgccgccgtgctcctctccaacctctccctcgccggcgagttcccggcgccgctgtgcgagctccggtcgctggcgctgctcgacctgtcgtacaatgacctcaccgggccgttgcccggctgcctcgccgcgatgccgtcgctgaggcaccttgatctcgccgggaatgggttctccggcgaggtcccgaggagctacggcgcggggttcccgtctctcttgacgctcagcctggccgggaacgagctgtccggcgagctcccggcgttcttggcgaacgtgagcgccctcgaggagctcctcctcgcgtacaaccagttcgcgccgtcgccgttgccggagacgttcaccggaatccggaggctacaggtgctgtggctggccgggtgcaacctcgtcggagatatcccgccgtcgatcgggagcctgaagagcctcgtcaacctcgacctctcgacgaacaacctcaccggcgagatcccgagcagcatcggagggttggagagcgtcgtccagctcgagctctactcgaaccagctcaccgggagcttgccggaggggatgtcggcgctcaagaagctgcggttcttcgacgccgccatgaaccagctctccggcgagataccggccgacctgttcctcgcaccgaggctggagagcctccacctgtaccagaacgagcttaccggacgcgtgccggcgacggtggccgacgcggcggcgctcaacgacctcaggctgttcaccaaccggctggtcggggagttgccgccggagttcgggaagaagagcccgcttgagttcttggacttgtcggacaaccgtatctccggcgagattccggcgacgctgtgcagcgccgggaagctggagcagcttctcatgctgaacaacgagctcgtcggcccgattccggcggagctggggcaatgccggacgctgacgcgggtgcggctgccgaacaaccggctctccggcgccgtgccgccggacatgtggggccttccgcacctgtacctgctggagctcgccgggaacgccctgtccggcgccgtcgcgcccgccattgccacggcgaggaacctgtcgcagctgctgatatctgacaaccgcttcgccggcgcgctgccgccggagctaggcagcttgccgaacctgttcgagctgtcggcttccaacaacgtgttctccgggccattgccggcgtcgttgaccgtggtcaccacgctcggccggcttgatttgaggaacaactcgctctccggcgagctgccgcgaggtgttcgacggtggcagaagctgacgcagctcgacctcgccgacaaccgcctcaccggaaacatccccgccgagctcggcgatctgccggtgctcaactcgctcgacctgtcgaacaacgagctcaccggcggcgtgccggtgcaactcgagaaccttaagctgagcctgctcaacctgtcgaacaaccggctcgccggcgtcctgcctcctctgttcgccggcgagatgtacaaggacagcttccttggcaatccggggctgtgcaccggcggttcgtgctcgagcggccgcagagcccgcgccggccgccgcggccttgtcgggagcgtcaccgtcgccgtcgccggcgtcatcctgctgctcggcgccgcgtggttcgcccacaggtacaggagtcaaaggaggtggagcacggaggacgccgccggcgagaagtcgaggtgggtggtcacgtcgttccacaaggcggagttcgacgaggaggacatcctgagctgcctcgacgacgaggacaacgtggtcggcacgggcgcagcgggcaaggtgtacaaggccgtcctcgggaacggcgcccgcggcggcgacgacggcgccgtcgtcgccgtcaagaagctctgggctaacggcggcgcggcgaagaaggcggcggccatggaagccggcggcggcggcggcggcggcggcaaggacacgttcgaggcggaggtggcgacgctggggaggatacggcacaagaacatcgtgaagctgtggtgcagcctcagcagcggcgaccggcggctgctcgtctacgagtacatgcccaacggcagcctcggcgacctcctccacggcggcaagggcggcctcctcgactggccggcgcggcaccgcatcatggtcgacgccgccgagggtctctcctacctccaccacgactgcgcaccgccgatcgtgcaccgcgacgtcaagtccaataacatcctcctcgacgccgacctccgcgccaaggtcgccgacttcggcgtcgccagggccgtctccgccgcgccgcccaccgccgtgtccgccatcgccggctcctgcggctacattgcccccgagtactcgtacacgctgcgtatcacggagaagagcgacgtgtacagcttcggcgtggtgatgctggagctcctcaccggcaaggcgccggcggggccggagctcggggagaaggacctcgtcaggtgggtgtgcggctgcgtcgagcgcgacggcgtcgaccgcgtgctcgacgcgaggctcgccggcgcgccgcgcgacgagacgcggagggcgctcaacgtcgcgctgctctgcgcgtccagcctcccgatcaaccgcccgtcgatgaggtccgtcgtgaagctgctgctggagctccggccggagagcaaggagaaggccatggcggaggagaagcctctcctcgtttgatcacacaaagccagcactgatgaacacactgaacagtagtacctcactttaattagcaattagcataatcactcgcttcaaaaatcagttagcataatcacattaacaatcagtagtaattaatgtactcaagtacccagcattaaggttgaagcctcaagcatgcaatgtaagctagaactacttaagtaaaggtcctctatgtatagctcattctagtattttcatgggttaatgtactactaccagtttgtctaaagtatcaatgccaacaaggatttggttt

SEQ ID NO: 22151 - DNA, 3922 bp, Oryza sativa
  ref <308>: DATABASE ACCESSION NUMBER: AK072349
  ref <309>: DATABASE ENTRY DATE: 2001-12-06
gacggatacgtacacgtacggcctcgactcatcgagctcgagccgccggcctggccacccttcgtcgcccgcgaacccccctttctccgtcgttccctccctttcaacctcctttcaaaccctagaaactcgattccccacctccaaaaccctaaccctagctcgccgcggagagcctcctctctcctcccccttcacgccgcccccccgcggctcctgcggccgccggaacccaagcccccgcctgacggggccctcgcggacctagggtttgcccgcgcgcgctcccccctccttgggccccgaccctgcggggcggtagcggtcggcgcgtgtgggggtggagagagagggagaggaggtgggggaggtggagatgagatgaggcggcggggtggcggtggtggtggtggtggtggtgatggccatgagtaggctctcgtttaggccgcggccgctcgacatccacaagaagctccccatcctcaagtcggcgcgggagttcgaggacgatgaccccacggccgcggcggtcgcggtcgcaagggcaggggtgctgctgcggcagtccgcgccggagctcactgctgctactactgccacggagggcgagggaaatccaacacccactaagaagaacattcaagagataccaacgcctcagtttgatgctgtggacacctatgaaagggactacactcgaaccttcgcacaaccaacctgttatatacgtggaagaggagccagggctgagattggtgaatttgtcgaatatgatctggacaatgaagatgaagactggcttgaagacttcaacaatgagcggaagaatcttaaccctgaaaagttggaagtcctcctattcaagttggaaattttggaccacaaagctcgagaaagagcaggagccattacaccaactttcataggacctgtaccagtcctcttgcagcttgatgctgcaatggaggcattgcagtacttatctgttcggtatggagttttccaagctgtatatagttattggaaagacaagagggaacgatggcaaaagcctattctgcggcgtttgcaggttagtacaatttcttcggtgtgtcttttttagtaatttgccattttcctgttaaaataccaaaactgattgttgattaatggttttatggtgtgtgaattgtgaatgctatttctatagtgctataaatgaaatatgcatcacagatgtgaagtgcgacatttttttaagtatagtctaacaatagaatttttgtaaatattgtgaattaatgtagtacctgctatggttacttcagttaataaattgtatgcatggttgttatgaggtctagtgtatacacaaggagtaaatacttgatgaaagccaaccgcatattctgaggtctaacatatacacaagattggttaattttatattacagtaatatcctgccaattgttgaaatcaaagtatgatatgtttgtttgcatgtcaagaaacaagaactaaccacccaggccttgtttggatgattggttgagaggggtgggattgggatagggaaagtgaaggatgaggatgaaatgaggtaggcagaatgagttgctaggattaaaagttatcctttagtgggtgggaatttttttcccaatcccattgtccaaatgggaccgcacaattgtatctgagaagctaaccaacaaacatagtaaactaaaacctgttagttcgtttaatgaaataacatctaataaccctgcagtatcaatgcagatattgggctatatttttgccttttggatgctttgtcctgaaatgttcgtatcggtagtttggttaagttcattatcctggcttcaaaataattcgtgttcttttctaattaagatacagatttttcctcgatttccgttagcacgctttccaaactgctaaacaatgtgtttcgtgcaaaaactttctatatagaagttgcttaaaatatcaaataaacccaattttcaagtttgtaataattaaaaatccagataatcatgcactaatggatttctcattttgcatgccctaacttcatcttcatcttcatcaacttcaaacatatgtgtgtgaccttttctaaagctgtttgggcaaattcagctaagcccattggcttataaatcaaataagcaaaaatccagtgactttaactatgttgagcaaagacaaaatataaccggagtaactcactttggttctgtagtgttgcttcgaagccaaaaattagtgcaagccaaagatatcacatgggataacactaaactacaacatttgttgaagcagtctgattaaaatgtatatgctaattcactcagttggtgcataaaaacatccatacagttgtaccaaactacaacatttgttgaagcagtctgattaaaacgaaggatgcaccaaactgacaatgaatagttgggtttgtaagccatcagccatagaatataagtttttgtcaggttggttttgtccaagttatgctcaagtctggaggactggaggaactgttactctgttatttcatgattcttgtttctcggttgcattactgttgactattgcttttgttttcgtgaagccgcctccaccagtgaatgatacaaacccttataatgtattcagaccaagagagaaggcacatcgacttcatacaagaagggtgagtaacttgaaatcagatatcatttttatttaacatagtatgcaatcatgtgaccttctgggagcattagttgctaggcaagctttgtggagggataatatctatctctgatcaggtctctattttgtatatgcataatgttttcttccttttccagatgcaaaggcgagaaaataatattcaatcattcgaaaaacttcgcatggtacggcgcaacttggaccaggcaaaggcacttatggatgctttggttaagagggaagagacaaaacgggaggccatggaatgcgaggtcaaccttcgacgcattcagatgaaatataagcatgaagcccagcttgttgatgaagggactgcactgtcaggcttccagcaagtttctagtagatttggatcgagtgaagatgattacgcagattcagatgacacgacaactgaacaaccatatccggccacctgttttccgtcctcgattcgctgatcataagctatccgtaatccctacattgcgtataaagcgtgagcgcgaactaaaaaggaggccacagcagaatggctgggtgtttaaaagggatcctgaggagccagtattgttattcacaagaccattggatcctgagaagttgctagcagcaggtataaagccaccaccagatcctcccattgagaatggtgcaaccatgccaccatttaggtgccggggtaggattgggcgaggtggtcgcatcatctttgatcgatggaaccctcttctccaaacaccaattgggcaggaaacctcctattatgtaccgtacagccgtaggcctccctcacctgaaagttgaagcaattagccatctgcacgtcctacttatgtgacctatacagctagtgagaagtgaagcactcgagcaattgatcctgctaaggcgccaaattggtcgatggaatacttttttggccgcccgggttgtgagctgtacagcaggctcagaccccctcagtgaatactgggtgtggccaggctatatctgctaacgtttctcttccgatctgggcttaatcatcttttcacagctgttgtaaaattattaatatgtaggtgaaagagtagagcatttttttgtctaggcttgtagggtcagtatctaacaccgtgctctctcattgattattcatttggagaagggggaatccttctcattgataaatcaacctttctgtataatgtttcaacacttggt

SEQ ID NO: 22152 - DNA, 3770 bp, Oryza sativa
  ref <308>: DATABASE ACCESSION NUMBER: AK072350
  ref <309>: DATABASE ENTRY DATE: 2001-12-06
gagttaatttcctgcaagaaggatgactgagtcaacaggcgaccgggcaggcgattcccaccgaccgacggccactccggccccggcggccacccccctgcgccggtagccaccccggcgccgacgcccaccacccacgcctctcttgccccatcgcgcttcccctggagcctgctcgaccgccgctcgacgttgctggccagatgcggttggcgtctctgccgccgttgtggccagcactccagccggcgcatcccacgctgctccgccaccacaaaccagtaatcccctctcaacccctctctggaccacccctttccccacgaagctccaccccacgccggaacccccagttctggctggagtcgccgccgccgccgccatccagatctgctgtgcctttctccgccgacgatgtctcccacgtctcggagtccccggatccaaggagttcgcccacgcctgctatgccacgctccttcgctgatgctgtcaggttggatttcaatcccgccaaaggagacggcctgcccgttttcaaatccccacacggccaaccaccgccgcgcccaaaattgaagtccgccattactatcccagcctggagcacctttcagcgtcgcgcctacagggctactcccggagaggaaatgggcgtgcgtcgcatccatggtacggcgagaccaggccgcttcaatggcgagtggaaggaagtcaagccacgccactggtggcgccgctcgccgcattcacccgagtcccagcggccagcttccaggcgacaagacgcacattcaaggcgctcgttggctcccgctgcatcggcatcgctgcgcctcttcagagagagaacggctggaaaatgcttcaactgccttgcgcgtgatcaccgcgcagcgcgctgcagggacccggttcgttgcttcagatgtttccgttcggggcacaaggcaaactcctgctcccggcgtgaaccgcgaccacgccaacctcgccagtctccacagaaagcgctgcgccgccaagcttctacaccacccccgccacagaacacgtcgcaccgccaggcttctacgccatccccgtctcttccccgggctacacgaccacgccaaccacgccagtctccgcagaacacgtcgtgccgccaagcctccacaccacctctgcagctacctcttccacccaagccgtcctgcaacacgcggatggctctactgggagacccggcgacccggccggatgaagaccactgcttcgttccgacaccgttcgccacggaggctgagcggaaagaatgggaaagctcggcggtggtgtcctgggcgatgcgggcaccggcttccacaacggcgcaagatgttgaggcggcttttcgggaggaattccgtcttcggcgaggggaggtcacggtgacgcgccaccacccggaagccttcctgatcaagttcgagcatagcagtcactgctatgaagctatgcgcaagggcttcgtcaagcgaaacggtattgagctccacttcatcaagtggcgcagcctgagtgcggccctcggcatcgcgctcatgtttcgcgtgcgcctgtgtctagatggtatcccgcggcacgcctgatccgccgacatcgtcgagcggctcatcgcgcgcacctgtggcctcgaggagatcgagaccaacctgatccacccggtcgacactcgcacggtggatgtgtgggcttggaccggcaatccgagctccatcccgaagcggatgtggctaacctttaccggctcgacgcggggagccaaaccagagcaaatcctggtgtccgacagaccgccggcacactggcaacatggcgccaaattctgcgtctacatccacctggaggagatccacgactacacgacggtggcggtagacctcgatggcaacgaggcatgcgcgccctccaagcggcgccttccggagtggcacctcggcgtggccgacggggacccggtaccaacgcgagccttcgagaacttcccgcaccacccgcctccaccacgcactcgtcaaggccgcgagccagagcgcatcgacgaccgcgacgaccgtcgccgaagagccaaagatgatcgtgaccggagccgtcccaggcggtcgtataatgacgaccacccggaccacgacagggaccaagcctggcggcggcgcgacgacgacgacgaccgcgacggcaggggcggccggggccgcgaggcatggcgaggacgagaaagccgcaaagtctcgggccttgatggccaacgcgtgcgcgagcgttcgccgcgtcggcgcgactgggcagaggacgaccgtcgcggtgaccggcgtcatcacgtgcaggctgctgtcgccctgcctgctacaatcccgcctctcaagctcgctccgaagcaggtaactgattttaagatgttgttttcccttaactcccaccctcttcaggcaccaaggaaaaacctccgtgagacgggggaaaggcttgtgaacagggtgaacaatttcgccgctgcggtggatgacgcttctcagcctggcggggaagaagcctggtccgaccgccggccaagtcgcgtccatgacgtcccgatccggcaggtgttcgaccggctcaagcactgcctcttccctgctggcatccactctacaccaagccactcgggccaagtgatgcctcatgacgagagggcgtcgatcggcgcggtggaagaagcacttgcagcactttagctcatggcggacgcgggtcatgccgtcggcgagcgaacgccgccatttccaacatcccccctccagtgtgctgggccatcaccagtatgggccggcctcctcccggaccttgggctgcagacaggagggagctgtcacgcaatgggcctgatgggccatgaagaccctcagcctgccctgccgatgtctactttcacaggcttgcaagcgggccatgatacggcccacccatcaccaccacagggccaacaggctcgaaccgacaccacggccaccatcagcgaggcaacactgcagccgccacggcggttgcgtcgaagacggtgacgccgccgcagctgattacagctgcgccaacgacggaacaagatgaacaccaagatgccgggaataagaacacgctgcaagtgctggagagcctcttctccaccccgccgcgcgccgttttgccacggccgacctcccctgcgctgacgacgacccaagcgaccccagcgccagcaccggcgccgccaggtggccacgggatggagcgtcgccgcagcgcaagactcgcggcaaagccgccaatgccaactatgcaacgctgcacgagggtgttattgaagcggcttggcatgctccatgacgacaagacgctcgacgaggtgctctccgactacatcgccatgttcaatggacctctaccgcaacacgtgatcgcagcgctcacgtccatcttcgacatcgacgccgatgcaatcatggaagccaatcacgtcgacaacacgctcctggaggttgtcggcgaaggcgtcgctgaccttgtcgaggaggttgccgacacagcggcatgaacgggagggtgggcgccctgctgagtactctgtcttctccccatgatttctaccccagatgaaagtttgtacccttttgcttgtgcaaagactcatagtttgcaccctgcggctgctgatggagcttttgctaatcgtcgcatgtatcctgcgtgggaagctgccctacatttggatgatttacgtttacggaact

SEQ ID NO: 22153 - DNA, 478 bp, Oryza sativa
  ref <308>: DATABASE ACCESSION NUMBER: AK072351
  ref <309>: DATABASE ENTRY DATE: 2001-12-06
gatccattttttttctctcgttttcctctcctctctctcccaatcttgtttatctctctcgttttcttctctcttcgaggagccgaggcggcaggcggcagcgcaagatgggaggcggtgggcgacgggaggtggcggcgggtggagacggtgcagcccagcggcggcagcggcggggagaggggaggcagtggcggcatacggcgacggcaagcggcgcctcccctccactagatctggcgggaggagagacggtgggctcctgcggcccctgcgacgaagtccccacgggcggagaggcggtgggctcccgaagctggcatcgagctcccccacgacaacagcggcaggctccccatggcggcggtgcttttgagtgatttttttgtgattgttgagtgatttttgttgatgatttgtgattgttttgtgtgatttttgttggtgatgattgtgattgctgcaagtgggtgatgtg

SEQ ID NO: 22154 - DNA, 3219 bp, Oryza sativa
  ref <308>: DATABASE ACCESSION NUMBER: AK072352
  ref <309>: DATABASE ENTRY DATE: 2001-12-06
ggttgaagatcgccgccgcctccctcaccaccgccacaaacttcgtctcccgccgccgccgcccccccaccgcgacgccatggcgctctaccgccgtctcctcctcctccgccgcctctccaccctccacccgcacccctccctctcctcctcctcctcctccaccgcctcccccgccgccgccgcttccgccacgcaccacctcctccctccccacgcgccgctcgcaccccacgcccgtggcttcgccttctcctccgccgaggaggccgcggccgagcggcggaggcgcaagcggaggctccgcatcgagccgccgctccacgcgctccgccgcgacccttccgccccgcccccgccgcgcgaccccaacgcaccgcgcctcccggacaccacctccgcgctcgtcggcccgcgcctcagcctccataaccgcgtccagtccctcatccgatccggcgacctcgacggcgcctccgtcgctgcacgcgcagcggtcacctcccgcgtccgccccaccgtcttcacctgcaacgccgtggcggcgtccatggtccgcgcggggcgccacgacgacgccgtctccctcttcgacttcttcttccgccgatccaacatcgtccccaacgtcgtctcctacaacaccctcatcctcgcccactgcgaggccgcccgcgtcgactccgcgctgcaggtgtaccgcgagatgctcgacaaggcccccttctcgccctccgccgtcacctaccgccacctcaccaagggcctcgtcgccgccggccgcatccaggacgccctcgatctcctgcgcgagatgctcaaccgcggccagggcgccgactccctcgtgtacaataatctcatcgccggttacatcgaggaagataactgggacaaggcattcgagctctttgaggagctccaggggaggtgcttggtctacgatggtgtcgtgcacacctccttcatggaggggtactggaagaaaggaatggacaaggaggccatggagaattaccagtcgctattggacaagaagttcaggatgacccccgccacctgcaatgtgctgcttgagacgctcttcaagcatgataaggacaaggaggcgaatgacctctgggagaccatgatcgacaaccacaccccgccgagcttcattggcatcaacagcgagtcctacaatgtcatggtcaatcagtgcttcaagaagtgcaaattccatgaggcaattgaggtgttccaccggcagcccaggaagaacgtccagatggacgttggctgcttcaacaacatcatcgggaagctttgtgagaatggaatgcttgaaggggcagagaagctttttgaggaaatggaaaccaagtcggtgcttccagacgtgtacacctacacttacctggttgattcatgcttcaaggtgggccgcgtggatgatacaattcagtatttctataagatggcagacggaagggagcatggcccgaagttcaatattggtttcttcaatcggatgtttgaagggcttacagaagctggccggatgggtgatgccttgaaggtatatggaaggatgcctgacaaggagatcaagccaaacacaaccacctttgagaccctggttaatgcattgtgtaaggaaggggacttggataaagcacgggagttggtgagtgacatggcaaaaggcggtgtcactcctcctcctgagttccgggattctgttattgacatttttaagaacgctggccggcaggaagagattgagaaagcttttgaagagaaaccagtgccattgcctcctcagccaaggccagagtatcgccctcgcaattcacctcaggggctgccaggatttgcatccaatcagacacggggtagctacatgcctcaccaaggccaaccgacatatggttctcaaccacttcatcctggcgttggtggatcccaagcgatacagcctcaggggatgcctttgagacctcagcaacctgtgtttggaggccctcaagttgataaatcagagtttggtggccgcccgttgcagcatggacctagcgcccctgatccacgacaacctggggttgtctccatgactcaacctccaaatgtcagtactcccaatacatggcagcattctggagttcatgcaactcaaggaacacaccatgggatgggttctcctcgtccatggcaacaatcagttggcattggtcaagtgcaacaaactgattatagctcgggtccaccgatgcagcctggttttggtcaccctcaaccaccacaaccaatgcatagtgctcctcagactcagcagcctgggtatggcacatctcatccatggcatacagggttcaatgctccacaagtgcaacagcctagttatggtggacctcagtcatcgcagcatgctgttggctccactcagccaccgcaggcacagtttggtgctcctcaagcaccaccaccattacctggttttcactatcagaacagaccagagtatggtcaagcagtagatcagcataatcgttttgggtctccccagggtgagccaagatttcacacacagcctcgacagcagggatttgatgctcaggctcctggaaatcatgctctgcaaggtcagaacagttttaacgctcgtcgaggacaagtagggtttggaaatcaaggggcaccgcctgaatatggggcttccccaagccaaccctcacatggtgctgcctggaaccaaagaggctatggattgtctgaagatcaagaagatgtaaatcagcaagtggtgcctcatgcttatgcacgtgtaagatgaaggatatctccatgatgcatactcaataagagcaactcaggttcctcaagcatcagctagttcaatagcatttggtttgggactatttttcggaaatgaaatcttttggaccagggaaaaatattgagttaatcattcaactatgttaacactgattatacgtttgtgatggtttagtcaccaattggtcaactcagtaatcatattgctagaatattttgtgcttgtcaactttgacctttttcctctctctattttcctgaaagaaaggccatgctggtatgcttgtatgtatttctcacgtgtgggattctttttttgttgcttggattagttatgctctctatttactcactgctccagtaaacttcaacggtatgcaaaaagatacatttccttttgtc

SEQ ID NO: 22155 - DNA, 2954 bp, Oryza sativa
  ref <308>: DATABASE ACCESSION NUMBER: AK072353
  ref <309>: DATABASE ENTRY DATE: 2001-12-06
gattttcttcattggcctggaacgacgacgaccacgtacgccatggcgcccggggccacgctcctcctgcggtgagggcacccaccaccaccaccagcagcagcagcgggctacctagttcggatcaggatggcgggggactacgtggacgtgccgctgggcggcggcgggcagagcacgctgccgccggtggcgccgctgaagaagcagccgtcgcggctggcgtccgggatgaagcggctggcgtccatggtgcccgacacgatgaagctgaagcggacgcactccagcgcgcagccggcgctgcgcggcctgcgcttcctcgacaagacgtcggcggggaaggacgggtggaagaacgtcgagaagcggttcgacgagatgagcgccgacggacgcctgccccaggagagcttcgccaaatgcatcggtatggcggattctaaggagtttgcaagcgaggtgtttgtggcattggcgagaaggaggagcatcaaaccagaagatgggataacaaaggaacagctgaaagaattttgggaggagttgactgatcagaactttgattcacgactacgaatattctttgacatgtgtgacaagaatggtgatgggcagcttacagaggacgaggtcaaagaggttattgtgttgagtgccgcagcaaacaaacttgccaagttgaaaagccatgctgcaacctacgcctcactgatcatggaagagctggatcctgatcatcgcggttacattgagatttggcagctggagacgctactccgtggtatggtgacagcccaagggcctccagagaaggtgaagctggcttcagcaagccttgcaaggacaatggtcccttccagtcaccggagtccaatgcagaggcgtttcaacaagactgttgacttcatccatgagaattggaagaggatatgggtgctctccttgtgggcgatcctcaatattgcattattcatgtacaagtttgtgcagtacagtaggcgggatgcatttcaggtgatgggctactgtgtctgcatagcaaagggtgctgccgaaacactcaagctgaacatggccgttatactcctcccggtgtgccgaaacacactaacaaggctccgatcaacagcactcagcaaagtcgtaccatttgatgataacataaacttccacaaggttatcgcactgacgattgcaattggagcggctactcatactcttgctcatgtaacctgcgacttcccaagattggtatcatgtccaagggacaagttcgaggccacactggggccttacttcaactatgttcaaccaacatactcatcgctggttgcaagcactccagggtggactggcatcctcatgatcttgataatgtcattctcgttcacacttgcgacacattcgttcaggaggagcgttgtgaagcttccatcaccactgcaccaccttgctggtttcaatgccttttggtacgcccatcacctactggtgattgcatatatcctcttggtgctgcactcctacttcatatttctcaccaagcagtggtacaatcgaacgacgtggatgttcttggcagttccagtcctcttttactcctgcgagagaactatcagaagagttcgtgagagcagttatggggtgaccgtcatcaaggcagcaatttaccctggaaatgtgctctctattcacatgaataaaccatcaagtttcaagtacaaaagtgggatgtatatgtttgtaaaatgcccagatgtttcgccttttgaatggcatcccttctccataacttctgcacctggagatgactacttgagtgttcatatccgtacattaggtgactggacaacagaacttagaaacctatttgggaaggcttgtgaggcacaagtaagttccaagaaggctacacttgcacgacttgaaaccactatcatagcagatggtctgaaagaggagacttgctttcccaaagtctttatagatggtcctttcggcgcaccagctcaaaattacaagaagtatgacattcttttgcttatcgggcttggaattggagcaacgcctttcatcagcatactgaaggatctcctgaacaacataaaatccaatggagatgtgcaaagcacgcatgatgctgagttaggctgcacctttaagagcaatgggccaggaagagcttatttctactgggtcaccagagagcaggttcctttgaatggtttaaaggcgtgatgaatgatgttgctgaaagtgatcatgataatgtaatagagatgcacaattacctgacaagcgtgtatgaagaaggagatgcaagatcagctctgattgccatggtccaatcacttcaacatgccaaaaatggtgtggatatcgtctctggcagcaagatccggacacattttgcaaggccgaactggagaaaggtattctcagatctggccaatgcccaccagaactctcgtataggcgttttctactgtgggtctccaacacttacgaaaatgctgagggatctttcactagaattcagccagacgacaacgactcggttccatttccacaaggagaacttctaagaccagaccaggaaaaaaacaccaaaataatcgcaggcgctcttatatagaacaagaaattttagcatcggttagcaactctttctgtgtaaagttccatcaagaactggaacattggtgtacaaaggtacgtgggcattagttagtgctgctgccgtttatagatggggaaaaagaaaggcatgtattttctgagcaatttgattgtttcttagaatgtactagaaacaacgtgcggctttgccgcgcccaatttagattaggccaatctattttgtcagtggccttgtttaggatcaatggttttttttcttaacatattgaaccaaaaacctaaagaaataaattaatagacgttgggacttg

SEQ ID NO: 22156 - DNA, 2173 bp, Oryza sativa
  ref <308>: DATABASE ACCESSION NUMBER: AK072354
  ref <309>: DATABASE ENTRY DATE: 2001-12-06
gtgatcagaaaaggaagacgagcagtagtagtagcagtagcagtagcagaagccatggctgggtgcatcgtgtgctcgccgacgacgccgtcatcgtctcaggctcatgtgctcctccaccgccgttgtagtatatcggcggtctactgccgccgccgccgccgccgccgccgcggtaagccggcggcgcatttccgccatcgccgtcgatgatctgtgctccgaggaacacggcgtccgacttattgatcctgcagcaagaatcacacagctattaaaatttcaggaatttcgatcccctcgaccagaaattatttcggctaaatttttgtttgggtaagacaattttcattcagatttaaccaaaatttgccctaatgtaacctttttggtccgaaattttcagaaaaccctgcaatttccgaaatttcgcttcaatgggtaaatctcagcaattccacttctatcggtaggttttccacagttcccaaaattcatgcaatttccgatatttcacttccattggtaaatgtccgcaatttccgaaatttcacttctatcggtaagtttccagtccctgaaccaaaacctgtccaagtgctaacttttttcaatccaaacatttcccgaaatttcgcttctatcggtgtatttccgcaagtttgaaaaattctcctggatctatcggtaacctgtccaagtgttaacttttttcagtcctagaatttcccgaaatttcgcttctatccgattttttttttcgcaatctccgaaatttcacttctatcggaattttctatcggtgaatttccgcaatttcgaaaaattctcttagatctatcggtaaatttcagaaatttctcttctgtcgtaaatttcggaaatttggcttccgtagctgcatgcgtacccggaggtagggaggcagaaggcgatggtgtagtcgtaggcggccttgcaggtgaaggtggaggtggagtcgtcgtacgcgtagctgtaggcgcgcgggcacgccgtcttgaagatggccgagtacgccgtcggccggcacgccgccggcgtcccgtactccccggcgcagcagtacctgtcctgcccgaacgcctcacacgcgctcctgcacgcgatcgccccgccgccgccgcactccacctgcaactccctcggacacgctgcacacatcgtcgtcgtcagctccggcaatggcgaagtggcggcggcgtggcgcgcgttcgtgcgtgcacttacagcggttgaggtcggccatgcagccggtggcgttgcaggcggcggcggcgcgagggatggcgacgacggggaggttgtagccgtcgacgaggctcacgtcgtagaagtcctcgccgccgcccctcccgagggtgacctcgaacagcgtcgccggcggcgcggcgccggcgccgcggcactccacgcgcccgccgcagtcgcccgtctggcacacgccggcgccgtcggcgtcgaacacgcaccccgtccgcgcccatatcctccccgaccaccccgccggcgccgccagctgcgccgtctgccccgggtcaagccggaaccccgtcgtcgacagctgtggcgtgccggcgccggcgagcgtccccggccatatcgggtgcgaacaatagttcgctatagtgaacgtcatcgccatggaactgcacgaccaagaagccgccattgccaccacaagaagccatagcttgcaagctcttggctctcccatggctcctatggctcaaaatttgggaattgatgttgataggaagaagattgagcagggaaggggaagaagacattgagagaattcttgcaagatttaaaggtgcaagtgccatgatgcattgcatttttgcatgtttgcatgcaaagaaagctttttcttggtgtgcttggtttagcatgttgcacggatggggtggcctaggaaagaagaaataccttttgggatgatgcaagcttatgatggtgacatgatcttagcatcaagagaggtgaatcttctgatgcttgtgctaatgcagataccttaattactagtcaaacatgctatgttttgaatactctgtagtctgtacacagtctgaacatttggacagagtacatgtttgtgagtttgagcaaccgggaaaatggaaatgtacagaatacttttcttatttgg

SEQ ID NO: 22157 - DNA, 4237 bp, Oryza sativa
  ref <308>: DATABASE ACCESSION NUMBER: AK072355
  ref <309>: DATABASE ENTRY DATE: 2001-12-06
gggcggcatggatgctccggtgagtttctccctaggtgccatgggccctctcctcaggaagctcgattcgcttccggtggctcccgaaatccggctgcctgagccactgaaggacggaatcgagctcctcaaggaagatctagaagaaatcggtgccgccctcgtggagcagtccatggtagattccccaagccacagggcaagatactggatggatgaggtgcgtgacctctcctaccacatcgaggactgcatcgacaccatgttttcgatgcgctgcggcggcgacgacggcaagcccagatccgttcgccgccacaaggttggccgtgtgaaggttgacggtttctccaagacgcagaagccgtgcacgaggctcgccaggatcgcggagctcagggctctggtgcgggaggccagcgagcgccacgaaaggtaccagcttggtgacggccgcgcctcgagctcgagctcgagctctcaccgcgtgttcactgcgcacggccaggttcctgcgccgtgcagaaatctggttggcatggacgaaccgaagacgaagctcaccaatatgctcaccgacgaagcagagctgcatatgaaagtggtatgcattcttggatcagccggtattggtaagaccacgcttgctgaacaagtataccgtaaacttagatggcaattcgattgccatgcttttgtgcgggcatcacgaaaacctgacatgaggaggcttcttggggccatcctctctcaagttcagctgcgtatacggatatctgataccagcacggtgcagagccttattgataatctctgggagtatctacagaaaaagaggtattttattgtaattgatgaattatatgaaacagcaacatgggatatcattaccagtgcttttccagaggataataattgcagtaggataatgactacggctggaattgaaggtgtagctctcgaatgctgcagttatcattctgtcaatattttcaagatgatacctcttggccttgatgattctgcaaaattattctttaatagagtttttggatcagagcaacaatgtccttatgaattgaatgaagtttcatataggattacagcaaaatgtggtggattgccactagcagtcattattatagccggtcttttagcaagcctgccgtgcaaaacagagctgtggtacaatatagatggatgtttatgttccagtgtgactacagatattgatttggatgagatactgaaggaaatcataagtcttggctacgacaatcttccacattatttgaagacatgtctgttgtatcttagtttatattcggagggtttcataatttggacggctgacttactgaagcaatggatatctgaaggtttcatcgctgtaatagatggagaagacatagaggaagtcgctgagagctatttctataaccttgttaacaggggaatgatccaaagtgtgaaaactaagtacaataatcaggtgttgtgtactgtgcaccacactgtatttgatcttattattcacaagtccaaagaagagaaatttatctccgcaatagattactctcaaactatgccaggaaattctttagaggctcgtcgattgtcattccactttagcaataccagatatgcaactgaagttgcaggtattacactgtcacaagttcgttcgtttgcctttcttggacttctgaagtgtatgccttctattatggaatttaagcttcttcgggttctaattcttgaattttggggagataaccatggatgcatgagttttaacgttgcaagaatttgtagattgtttcagcttagatatttgaagatctcaagccaaataataatagaattaccagcccagatccgggggctaaaatacttggaaacacttgaaatagatgcaagagtaactgcgattccatctgatattattcatctccgaagtttgttgcatctatattttcaagatgggatcgttctacctgatggcattggctgcatcagatctttgcgtacacttaagtattttgatcttggaagtaactctgaagagaatatacggagtcttggtcagctgacgaacttacgggatcttcatctcacttgttctgcaccaaaatcttatcagcaggcaaagagaaacctcgtaattctagcctcttatactgggaaactcggtaacctcaaatctgtcaaattttctcctggtgattcaggcatggatatttcctttttgttttatggaattggtatttcggttgatcgttccagaacagcgtcctctcttcctttctctgttaggacattagagttgccatccatttgcatatttgctagacttcctgactggattggtcaactccgtaaactccacacattgaatcttgctgttagagaactgatagaaaatgatattgatagtcttgcaggactgcctgacctcattgttctctcaatgcatatcatgaaagctcctatggaaaggattgtcttcaacagaaaagcatttccagttctcgagtatttcaagtttatatgtggcacactgcgcatggcttttcaggcaggagccatggccaatcttcacaggctcaagctaggtttcaatgcccataaaggggagaagtatgacaatattcttgtaggcattgagcacctattaaacctcaagaagattgctgttcgaattggaggagctgctgaagccaaggagtctgacaggatggctgcagaggctgcgttgaaagaagccattagaaagcatctaatgtttcttgatgatctcgacatagcaagggtagaatgtgttaaggaagagtataagtgtattaagaaaaaacacaagatcaagattgaagattcaattagcgaaaaaaatggggactcaaaaaagcagcattctgtcgaaaagaaagcagtgtggggcaaaactatgaagaatattgctgatagtggcgtgtttcctgaagattatactatgtcaagggagcaacgggtcgcagaaggcttcgtagtgggcattgaaaagtgcagggcagaggatgcggccgagcgaataatcaggaatgtgcctgtggactatgatgggcttggccaggtgagcacatccaagatacaggaccacttgcctgaacttgctcctcgtgctgtgcaaaacgagaagttcggctcttcaaatgatcttagcataatgatacaaatcaacaagtatgctcgtctgccatcttatgagtggagggacactgatatatccaaactgaatttccggcttctccgcgccccgatgttacttgaagctgtaacggcccgttgtcacttgttggacttaatcctcattggttcaaacaacattactgttcttgaccttggacgtcccacaatcaccaaactgccggcatctatagaatgtctacctaatttacggtacttgagattgcagggcacgcaactgaagtcgctgtcggaggttattgtgaagatgcccaccatcagggggttggacatcaagaataccaagacagaggagctaccacaaggcattttgaggatgaagaagttgagtcacctgagtatgggggagaagcagaaaaatattcaagtattcatggaaaaaatgcagactctggctgagaccgtccaagacagcgatgacttgtccgacgaaacagagggaatagccgacgacgaaggcgagttctctacaagggccaacgcgtcaacaccgaaggtggatgaggacgaggtggaccggagggccaataacttcatcgccaggttcaggaagcagatcacgatcaggaattcaggattcgccaaaaaggagagcagcatcgacgaacgactgtggatacgagatctcgatgagtgccaactctccaagagaggtggacgattttaagaagaagttcgacgagatcattgccaggaacaggcacacatggaagccaatcgagtcaccgcgttctgtcaagcacggcaagtatttcgttcgctgcccgccgtcgctaatcaccagcgctgtcttttcctttttctttctttctatttttctagtatggtactccctccgtttcaggatattgtcaggaaacccctaatcaatcgccttgtgaacactggatgaactcacgcgaaagtggaagaacacgtagaacacaatagtgtagacgaacagacaacaaaaacagagtttttggtgctgcctgaattgcttgcagctttt

SEQ ID NO: 22158 - DNA, 3954 bp, Oryza sativa
  ref <308>: DATABASE ACCESSION NUMBER: AK072356
  ref <309>: DATABASE ENTRY DATE: 2001-12-06
gacctttcgtctacctcccgcctcacactcctcccctcacctcctctcctcgattaaattaacccccgaaatccaccaccaaacgctcgcgagattaatccgattttaatcctcgagatttgtttaatggcagggctaatctcgccccaggccttgtagaaagcgacacccaaaccaactcacctccattggtgaggtgccctgtccttttctctctcctcctcctcctccatagttaagctccccaccaccactactactagtagtagtagcgctgccacctcccgctccactcccgcgtcctctgctggaagccttcttctcctcgccgggaggattccagcgcgggatgcggcggtgctgatcccggtgtgcacggatcttgggtgtgattcggtgagctgagagctggtttgctgctgctgcagcgtgcgccatggacggcgacgcggatgccgtgaagtcggggaggcacgggagcgggcaggcgtgccagatctgcggcgacggcgtgggcacgacggcggagggcgacgtgttcgccgcctgcgacgtctgcggcttcccggtgtgccgcccctgctacgagtacgagcgcaaggatggcacccaggcttgcccccagtgcaagaccaagtacaagcgccacaaggggagcccggcgatccgtggggaggaaggcgaggatactgatgctgatgatgtcagtgactacaactaccctgcatctggcagtgccgaccagaagcagaagattgctgataggatgcgcagttggcgcatgaatgctgggggtggtggagacgtcggccgtcccaagtatgacagtggcgagatcgggctcaccaagtatgacagtggcgagatccctcggggatacatcccttcagtcactaatagccagatctcgggagaaatccctggagcttcccctgatcatcatatgatgtctcctaccggaaacattggcaagcgtgctccattcccctatgtgaaccattcaccaaatccatcaagggagttctctggcagcattggaaatgttgcctggaaagaaagagttgatggctggaaactgaagcaggacaagggagcaattcccatgaccaacgggacaagcattgccccttctgaaggtcggggagttggtgatatcgatgcatccactgattacaatatggaagatgccttactgaatgatgaaactcgccagcctctctctagaaaagttccccttccttcatccagaataaatccctacagaatggtcattgttctgcgtttggttgttctaagcattttccttcactaccgtattacgaatcctgtgcgcaatgcgtatccgctctggcttttatctgttatatgtgagatttggtttgctttgtcctggatattggatcagttcccgaagtggtttccaatcaaccgtgaaacctaccttgataggctggcattgaggtatgacagagaaggtgagccatctcagttggctgctgttgacatttttgtcagtacagtcgaccccatgaaggaacctcctcttgttactgccaataccgtgctgtccattcttgctgttgattacccagtggacaaggtctcttgctatgtatctgacgatggtgctgcaatgctgacttttgatgcattggctgagacttcagagtttgctagaaagtgggttccattcgttaagaagtataacattgagccaagagctcctgagtggtacttctcccagaaaatcgattacttgaaagacaaagtccacccttcatttgttaaagaccgtcgtgccatgaagagagaatatgaagaattcaaagttaggataaatggccttgttgctaaggcacagaaagtcccggaggagggatggatcatgcaagatggcacaccatggccaggaaacaatactagggaccatcctggaatgattcaggttttccttggtcacagtggtggccttgataccgagggtaatgagcttccccgcctggtctacgtatctcgtgagaagcgtcctgggtttcagcaccacaagaaggctggtgccatgaatgctcttgttcgtgtctcagctgtgcttaccaatggacagtacatgttgaatcttgattgtgatcactacatcaacaacagcaaggctctgcgggaagctatgtgcttccttatggatccaaacctaggaaggagtgtctgttatgttcagttcccacaaaggttcgatggtattgataggaatgatcgatatgcgaacaggaacactgtgtttttcgatattaacttgaggggtcttgatggcatccaaggaccagtttatgtgggaactggttgtgtattcaacagaactgctctatatggttatgaacccccaattaagcagaagaagaagggaagtttcttgtcatcactatgtgggggcaggaagaaggcaagcaagtcaaagaagaagagttcggacaagaagaagtcaaacaagcacgtggacagtgctgtgccagttttcaatcttgaagatatagaggagggtgttgaaggtgctggattcgatgatgagaaatcacttcttatgtctcaaatgagcttggagaagagatttggccagtctgcagcgtttgttgcctccactctcatggaatatggtggtgttcctcaatctgcaaccccagaatctcttttgaaagaagctatccatgtgataagttgtggctatgaggacaagaccgaatggggaactgagattgggtggatctacggttccgtgacagaagatattctcactggattcaagatgcatgcgcgaggctggagatcaatctactgcatgcccaagcgcccagctttcaaggggtctgctcctatcaatctttcagatcgtcttaaccaagtgcttcggtgggcacttggttctgttgaaattcttttcagtcgccattgtcccatatggtacggctatggaggacgccttaagttcttggagagatttgcctacatcaacaccactatttatccattgacatcgatcccgcttctcatatactgtgttttgcctgctatctgtttgctcactgggaagttcatcatcccagagattagcaactttgctagtatttggttcatctctctcttcatttcaatttttgccactggtatccttgagatgaggtggagtggtgttggcatcgatgagtggtggaggaatgaacagttctgggttattggaggtatatctgcgcatctttttgccgtcttccagggtctcctcaaggtgcttgctggtatcgacaccaatttcactgtcacctcaaaggcttctgatgaagatggcgactttgctgagctctacatgttcaagtggacaacgcttctcatcccaccgacgaccatcttgatcattaacctggtcggtgttgttgctggtatctcatacgcgatcaacagcggctaccaatcatggggaccgctctttggcaagctcttctttgccttctgggtgattgtccacttgtaccccttcctcaagggtcttatgggtcggcaaaaccgcactccgaccatcgttgttgtttgggcaatccttctggcttcgatcttctcattgctgtgggttcgcatcgatccattcaccacccgtgtcaccggcccagatacccaaacatgtggcatcaactgctaagaaagcaggggattgtagagacagaaatactgccagttgtgttttttcagaatacaaagtgccactgccaccaattgtgttttaagttattaggaggtggctttatttacagctacgtacagaccagaaaatattgctcatcagaaagttacttgtgtcgatatgtattcttttgttgataagttatatactattttgatgagagtggctgacactgtcaacgagttttgtatcttatgaaggacacaataaactattagtttgcattcttt

SEQ ID NO: 22159 - DNA, 2164 bp, Oryza sativa
  ref <308>: DATABASE ACCESSION NUMBER: AK072357
  ref <309>: DATABASE ENTRY DATE: 2001-12-06
gacacacttcccaacccatcaccctcccttccccagcttcccctctccccttccgatccctcctcaccgccgcgccgccgcttcccctcctccgacgacgagacccgccggccatggcgctccatctcaccgccgccccgaccattgccccctccgcggccgccgcctgcaggtcgctggcgccgatgccgcctctccccgccgtttcgtgctcgagtaggtggtggagggggaggcggcggtgtgtcgcggtggtggccatggcggcggcggcggcggcggacggggagaggccgcatgggcacgcggcggaggctggcactgggaggatgaacctcaacgagtacatggtcgccgtcgaccgcccgctcggcgtccgcttcgcgctcgccgtcgacggacgcgtcttcgtcaactccctcaagaaaggggggaatgcggagaaatcacggattatcatggtaggggacactctgaagaaggctggcagtcgtgagggcgtgggttttgttgacatcagagacctaggtgacacggaaatggtgttgaaggaaacgtcagggccatgcgatcttgtccttgagaggccatttgctcctttcccgatacatcagttgcatcaaaatgaagattatcatctcctatttaacaagggtagggttcctcttactagctggaacggtgctctattatcatcaaagctgaatgaatcatctgaggggaacggaaatcctggatttgccatattctcgccaaggctgctaaattcacatggatgggcagttttgtctagtgagcaagatggacttaatcagcgcagtactagccttgcaaatcgtataagtgagattgttggtttgtactctgatgaggatgatgcagatactgaatgggcacatggtagctttcctttggaggagtacattaaagcactagaccgtgctaaaggtgaactgtactacaatcattcacttggtatgcaatacagcaagattacagaacaaatatttgttggatcatgcctacaaacagaaagagatgtgaaaatgctatcagagactatgggtatcactgctgttccgaattttcaaagtgaaagtgagcgcaccaattggggaatcaattcagaggcaatcaacaattcttgtcgcgagaacaacattttgatggttaactaccctatacgagaggttgattcaatggacctgaggaagaagctttctttctgtgttggtcttctactgcggcttataaggaagaactaccgcatatatgtgacttgtaccactggatatgatagatcaccagcatgtgtgattgcatatctacattgggtgcaggatacgcctctccatattgctcacaagttcatcactggtttgcactcctgtagacctgacagagctgcaattgtgtgggcaacatgggatctcattgcactagttgaaaacggaagacatgatggtactcccacacattcagtatgctttgtttggaacagtggtcgggagggtgaggatgtggaattggtgggggattttacaagtaactggaaagacaaagtaaagtgtgaccacaaaggtgggtcaagatatgaagctgaaattcgacttcgacatgggaagtactattacaaattcatagcagggggccagtggaggcactcgacttcattgccaacagagactgatgaacatgggaatgtcaacaatgttatcagggttggtgacatcgctcgtattcggcctgctcccagccaactgcagataagggacccaactgttgtcaaggtcatagagagggcactaactgaggacgagcgattcttactggccttcgctgcacgccgcatggcatttgcaatctgcccaatcagattgtctcccaagcaatgaacacatcataatacctactgagatgaactgcagcgaaaatttcagccctttcaagacgaactgaggcgcggtatatcgatgttccttcccttacatagcaaaactcatgtaacattgggacattcggggcaccacctgcctgttcaaatcaactggacattgctagagaggggttgtggacattgctcagcagttcatcacagtgcatacaacttgtgtaacagtgtaactctatgaactgtaatatgagataaacttcattttggtct

SEQ ID NO: 22160 - DNA, 2987 bp, Oryza sativa
  ref <308>: DATABASE ACCESSION NUMBER: AK072358
  ref <309>: DATABASE ENTRY DATE: 2001-12-06
ggaagaaaaaccctcacctccactcccccctcgccggagccacggcgaccctctccaccccctgccttgccgccggcgagtgtccttgcgtgcgccgccggtgagcgggtgtggatcccagcggcggcgcgatcggccttcgaatcgaactgaaagctgaaccctcgttgccactgctgtgaacatgtcccaaattgagaagatcgtatgagctatggggaattattaggattcttggaggcggcggcggcatatggtgttcttcccggaggaggtggtggagcacatccttgggtttctagcgtcgcaccgcgaccgcaacgcggtgtcgctggtgtgccgggagtggtaccgcgtcgagcgcctcagccgccgctcggtgctcgtgcgcaactgctacgcggcgcgcccggagcgcgtgcacgcgcgcttccccggcctgcgctcgctgagcgtgaaggggaggccgcgctttgtccccgcggggtggggtgccgcggcgcggccatgggtggccgcgtgcgtcgccgcgtgccctggcctcgaggagctccggctgaagcggatggttgtcactgatgggtgcctcaagctgctcgcttgctcattccccaatttgaagtcgctcgtccttgttggctgtcaggggttcagcactgatgggcttgctactgtcgctaccaattgcagatttatgaaggaactggacttacaagagagtctggtggaggatcgagactctcgttggcttggatgttttcccaagccttctacattactagaatccttgaatttttcttgcttgaccggggaggtgaatagtcctgcattggaaatactggttgcaaggagtccaaatcttagaagcttgagattgaaccgttcagttccacttgatgttttggccagaattctttgtcgcagacctaggctggtggatttatgtacaggatcttttgtacgaggcaatattgttggtgcatatgctgggctattcaatagttttcaacattgcagtttgctgaagagtttatctgggttttgggatgctacaagcttgtttattccagtgattgctcctgtttgcaagaatctaacgtgcttgaaccttagctctgctccaatggtcaggagtgcttatcttattgaatttatttgtcaatgcaagaaactccaacaattgtgggtgttagatcacattggtgatgaaggattgaaaattgtagcctcatcctgtatacagctccaagagttgagagtatttcctgcgaatgcaaatgccagagcaagcactgtgacagaggaagggctagttgccatatctgcaggctgtaacaagttacagtctgtgctctatttttgccaacggatgacaaactctgcactgattactgtcgcaaagaactgcccacgattcacgtccttcagactgtgtgttcttgatccaggatcagcagacgctgtgacagggcagccattggatgagggttatggggcaatcgtacagtcatgcaaaggccttagacggctatgtttgtctggacttctcacagacacagtgttcctctacattggcatgtatgctgagaggctggagatgctttctgtagcatttgcaggagataccgacgatggcatgacctacgtgctcaatggctgcaaaaatctcaagaagctggaaatcagggacagtccttttggtgacagcgcgcttcttgcaggcatgcatcagtacgaggcaatgcgctcactctggttgtcgtcgtgtaatgtcaccctggggggttgcaagtctcttgcagcaagcatggcaaacctcaacatcgaggtcatgaatagagcagcaagtatcaatgaggcagacaatgctaatgatgcaaagaaggtgaagaagttgtatatttacaggacagttgctggaccgaggggtgatgcgcctgaattcatctcaacgttctaaatccatatatttttgaagttgaaggtttgttcttcgacaaccaccttttgtttatatcatactctgctacgtcgagttgatctacatgttctaaagatctatctatcttcacggtcgaagggatcttctaggattattttgtgtaaattcctttgctatcacctctgctatgtcattatcttccagcagtgctacacttatgattaatctccaaaattgaaactctatagttatggttaacttggcagattgattacacatcatggtaacatctaagccttgtaataccataattctagcaagtcatatgcgtggttcatcttcatgtatatacgatttcatatcgatgctctcatgtaatgtctgggaaatttgaagtgccaaattgttacttttctgagtcgaaagatatgatcagttaagcctgatgaacagctgattcagtagttggaccctccaatttgttgcagcatttcagcactggtcaagactaatctgtgatttacagtttgagaatttgagtagatccccatcctgtttaccttcaaatactctgaaatttttctttctgatgtcgcaatccaatgtccatgtcgctgcaagacagggtggcttggaagtcagtcatctcgctgtcagttgtagcgtgggtgtactggtgttgctcacagtttgatatcatcatcatggccatcacacaacatgcttattcctgcacggtttagcaagctttaattgaccaccatcatcgcttgctgtttgatcattagtactacatcaattggagtccaaattccaaaatgtttggttataattgcttcgaggcaattaagatgtttatgagggtaaattaaggacttgtttagttggggaaaatttttatatttgattgtcacattggatatacggacacacatttgaagtattaaatgtaatctaataacacagtaaattatagattccgcctgtaaactgcttggtgaatttattgagcctaattaatccgttattagtaaatgtttactgc

SEQ ID NO: 22161 - DNA, 3462 bp, Oryza sativa
  ref <308>: DATABASE ACCESSION NUMBER: AK072359
  ref <309>: DATABASE ENTRY DATE: 2001-12-06
gacccagtccctagtccctaccaaacacttgagatggccttccagttgttaccagccatgatcatagcagcttccttgctgcatgtcgcagcagcagttggcaacgagaccagcagcaacaacaacacaagctgcgcgccggcgagatgcgggaacctgaccatcacgtaccccttctcgctcagcggcgtgcagccgctctactgcggctacccggtgttggacctcacctgcgacaaccgaaccggccacgccttcctcagcaggacgttccgggagcacctgttccgcatcgacaatatattctacgagaatagttcgctggtggcagccgtgcagaccaccttcgccggcgacgccgactgccccatcccggatttcaacgtgacatccagcctcactccgtacccattcatcatcagcaacatctgtcgtctacaactgcacgcttcctgatgacactcggctgcaacggccatatgcaaaccagacgacgatgggagcttacatctccgatcggtggaacagcacgccgccgtcggggattccagggaactgcatctccgtgagcttgccggtgcgtggtggagatggaatgaagctgttagatcaacactacgagcaattgatcgctgatacgatcggtggtagaactatcattcatggtgatggtggtgggtccattggtggaaatggtaatgggtcaattcaacagtacgagcgattgatcagtgatgggttcgtcttggagtggcagagggcggtaacaagagatccagactgcgacgcatgcagaagaaacggcggggagtgcaggttccaacaacttatgttccagtgcgtcagctgccacgggttgatctgctcgaattcgacatctccatgtaagaacgctctcccaattttcgttttcaagacaatgaaactaatttcagtactctcccacacttgcttctagtacatgttctgtttgaattcattagtagcagtccaacatctacaactcttaccaatctagtaacaaaatagaccaggcaaaaatatagtgcttcaaagttcaaattacaaaactgtaccgctaggcttaccgaagtcaggaaggtgttttttttttcccgagaatgcacaaaaggcttgtgcatcttttgtattaagatttagagaagtttgagataacaacggtcaacacttaaaaaaaggaaaatggaaattaacaagaagcctatctcttgcgatattacttaaacgaccgccccggggggggggggggggggcgcacagcactcatcaactgcgtccttggccacttccctccacgagcgctgtcgatgtttgaacaccctgttattgcgctctttccaaattgaccaggcgaccaagatgacgactgtgtcaaagccttttctctacttctgagggaactattttcttgcattcatccaccagttgatgaaggatgtctccggaagctggcttggcagccaatgacacttagtcaggaaggtgcttcaatttctccaaagagatgccctcaaattccttctctctctttttcatcaatgcaaatatgcaatccagagatccactactgttctgaatttccaatgtcagacagcttgttgccttgttgttgctgagtttctctctgtgtcagatagtagccgttgttaatttagatgcagttatgtatataaactgttcgtggccttttttagaaaaaaaaaagtgcttttattcatgaataagaactgagcccaacacacatcaactacacaacaccacgaaccgtcagacattagagcagtacggagaaccgttatatatctcacaattaagcctagctagcttacataaaaatcgaattgatataaaaaagaatgtgagcttttcttcaatcggtattcctttgcatgttttaacagctgaaatttttcattgatttaaccgtaatttgttgcagattggagtaatcggaagctgaatgtcagggcaattttgataggtatgtcttttgttggtgaataagctatgtgaacatacagagaatcacatgattccgctggcaccccagctccattccatgctctattattgtgatactaaaatgactaattctagtgctatttatttttgcctcagattgctaaatgtcatattttggaacaccgctaactaaattttttggtgtcctgatatttttcaagatttttcacatttacaaaggataatgtacataacacaagcacatcttgtatgacaaggattcactcattttttgtataactctccagcttccttgtccgctacagctggcgtggtttttatgtgtctcgtttggataatgcaccgacggaagcaaacacttggttttatcattcaccacaagtacactggaaatgagtcaaatacagaagaggaattaaagagataccagtctctgtctcccaaaaggtacaggtactcagacctgaagaaaataacgaaatgtttcaaggaaaaattaggagaaggtgggtttggtacggcattcaagggtaatctaaaagatggccgtatggttgctgtgaaacttctaaaaggggctaaaggcaatggagaggaattcctaaatgaggttactagtattggtaggacatctcatgtcaacattgttaatttacttggcttttgtttagagagatctaagcgagccctcgtttatgagtacatggctaacggttctttggggaagtatatttattctgagagtttgaggttagctattggattggaaagtttacagaaaatagcaattggcgttgcacgaggattggagtatttgcatcagggttgcagcacccggatcatccatttcgatatcaagcctcacaacgtccttcttgatgaagacttatgtcctaaaattgcagattttggattggcaaaactttgccacctcaaggatagtgccatctcaatggctgaagcaagaggtaccatcggtttcattgcaccagaagtattttcaagaggcttcggagttgtgtcaactaagtcagatgtttacagttatggaatgatgctgttagagatggtagaaggaaggaaaaatgttaaaacaaatactgataattctagtgcatatttccccaactggatttatgatcatttagcgaaagatttgcaaagccatgaagtcacatgcgagaatgaagagattgcgaggaagatcacactagttggcctgtggtgcatacaaactgcccccaggaaatcgtccttcaatgagtaaggtcatagaaatgctggagaagaacatcaacgaattggagatgcccccgaagccgatcctttcatgtcatgcagcgccatcgtatttttcatcttattcttaactaagaattttcttttgggatgattcattctatatatgttccgccactcagctaaagtaaatgaatggaagtatgtttttgttaagcc

SEQ ID NO: 22162 - DNA, 1366 bp, Oryza sativa
  ref <308>: DATABASE ACCESSION NUMBER: AK072360
  ref <309>: DATABASE ENTRY DATE: 2001-12-06
gcccttttcccctcttccccagctcctttgttaggttttcttccagtgagctctttttgctcatattcagatcttcacttatttcctagttgttactactgcctttgagtattgacagcttcatcctgccaactcagctcaatcttcctctgaagtttcagtctttgtttctgaatctcttcagtgttcagaggggaagttctgccaaaaaatttctctggccatccattttccaaggggagattctgccaaaattttcatctctgtccatcaatattcctggggaggttctgccaaaattttctctgaaatcggttaatttataaggggaggttctgccgaaattttcgctggtcatcaatcttccctttgttgacataccctgcataagtatatacaacaaacatataactttttgcaaggtaagaaggagtttttatctgttcttgatgatagactcctagagaagttgtcctagttgtgtagatgttgttgctcatcatccctgagcacctcctctctagatttatgactggcccagccataacccagcttgttcagtccttctctgttgtcttcctctactggttctatgtcttctcagtaagctccctgtagttgtagccttttgaaattacaagacttatttatacaacataattatcaaggcatccacatataaactacaaggtatatatatatatatatatatatatttacaaaaagaaaaggaataagagggagtaaaattgttgccggtgcgaaaaaaaaaattgttgagaggtgaccatgtcgagtgggacctcgtccgggtcgagccagggaacccggagctccaggtcggaagatgacctgaacctccaggcccagatggagaagaagaggaagaggaggaaggagtcgaaccgagagtcggctcggaggtctaggatgaggaagcaacagcacctcgacgaactcacctcgcaggtgaaccagctgaagaatcagaaccagcagctgagcatggcactgagcctgaccacacagaaccttgtggcagtgcaggcacagaactcagtgctgcaaacccaggagttggagctgcagagcaggctgtgtgccctaactgacatcctgatgtgcatgaacaacaccagtgctactcctactcctacaattccagccaccactacaagtgcttgtgatatttttggtgccagctcatggaaccagccacccatagacttgtaccagtaccagtgcttctgatctaggaataagaagagggttgttgtggtagtgtgggtaggaccagaagccatcaagtaatgtttcaatcatgtagggccattgttgtcactgttaatgtatgcaattcaatctt

SEQ ID NO: 22163 - DNA, 2407 bp, Oryza sativa
  ref <308>: DATABASE ACCESSION NUMBER: AK072361
  ref <309>: DATABASE ENTRY DATE: 2001-12-06
gagatatctctgaaatctccacttctgacagacggtccaccgccggaccgcgacgatgcaccaccgcaccgcccgaccagcgccgaggcactaccgcactgctgcccacggccaggcgcgggtccagccgcctccgaccgccaccacagcgcctccactgcctgcagggacgccaccgctacccgcccggctacctccgttgccgccgccaacacgcgagtctcctcctccctgatcgagatcgagtcgacacacatacaccaccaaccaccggccggccgccgcgcgccggtgagcaggatggggaggccgccgtgctgcgacaaggttggggtgaagagaggggccatggacgccggaggaggacctgatgctggtctcctacatccaggagcacggcgccggcaactggcgcgccgtgccgaccaacaccgggctgatgcgttgcagcaagagctgccggctccggtggacgaactacctccggccggggatcaagcgggggaacttcaccgagcaggaggagaagctcatcgtccacctccaggctctcctcggcaaccgttctctaccataatcgtggtccacaacatagccatgctttctgaatactttcaatggataatcaacgaagctctacactacaaatttctgcaatgacaggtactattattttttgtctgaattttgctttgcttgctacctttattttacctgcagacaatttatatttggcctgtgataatactctattgtagtgtatgtactaaaaggtgtttttattctatttaattaggagggatcatatggaggttagtttatcaacattctaaagtatcaatattgatgctcatgattttgttaactattgtttatcactgattctctttcatgcccaataggtgatttcaccaatgaaagatggaacatttattgattgggatattgttgacaatatatggaatcatgctttcaagcagcggctattgatcaatcctgaggagcatcctatgttgatagttgaaccatctacaaacacagggcagcaaagagagaagtatgtccatatatattctgtatttaaattaattgtgttgcttacttgtatagaaaaacatcgcgtataagaactagctgatttatagcacaattttcttctatggctcttatcagttatgactgaactgtattggtaccaggatttactgcatgatcagacatcctaggtagtatattgtagataaaattcaattacatgggaaattttcaggctgtagttgctctgtttgttgctaacgaataattcagtcctatattcgtcttctagggttttacattcttcctctcgggtcctatattcattttctgggctcctgtatttgttctccgagtctttctctcgattcctatattcgtcctctagggtcctatatctaaatttaacaattctcaaatcctttttatcatttttgtatcgtgggttgtcaaaataagcaactatagtatttctacgtaaaacacccataaagggtatttcaatcgaaatcccaaaaacaggatattggttctttcgcttgctcttgatgatactgtttcttcgcattttggctaacaaatctgaattattttgaagaatagaaggatagacaaaattcaaatgaccattggacatgattcgatccggcgttgaataatcaagaatttccctatcttttttaacaaaagtatccattcagtcgttctttttatcatgccatttttgttatttatcagtttttttggaacaaaaacatggtattttcttagttgatgctttatgcaggtatctactgactttaaagatcatgaaggcataatgcatatatcagggctttgacatggtcttcgtgcaagaataaaatgccattttgtgtttgtcaacaagtgttatttattttttaatcaacaattgtttgtcttacttcaggttcactgatctaatgttttagtcttgcacctatcacttgctaataatgttgtaaccttgccttgcacctatcacttgctaataatgttgtaaccttgctcctgtcacttgatagtatttcaaataatttccaatattatttgtgcagattatataaggtcgctttaagattaccttgttcagattcttcggccggccctattctttacattatgcattggactattgagcctggttgtttttggaggaccagggagcatggctggagtatcatctggaggataacctgatgtggattattcacttggctttgtcttgacaaataatatatgagttattgcttgtaagagaggtcaagagaggtcttattttctgatcttatcctagattgtattaaggacaattcatgtggattaaggagaattcagaaacaaaatttgg

SEQ ID NO: 22164 - DNA, 3594 bp, Oryza sativa
  ref <308>: DATABASE ACCESSION NUMBER: AK072362
  ref <309>: DATABASE ENTRY DATE: 2001-12-06
ggcgcgtttcccagcgagttcgaatcgaaaagcgagcactcgattcgacggagagggcaccccactctccccaatccgcaaccccggcggcggttgcggcggcggcacgcggcggagatgctgcagttcccggcgctgatgcggcagtggccgtcgccgccgctgatcccggcgtccacgctgctccccgtccccgccaccacccaggaggacgagctcctcctcgccatggccgagtccgacctcgaggacaagctgaacgagatccgcaagaccaacagtaacctggtgatcataggcaagccaaccggcgacgtcaaggaggagtacgacgccgaggccgaggacgacgacgccgacaacgtcgaggagtccgacggagacgacttcgaccaggagaccggctgagccggcccccgactccgactcctcccttcggaagtctcagtaattatgtactgctaatggcactacatgattgcatcctctgatcgtcaccattccagcaaagctcaaaagggcggtaactgataaggtgatctaattggaatattacctgcaaccatgttccagcagcagcgagggatgacaacaatccagcgaagagcagagagtcctttccttggaagacagatgcgactaggatgcccttctgcatggtgctggtgacatgggtgcccataaggaatgcaccagagaactctagcaccgccgcagtaagcactgcttgccggagtgtcaaagcaccagaccctactgacgtccccatggcattggccacatcatttgccccaatgttccatgccatgtagaaccctgaaagcagtgtcagatatgccagtgccttcattttgttcgtcccatggaagaccactgactgcatcgccagtggcacagtgagcgctgcaaatgcaatcaccactgagattgacattgccatccggggcgatatatggaatgccttggccatctccgacagttcagattccccgttctgctcctcctcagactctgtggcatctgcttgcccgctggagccattatcagcattggcaaaggaggatattgtggcatggggaaggctcaggtgtgagttcagtgtcttggcaggtgacacaatggctgaagggtagtacctcaggccatgaatccgaggtggcagctgagcaacagggtgacggagcaggagagcggcagccgcagctcgccctcctgctccagcatgtgctcgggcaacggagaagaaaggggaagattgagacatggagtggcagaagcaaagtacaggtttgagcagagaagcaccgagaagaaaaagatgagattaagggggaggagaggaggaaggtgaatgagaagcggtggccataggtgtttgtggaatgaagtgagcattgttttgtggatggaggaaagggcttgctttctgtggtggcccagctcgggctgagatgaacgagtggtggcttggaatgagtggtggaaggggatacgagcaagattccagcctaatccataacctggggttgcagctgaccacttgactgttttcagtctgcgttaccatcagggccacccttccctccatcgtcttttttaaagatctaactgttgtctgtttctgttgttttgattctccagtgcaatatttagcatgacattaacatcttgcatcagtttaatatggaaggcttctgaagatacttgcgtctgtggttctaaagctgatgccatctactgtgcagataaatgaaactaatacagttacatgtgaagttctcatgttatatgtactgttcttatgacagaaaaacgtactgttcttatgacacacaaacggtgactcttcagatatacagtcggtgttagtaatcaagattttccatgctcagaaatctatttaattgcagaggaagtcaacactggtctggcttctcatgggtatcaggatggaccggtggttcccgtttggcagtagcgattggagcgctgctggccaaggaccacagaacagaaaatcaacttgtgtgctccaggccggatgctgaagagaagaataatcagcgtctttgtccctgtatcaggtatggaatacttgatcttgtcttctacgatcactagagattggccacaatttatcaggtatggaatacttgatcttgtcttctacgatcactagagattggccacaatttatcatttagcagacaccgcactagacacattttctgctcatcgagttggccagggctcaggtcgacattttttttttccctgcaagtcgtgtgttgtggatgaagtattgtgtctttaaagcgtgcacagtttcaagatttcttatggctgattctccttttgccgacttcactttcgaatctgtagttaggtataagaatcttcctgtgatttcagtttggtgttgcttctgaatttgtacgataacttaaaaacaaagatactgagtagtagtatacttgtagctccaaatggagatttgtaactcgaccaaattgcagggcaccactgagccatttgcaagttcgacggccgcaaacaggagagatagaagcatacttatatatataggggagagagcgcaataacataggaaaaaaatgattgaaattacgtgaaaaatgtggtgttatattttaagcaaaccatgtttatttatcggtttgattttgagatatcaaattttgacgtacaatatttccttgaaagtctaatcaaattatggggagtaaaagtggtaactctagatttatgatcaaaataacatagtgaaatcccttcacaagaaatgactcagtgaagtccatttaatgaataataatcttggactcgaattgttctgcgattttgctatatctcacttgaaagattttttctttatctctcactcgattttctcactcaaatttacagtgtattttcttgtaaattatagtgtaatttatgaaacttacagtgtaatttttgaatcttcgcatgtaagttttgaaatttatattggatttggtctttttcttaaagatatggtaatttagtatctattatggtgtttcttagttgctttttgccttttactatgtctattggattttaatccaaagattaaaaatttatatgatatgatcatagaaatctttcgaaagatgcataggtactccttgttttggaaggtaacgcaaatagccaatgaaagcgttttgaaaacagatcagtattcgctgtatgtggactgtggtggtcatttcatgggcctgaggcccttgggatcagcctgtgctcgcaactctatcacctgggccttgtgtagccgaccattccaagtcctacactcggactcaaatcactcaattgtcctttcctttgcagacattgatccttcctatggccggctgatttggaaaagcaaagtacccggacattgtgaattgtttgtgtggctcatccaatcaagcgatttcaccaatgtttaaacggccgttgtatgtgtaatctttgtacatcatgtatacttaactagacgccatgtaatttgccttagaaagtaacaaagccttctctaaataactatttcctctggtc

SEQ ID NO: 22165 - DNA, 3481 bp, Oryza sativa
  ref <308>: DATABASE ACCESSION NUMBER: AK072363
  ref <309>: DATABASE ENTRY DATE: 2001-12-06
gggttgatgtattcatacacatatatgagaaagcaataaaactgtgatgcctctccctatatctgtgttcattattcatctattgtgtgcatgagatcgtcgtcttctactccggatcagcgaataggccactagttattcaacacgttatcagcacgagtttgctccttccactgatctggataagcgtttttactagatcaatttatttatgtactaatcagattgatctattgtgtttatgcatgtgtctgccgtcggccgagacgatcgcctccgcatgtagccgcgcaccgcggcagcccggagcagcaaacccgccggcgtcctcactggagcccccaagccgctgacacatgcgcatgcacatgcgcagattgcagctgcagcagccatatggacctatccaatttcaattcactaatgcgtttgcatatgtatcgatacgtatctaaccacgattgatctatcgttttgcatgtacgccatcggtcgattttcctcctgcatcgtgcgaggcaccgccaccaggcgtccacacgtctctcgtgccggcaaccgcgcgccgcacgcccacgcacggagatgttgtgaccaggctgctcgatcgcaaactacacgtgcaagccgcacgaggccgaccagcgtgtacgtactgatctccatcaaatcagactagcacacatgtatatgtgtgcgatccgatctgcatacacgcatatggagatcttccacgagcccgtcatcctgccagtgctggtatacgctatgcagatgcatatgcggaccgctaactttacccgggttaaacaagataagtttttgttttcatctatattctaatactttgcagtagcaagagtaagagtaatatgctagatcatgcctctagtcgttttattttctcgcgtgaatagatgtatttgttcggcctttgcgccgactcttctcttgttatatcgccgaccacgaagttcggcaccacgcgcccgaatgcgcgtaccgtgcacacaagaaagtgcacatacataatccgttaaattgaacgccggagtgttgtcccgaacgacgacacctcacactcggtaacacacgacaccacctagaagttgtcgtctatctggctaacatagtcgctgatctataaatatattaacacactcgtcatcgctgatcttatggatcagcgcgcttgggacactgttggttgtgacttgtatgttaataatccgtcatattgctatctgtatgaagtagatggtaataaatccgagtcatcggcagctgcatgcgccgccgcctgcacgtagcgacatcctgacgccaccgcatgacgtcttcccatttgtcaatggttgccgaatcaatccagagactttccctcgttgatccgccatctgaaacgccgactcgacggtctttcgaggccatccgcaacacaattgacggccgccgctcatagcgatgccgaggagcttacgcccgcttcccctcgccgccggtatgcacggcatgcctcccgctctaccgcacgcggccggaacgagggtcgaagccgccgtgagctcccgccgtcgatagccgtccgccatgccggcctgtatgccgagccgagtttcgtcgacacataacatggagctatgattgtcggacgccggtcacggcctgatgccaacgaatgccgatgtcggtgctactagatgttgcacagccgctctgcctctgactatggcaacttgccagttgccatagtcgtccatctctaccgtgggctcactagcacgtttgctattggttccatccgtcatctccattgaagaatggcaattggatcatacctcacccacttcttgtgggagaaggtcgtaatagcccattgggcaacatatgagatgggctggccaggttttcaagctagccagtataaggaggtgggccaagcagaaattggcctattaaaaggagtcgggcacgaaccgtgattttggtccgaaaatggcattttatttcaaaagtccttggtttccaaggcattatgcggaactcggaaattatgtggaaaagtcctatgggacattagaaactacggggaatatacattcgccatttatattttgaaccttcatgaattgggtttacgccaaatagagaagaattaaggatttataccttagtcccgtatttctaagtttttgctttaactatttagttagtttcttgaataaccataatcaatcctagaaacattgtttttaggcacaagagcttccatggacttgtgaaacctttgttttagcaccccttttggaagcatcatattttatggtttatttcctggcaattgtttgtttggggtaattgattgttctgtgggttagtagttctgtaaattacacatacctttaaatagcagaaaatcatgttaattgctaggattgtaataaaaggtgtgtatagaaaaccattctttactattttgtactcgttttgtgcactttatttactagaagtaaaccggtagaaagttgcataaaaggacatcatgtaagtagttgcatgtagcaaatacatttattgggcaaatgagtaatagaattattcatatatcttctctttgtctaattgtcgccacatttgtagaaggcacaattatatattctccgtatagaataaatgtatacactcatcatgaagagactatattattgacttagagatatttgttagtgcatgactatcatagaagataagctacaactaatttatattaattgtgtccaagtagatacaatgtcatcaaatttgcgaatatatagacaagaagtctatatgccaatatgccctgcaccaaaattatctatcaaaaaaactatgtacctatgcagtgtttatagttaatttgattgataatgttatgtccatcttccacgtataaatgaatttacaaatgaagtattgtttttatggatgtatgcaaattattttgagtaaattggtcatttgcatttgaagcaattttggcctagatgcaacatgtttagttgttagaattgatacacaagaagctgtatttctgtcaacatgtgcatttgcacgcacatatatgatttatactattagtatgttcatgaagaacatgcatactcaaaatttgtggaaggaaagtaatttggtgtatttgaatttgatgttcaactcagggagagatgaaaagtaatgacagtaatcttgcattcgttcttttgagatagtattttacaatacacgagttacattatagtttaggttaagttcaatatgaagaacatggttaagcccatgtagagcatatttatcttttgctttaggcatagaagcttttgcattagattactgaatattttttttatacaggtcaactcaccttacctatattgttttttttttttacctgtagtaattctttaaccttttgtggaataaaattgtgaattgtatgtct

SEQ ID NO: 22166 - DNA, 2252 bp, Oryza sativa
  ref <308>: DATABASE ACCESSION NUMBER: AK099273
  ref <309>: DATABASE ENTRY DATE: 2002-08-28
caccacctcactcgtgttagctcggatctgtagcaaagagcgaagagcgaagctgcagcctgcagctacgcttgttcgcttgagacctagggtacgagcaacaataatagagagtgactgagtgagcgagcactgagtagcaagggcccggcacaaacaggacgcagccggcaacgtgtacgtcgaaccaaacagagaacagctagctaatcgatcggtcgccatgaccaaggacgacgccgtcccggtggccgtggcgccggcgaagcgcccgcccatcaacaagtacgccttcggctgcgctctcctcgcctccatgaactccgtcctcctcggctatgatatctcggtgatgagcggcgcgcagatattcatgaaggaggatttgaagatcaccgacacgcagatcgagatcctcgccggcgtcatcaacatctactcgctgttcggctcgctggcggcgggcatgacgtccgactggctgggccggcggtacaccatggtgctcgccgccgccatcttcttcacgggcgcgctcctcatgggcctcgccccgaactacgcgttcctcatggccggccgcttcgtggccggcatcggcgtcggctacgcgctcatgatcgcgcccgtgtacaccgccgaggtggcgccgacgtcggcgcgcggcttcctcacctcgttcccggaggtgttcaacaacagcggcatcctcctcggctacgtctccaacttcgccttcgcgcgcctccccgtccacctgagctggcgcgccatgttcctcgtcggcgccgtgccgcccatcttcctcggcatcgccgtcctcgccatgccggagtcgccccggtggctcgtcatgcggggccgcatcgaggacgcgcgccgcgtgctcctcaagacctccgactcgcccgacgaggccgaggaccggctcctcgacatcaagaaagccgtcggcatccccgaggacgcgtccgatggcgaggacgtggtcgccatcgtccgcgcgaacaaggcctcacagggagagggggtgtggaaggagctgctgctcaacccgacgaggcccgtccgccgcatgctcgtcgccgggctcggcctgatgttcatccagcaagccaccggcgtcgactgcgtcgtgatgtacagcccgcgggtgttcgagcgcgccggcattaagtcgaagacgaactcgctgggggcgtccatggcggtgggcgtttgcaagaccttcttcatcccgatcgcgacgctcctcctcgaccgcgtcggacggaggccgctcctcctcgccagcggcggcggcatggccatcttcctcttcaccctggccacgtccctgctcatgatggaccggcggccggagggcgaggcgaaggcgctaggcgccataagcatcgccgcgatgctgtcgttcgtggcgtcgttcgcctcggggctgggccccgtcgcgtgggtgtacacgtcggagatctacccggtgcggctgcgtgcgcaggcggcggccatcgggacggggctgaaccggctgatgagcggtgccaccaccatgtccttcctctcgctctccaacgccatcaccatcgggggagcttctacctgtacgcgtccatcgccgccgcagggtgggtgttcatgtacttcttcctgccggagaccaagggcaagagcctggaggacaccgtgaagctcttcggcaaggacacagacgacgacgatgacgtcgacactagccgccatgagcgcaagaggtccactgagctgagcgctcagcactgaacagaacacgtccgtcccgagtccgagtgtggtcgaagcctattcgttctccgatagaaaaaagcttcgacatcgtgtgttgctttgtgaatcttcagattctggccacttaggttagattgctagacttttggatctcgtgcacatcagcttgttggccttagccaacatgtagggacattgagctgctttacgggggaaaagatcgtgtgatattccacactgcagggacgagtccacgtaaaaaggtcgcagtcaccgttgcggttacgcagcttggcacggatctgtgggtctttttcaccctgtacaacaattcaaccggccaatccttcgacgacagcattgagatccagggagccagggtctacctggctatgttttcttgttcagatattaccgtggcagtgtaattgtatacgagtctataatgtatatagctttttatgtatatgactcgatcacttttgtgtccc

SEQ ID NO: 22167 - DNA, 4127 bp, Oryza sativa
  ref <308>: DATABASE ACCESSION NUMBER: AK072364
  ref <309>: DATABASE ENTRY DATE: 2001-12-06
gtgtgtcaggactcttctcttcctcctcttaacgctgggcgacggcgacctcggcttccgcgccgccgccgccgccgacgaggatggcatcctccgtgactttgccattctcgacgtcgccgccgacgagaatggcatcctccttgtcgtgttcgtcgcttctgcatcggcggctctcgcttctccgagctccctttcgatcgcctcggcccgcattgcgatctctttctcgctggctcgccgcgcttccgcccacgcctccgccgccgccgccttcatctccgccaccgcgcggaccacctcggcgcgccccgtcaggtactcgtactcgaacctggggatcgtgacgttcccggacgacgagctccgcggcgtcgcggccgcggcggtggccagcgtcgcgctctcgacgatcgccttcagcctcgccgtcgccgcggcctccgacgccctcgccgccccgagctcccttaccgactccctgatcctcttctccgcggcggcgatttcggcgtcgatgttctccgcgtcggacatggcgcgccggttctccgtatccgccagcgtcttctccttctccgccgccgcggcgtcgtcctccagctgccgaaggatcgccgccagcttggagatggtctcgtcggccctctcgtcggccgccgtgacggcctcgaggcgagacctcgccttgagcagcttggcgttcagctgctgcacatgcgcgctcgccgccttctcctgctccgtgaggcggcggatctcgtcggtgacacgcgccgtctccctgcgcgtgcgctcgatggacgccgtgaaccggaggccctccgccttgatggactccagctcgatcctcgccgagctcagctccgcctccgccgcctgcagcgatggctcttcgtgttccacctcgtgtcccctcgacgccattgcagtggcatccgttgctcgtaccaccgccagctcgctgtgccaggatcccgcgtcggagctcgccgtggccgccgtgcccacggcgagctcgactaggacgccgtgctcctcgcttgccccgtccgcatcgcgctccacgccaccgccgccgcgcgggccggagctcaccgcgctggacgtagacgcctccgcctccgcgtccctcctcccggccgtgcccttcgccgccatcgcggccatcacctcgcgctgcagcttgcggagctctcccttgacgcggtcgagctcctgcatcacctcgccgtacgccgtgccgacgccctcttggcgatgagccggagcgccgccggctgcctcggcggcgaggcctctcgccgtcttcctcctgctgccgccgccgctcgcacgcgttcgctgcctctggagctctgacctgcgagacctcgccttggcattggtctgctcgatctggcgctccagctccatggccatgttcatcgccctcgatagctcggattctactcgtgcttgctcctgatcctctgcaatggccttacgtcgatgcaatttacgcctgcttgatccaatcgattcttcgatttcaggagacaaattctgcattttgaacagataactttgaactacaaaataggagtagaacagaaggtttcaccaatctgggaaggggacggaaattgcgaaatttggggaattttgaacagtaattttgaaatttgaaccttttcttttactgattttgagcatatttgtgctaaatacgaacaaatttgaaattttggctagaatctcatcctaccgggaatgtccgggaccaaccggtagaacctacaattttggctagaatgggcaggatatttcctccccattccttagaaattcctatggaatggatcattttagaggaaaataagcatgaggtctcaccttgtgttttcgtcttcatgagtttttcctgtgtgctaattaaacaacagttttgaaactttcgtgtatttcaaaatcccgtagaaatccaatgagtatgatagtctatttctacatttttcctattactgtgtttttctcaatcttgcatttcaaaggggcccttagatatgcatacaggcagttcaaggcttcaagtacatgataatatgatgtaattttcggtttgagaaagacaggaaaaaagatgtgtttgagaaggtaccttgtgggaaactactcttcttctgctcttgcttggtcttctgacatcaatgctctgaccaaagatgtccatggcgtttccccctgatccacttcctactgaattctcctccattgcactctccttcatcatgtaaaatctcttgtaacctggaggtgatatatgctctattggagttggagagaagctgtaactttggtctagtatgtaagtaacggtgacaagtgtggcatggcaattccaagccttcctgcttggaaaaattcagagaagcttcactacaatacaaccaggatgatctcaccatatcttcttcctgtcacaacttccttccagaaagcagtgcacttgggccggcttctgtgattgtctccagctcacggtttcttgttaagtcagctggcagtgtatggtttcatgaatggtctgtgtctttctggcagtttaagtatcttatttgcattgtcattccttgactaatcaggctgacctatgcccatacccaataatgacagctgcagtttcacattgttttacattgttttaactcatatcagaattgaaatgattttttttgtgagtaaccttgaaaggttattaggaaacttacgcgtatttttttaatgtggatgctctaatttttctatgagaatttcagaagatgtgcttattcttcaaaaggttaatcccaagcgatttggccttagcttcgtgagtccaagaggatgcagttcgaccctcgaacacatatgcccccttggtatcttattcagcacattggaatcaatcttcttgtagaatttcttgaggtcttgaccacctttggcaaccaaatggtctacttcagtctcatatctttcatacagcgcaggcaaagtgagagcacacaaaaaccctggtcaagaagacacagtaaattgttaatgcatatgaaaaattttattttacaaggatgcctgtttgatttatcattgcatttactaagcagatatgaaaatgttgttattttacattcatgagtgcttgataagtcattgcatttaccatgttctgtcctaattattcttgcccttggtcaaaaaaaaatgttatgtcctaattttgtttttgacttgttgaaattcagtgtcccagcgatacttaccaacatatagtagagttgtgaaactgcatgtctctccaataactgccaatatccacagagatcctatcacctatttatgtaacaacaatggagttagttaatcaccaaattaattgcaactggaaattaacttttaaatcccaattcatggggatatttttgttgactacatattaatagtttttagattgtgaattcattgcaaatatatatgaaacatcgttgcaactgttataggtcttgctgtcactaaatcagaaaaaaaaaagaaacagcaaattttgattgtaccgcaaggaacttcctgagttctttcccgcatgaaatgtcatacaggactgctgaaaagtgcgccactttggaatgcaatgtcagtgcaagttctctgaaggcatgttcagaaacaatcacttctgggatccgtggaggtgccctgtaaatcaagtatggtagtgcaaacctgtcaaagagagatgcagcattggaccaaatgaagagcacaagcatcccaaggagtgcaatgtggcaaaggagtgttactaagttgtattcagccacatcaaataggaaccatatcaatgtggcgcctgcaaggatcccggccgataaattcctgtccctccatagcatgatgtccgcaactgcaaaaaccaacacaatgccagtgatcatgatcagactgattctgaaatttgtgaaatgttgctgaaatagaatgttcaacatagacaaacaaccacacctttccggccacccaggatcttatgaactggtttctgcctatgaaaaagccttatcaccggtcgatcatcatcagaatcactcgaaacatgaggaacattc

SEQ ID NO: 22168 - DNA, 2351 bp, Oryza sativa
  ref <308>: DATABASE ACCESSION NUMBER: AK072365
  ref <309>: DATABASE ENTRY DATE: 2001-12-06
gctcctcctttcttcttcttcctggcttcctgctcagtcgacttggtgggaattccattcccctgcagttgcaatgcttgggtgaatccagctccgtcgtcgccatccccacccccacccgcaccggagaatgagcagctcatccaatgcacttgtgcagcactactactcttgcaagcccccaccgccccccagattagtactagtaccattcttcttctccggctccggctccggcaccaacaacactgcctcctcccctgctgctgcatcctccacgcacactcacactcacactgcagatgccaacgcccagctggacgcacacctcctttccctcctccgcgacggccacaccgacgccgcctaccacctcttcgcctccaacccctccctccccctctcccctgtctccgcctcccgcctcctcgcccagctctcctattcttccttctcccgcgcctccgccctcctccaccgcctccgcgcccgccaagccctccacctcctcgacgccaactccctctccctcgcctcctccgcctccgcccgctccaacaacccccacctcgcctattccctcctcctctccatgctccgacgcggcctcctccccgaccgccgcgcctacaccgccgccctcgcgcgcctccccccttcccgcgccctccgcctcttcgacgccctcctccaccacctccgccaccaccacaataaaactaattccctccccgacaccgccgccttcaacgccgcgctcagcgcctgcgccaacgccggagactgcatccgcttccgccacctcttcgaccagatgcccgcctggaacgcgccgcctgacgcgctcacctacaacgtcctcatcaagatgtgcgcgcgcgccggccgcaaggacctcgtcgcgcgcgtgctccaccggatcctctcctctggtctcaccccctgcgccaccacgttccactccctcgtcgccgcctacgtcggcttcggcgacatccccacggccgagaggatcgtgcaggccatgcgcgaaagacgcaccgacatctgcttgctgttccgggctgtcgcggacgaccacataatcagccacgaccagcagagctgtgtgctggaggacatcgtcaagccgtgggaacaagaggaggtgccgctgctccccaaggcttacccgcccaactccagagtgtacaccacgctcatgaaggggtacatgaacgccgggcgcgtggaggacgtggtggccatgctgcgcgcgatgcggcgagagggagagacgtcgccagcgagccgccccgaccacgtcacctacaccacggtcatctccacgctggtggcggccggggacatggagcgagcgcgcgccgtgctggaggagatggggcaagcaggggtggcagccagccgcgtgacatacaacgtcctcatcaagggctactgccagcagctgcaggccggaaaggccaaggagctcctcgccgtagacatggctgaggcgggcatccagcccgacgtggtgacgtacaacacgctcatcgacgggtgcgtgctgacggacgacagcgcgggcgcggtggcgctgttcaacgagatgcgcgagcggggcatcgcgccgtcggcggtgagctacacgacgctgatgaaggcgttcgcggcgtcggggcagccggagctggcgcacaaggtgttcgatgagatggagaaggacccgcgggtggcagtggaccgggcggcgtggaacatgctggtggaggcgtactgcaggctggggctgctggagtcggcgaagaaggtggtggagaggatgaaggcgcggggagtgcagccggacgtggcgacgtacgggagcctggcgaaggggatcgcggtggcgaggcggccgggggaggcgctgctgctgtgggaggagataaaggagaaggaggtggacggggaggtggtggaggcgctggcggacgtgtgcgtgcgggcggcgctgttcaggaaggcgctggagatggtggcgaggatggaggagatgggggtggagcccaacaaggccaagtacaagaggatgtacgtggacctgcactcgcggatgttcaccagcaagcacgcgtcgcaggcgaggcaggatcggaggcgggagaggaagcgcgccgcggaggcattcaagttctggctcggcctccccaactcctactacgccaccgactggcgcctccaagacgacggcctcaactaacaccctactatatactactaatgataatgttaaatcttaacacatgttttatgtactactcctacagtccatgaagctacttgcttcccttgctcattatgtacaacttcatagtaatttattttcc

SEQ ID NO: 22169 - DNA, 3224 bp, Oryza sativa
  ref <308>: DATABASE ACCESSION NUMBER: AK072366
  ref <309>: DATABASE ENTRY DATE: 2001-12-06
gatgtctacgtgcgtgagccccccacacaccctcgctcgccgcgccgccgtctctagttttttttttctaaaaaaaaaaaagcctcggccgccgcgatggacataacggaggtgacggtggtgcaccacgcggcgctggtgctgctcgcgctctgggccgccgtgtcggccgggtgggcgcacccggcgatcttcctcgccgcgctcctctatctgttcgcggtgagtcctctctccctctccttctccctctcccacggttcgattcgattccgcatgttctgagattaacgggagctggaaatggaatcccgtgttgggatttgttgtggccggggtgagggcccgattttgggatgggtttgtggatggatggatggaggaggtgagtactacttccctccttgcgttgttctcctccgctgagctgcattggtgcgttcccgatcagagctagaatttcttgtctagttcttttttccactccctgtttggtaattggtgcgccatcaactgattttacttctcctcctccgtcgctgttgcacgataacttttacatttcatggaaaattgtagagtatttttgatggttttgattaaagcaagtagctggcaagccatcatctgtggatcatttttatccttaaattcccatcaattcatttatgatatgatgcatcgcatcaggacgcatcgcatcaagtatgacgtaggctgatgtttcagcttgataaaaaaaactggtcaacaatggagtctgtacctcaccttgattcagccaaagtggccaggtaggagtagatgccaaggaattttttcccccttcctgtgtgataattggtgatctgtggtctgctagcctacgtcagcaacagctttgcttgcaaatggtgaactcattgggatggtgggattggtgtggttaataaagtttttgtctatgatcacacagcttattctggattgcctgatgctgagtcgctgacactgaattcagggttcacagatcagtacatcttagtggaacagttgcacagcatggagtagttacgatggttgtttgtcgtgctttttacctttttctttattgggataacaaggccccctttttgaatgtgtggctttcctcagtcaaattttaacagcaaatatgaattgttttggtgcttaggagtagccgtgttcttctttttgaatacgccactgtggtgttcaaggaaaaaaaacgccatgctgctttctttaaagttaagattgtaaaccttttttttcaagaactcatggatgtagtatccatatatttaagtcaagacaaattctatctcacgttgatcatagatgacaagaaacaaaagaagaatataatcacttagtcttgttgtacggttcatcttgcacaacatgcacccgttctgttttttgttgctcttgacatcaggaatgaatttgaaattaaactttgtaagtctactaaacggttgtgctacgtacttgcattttgtctaaattttgaaaacattgcaacatttgaatttcattttgtgtcttcaaatcttcatgcccaggaaaaattatatttcattagcaaaattgaaacgacaaccctttaaacatggtgaacagaagaaatacattgtagtcatatggattgggaagatttctgataaaaaaaatattgaactctgtaatctctgtttttacagaactcactgcccagggttcaatctctagagtttttgtcattcttttttttttggtatcttataacacatgtagaatgatagatttttcatatattgcaaaccaggtgaatgaacgatacacaatgaggctgcgaaagcgaatacaacatgaggaaaggaaatgtgcaaaccaaagaaggcttctctctgatgcagagactgtcaggtggttgaattatgctgttgagaagatctggccggtttgcatggaacgggttgaatctgagcagttccttttgcccatattcccatggttcctggaaaagttcaaaccatggacagcgaggaaagcagtgatccaagacctttacttgggcaggaacccaccaatgtttacagatattagggttgtcaggcaatcaactgatgatgaccatctggttttagagataggaatgaacttcctatctgcagatgatatgaatgcaacaatggctgtgcaacttaggaagagattaggatttggcatcacagcaaacatgcatataactgggatgcatgttgaagggaagaatttatgcttacataggtcctagttggggtgcgatttctccgacagtggccatatattggtcgcgtaagagtgtgctttgttgagcctccatacttccagatgacagtcaaaccattatttggtcatgggcttgatgtaactgaacttccaggaatttctggatggcttgacaggatgttggatgtcgcctttggacagacccttgttgagcctaatatgctagttattgacttggaaaagtttgcatcggaatcaacagatagctggtttagtgttgatgagaagccacctattgcacatgccaaggtagagatcttggaaggtgctgatatgaaaccctctgatccaaatggattagctgatccatacgtgaaaggccatcttggaccctatcgtttccagacaaagatccacaagaaaacactcaatccaaaatggatggaggagttcaaaataccagtaacctcatgggcagctctcaatcttctctctcttcaagttcgagataaggatcccatctttgacgacacactcggtgactgttccataagcatcaacaaattgagaggtggacaaaggcacgacatatggattgctctgaagaatataaagacagggcggattcatatagcagtaacagtacttgaagatgaaaatgaaaaggttccaaacgatgacgatgagcagtgtggaacacccaaggggggtaaagcaagcacaccaaggtctagcttttcgtccaggaccaacaatgaaagtgaatcatcagaggagtttcgaaagatatctgctgaatatgagccagtagacattgaaggactggaaaaggttgatgtttgggtccatcggccaggcagtgatgtcgcagtcacttgggagcctcggaaaggacgtgcgaggtgtcaggattccagaatcctacgagagaatgatgtctactgtgacagccctaagtcgtgccaatc

SEQ ID NO: 22170 - DNA, 2090 bp, Oryza sativa
  ref <308>: DATABASE ACCESSION NUMBER: AK072367
  ref <309>: DATABASE ENTRY DATE: 2001-12-06
ggggcgcggagccctccacttgcgctgctgctgctgcgagagatcgatcgagaaggcgcgaaccattctcccccctctcggatcggcgggtcgaattggggcggaggagatgctggacgccttcttcaagggcgccggtggcggcggcggcgggttccgcggcgcaaagtgcaagacgctgctgaagctgtcgatcccgcggatcaagctgctgcggaacaggcgggagctgcagctgcggcagatgcggcgggacatcgccaagctgctcgaggccggccaggaggccaccgcgcgaatcagggtggagcacatcatccgggaggagaacatgatggccgcgcaggagattcttgagctcttctgcgagctcatcgccgtccgcttgcccatcatcgagacgcaaaaggagtgccctatagatctcaaagaagctatatccagcatatgtttcgctgctcccagatgtgcagatctgcctgaacttatgcaagttcagatgatgtttgcaactaaatacgggaaagagtttgttgctgcagctacagagttgatgccagattgtggggtcaatcggcagataattgaactactttctatccgtgctcctcctgttgatgtaaagatgaagctgctgaaagagattgctgaggagcatgagattgattgggatccatcagccacagagacagaatatcttaaaccacatgaggatctattgaatggaccaacctacttcaatggttctacacttcctcttccaaggagaaacatgaggaaacactagctgcaagtgctgccgaacatcctgatgaagactatgagtctgatactggtttagagtcattggatttgcctgaagtcccaaaagcagccattcgcccaccttctgatactccagcaacccctgatattgacacacacgtgcaaagctcccagccaacttctcatgaattctcaaacatgccaagctcccaaccaacttctcatgaattcttaaacatgccaagctcccagccatcttctcatgaattctcaaacattaaaagctcccagacaacttctcatgaattctcaaatgttcaaacctcccagttggcttcgcatgaattctcaaacccaagtgacttggaagagaatccaacagctaatgctgctttcatgactcagccaaaaggttcagaacatattcctacaccattcgctcaaccaagtatgccagtttcacccaatgaaaagaaacattttgttccatttgcctctccaccgccatttgctgttccctctctagtggagaaaaatgagtccattccgtcaccttctccatctcctccggtgaagccaacagatccaggaatgttcaggacgattgatgaagtgaccccacctccaacagctactgattacttgttctcaaaacaaccagaacagttacactcaacctctgctgagaacattgcaaacattgacttggatgatgtactttctgctgcccagacagctgccgaaacagcagagcgagctgcatcagcagcccgtgctgctgcaaaccttgcacaactgcgcatcgcagatctgaagaagaatagtaaggcttatgagaactacagtgacagtgtccgaaaggaaagccatcctcaatccgaagtgacacagaaaccagtatttgatcaccaagattccttttccagtgacacacagggttatgtgccttctcatttgccccagaggtcgccattgatggaggatgatccgtatttctcctatcccaatctgttctcgtcaaaaccttgagggtggaaactcggtgcgacttagttcttcagcatagttcgaagtgcctgcgatgttgcatcttcagccttgtttaatcttgaatttggctgttgccgggatattctgtgtatgctgagttgatacttaaaggggggtactggcggggtactggcgtactgcagttttactaggtcactgcatggcttgttcaatgtctgtaaattgtaaatgtgtgctgcttgtaccaaatttgtgatacattttaccacctccacaagaaatttaaaaaaataaaggtgaacattgttccttgc

SEQ ID NO: 22171 - DNA, 2131 bp, Oryza sativa
  ref <308>: DATABASE ACCESSION NUMBER: AK072368
  ref <309>: DATABASE ENTRY DATE: 2001-12-06
tgggcgtaaaagaaagagaaatctcccgtctcgtcgtctcctccgctccttgcgcgccaagacgagttgcgcgcggctgaacaggggaggggcgccgatctccatccggcgagcagagcaggggaggggaggggatcctgttttgtggatttatcttccaacatcaatagaatggagcaagaagagaatcattcagctgatcacttgtctgctcaacctggtaatggcaacgaattggaagaatcatctgtaaaggaaaggtgttttgagcagagagaagcccttgttggggagcctcgctgtgttatttgtggccgatatggtgaatacatatgtgatcagactgacgatgacatatgtagtgttgaatgcaagacaattcttctttccaaactttctgctgaaacaaggccagtagtaaaagcagcaaagcgtgtaaatcttcctgttggcgacgagagcttctgtattagggacgaaaattttcctaaaataccaagtatgcacgatggtcagattgcttcactgagaagcaaacttgatatttgtgtcaagggtgaggatgttccagatccaatcatgtgtttttcttcctctggtctccctgagaagcttgtgctcaatcttgaggctgcgggatatgtaatgcctactccagtgcaaatgcaagtcatcccttcatcaatatgtaatagaagcttacttgtctctgctgatactggttcagggaaaacagcttcttttcttgttcccataattgcacattgttcacacgtgcgatcagagagatgcacagacaagcaagggccattagctatagtccttgctccaactagagagctatgtctgcaggtggaagaacaagcaaaagtgcttggaaagggtttaccttttaagactgctctagttgttggtggagatcccttggctcagcaaatctacaggattgaaaatggcatcgagttgattgttggcacccctgggaggctaattgatctactcatgaagcacaatgttgatcttaacaaagttgatgtattcgttttggatgaggtggactgcttgctagagaggggattcagagatcaggtcatgcaaatcttccaagcactttcgcatccccaggttatgatgttttcggcaactgtaaattcagaagttgagaagatgtcaaactcactggctaagaatgcgatacatatttcttgtggaaatccaagcagaccaaacaaatcagttaaacaagtggtcatttgggtggagtctaagcagaagaagcagaaaatttttgagataatgacaagtaaacagcactttaaacctcccgctgttgtttttgtgagttctagaattggcgctgatctgttgtccgaagcaattactgttgctactggattgaaggtggtttctattcatggtgataagacaatgaatgagagaagagaaagcttgagaaggtttctcacaggagaagtgtctgttgttgtttgtactggggtattgggacgtggaatggatctcctgaaagttcgtcaggtgatattatttgacatgccaaattccattgatgaatatgttcaccaagttggaagagcatctcgaatgggtgtggagggtatggctattgtctttgttaatgaggaggacaggaatcttttcagagagcttgttcagattctgaagactgcaggtgctccaattcccagggaacttgcaaattcaaaatacacaaccggtataccccttggtggtggtaagaagagaaagctgaagtctaggtgacattcttgaccagggtaaatatcagagtggcggtcaatctttcttaaggatggaaaaattgtatgcctacctggaatgttagctatgtttttatcttcatgggaatgcaaatgcatcttatcatctctggtggataagttggatatgtctagaattcaatcttgtcaaatttccaggcttttcctgagccaacacgatttctcagggcaagtacatgaagtcatgaaatcagcgtacgtggcaaatgtaaaagaatctatggcacatgtaaatgtcagcaaattgtaagttaaaaaggctctgtccaatggatttgcttgcatatcctttgattgcactgttcattctt

SEQ ID NO: 22172 - DNA, 2346 bp, Oryza sativa
  ref <308>: DATABASE ACCESSION NUMBER: AK072369
  ref <309>: DATABASE ENTRY DATE: 2001-12-06
gggccttcttcctcctccgtcctctctgccaatggtgatgtcaggcagagagtgtgagagagaaagaagaagcagtcaataaggaggaggagaaagaggagtgggggaagaagagaagagctagggatagattccggccatgtcgtcggcgttcggcgacttcggcccgctcaccgagcggcgccgcgccgagaaggcgcggcagcagcgcaggcgcatcatgatcgccctcggcacggtgtccatcatcattatcctcatcgtcatgggcgccgccgccatcacgtacagcgggaagaaatccgaggaggacgaaggcggctccaagggctcgtcgaaggggaaatcgaaaggcggcggaggtggagacgacgaagacggcggcggcggcggcggcaaagcggacctgcgcgccgtgtcgaagagcatcaagatgatgtgcgcgcagacggacttcgcggactcgtgcgccacgagcatcggcaaggcggcgaacgccagcgtgtcgtcgcccaaggacatcatccgcaccgccgtggacgtgatcggcggcgcggtcgaccaggcgttcgaccgcgccgacctgatcatgagcaacgacccgcgcgtgaaggccgccgtcgccgactgcaaggagctcttcgacgacgccaaggacgacctcaactgcacgctcaagggcatcgacggcaaggacggcctcaaacagggcttccagctccgcgtctggctgagcgcggtgatcgccaacatggagacctgcatcgacggcttccccgacggcgagttcagggacaaggtcaaggagtcgttcaacaacggcagggagttcaccagcaacgccctggcgctcatcgagaaggcctcctcgttcctctccgccctcaagggctcccaacgccggctgctcgccggggaagaagacaacggaggaggagcagcggacccccacctggccctcgccgaggacggcatcccggagtgggtgcccgacggcgaccggagggtgctcaagggcggcgggttcaagaacaacctcacgccgaacgtcatcgtcgccaaggacggcagcggcaagttcaagaccatcaacgaagctctcgccgccatgcccaagacctacagtggaaggtacgtgatctacgtgaaggagggcgtgtacgccgagtacgtgaccatcaccaagaagatggcgagtgtcaccatgtacggcgacggctccaggaagtccatcgtcaccggcagcaagaacttcgccgacggcctcaccaccttcaagacagcaaccttcgcggcgcaaggggacgggttcatggcgatcgggatggggttccagaacacggcgggggcggcgaagcaccaggcggtggcgctgctggtgcagtcggacaagtcggtgttcctcaactgctggatggacgggttccaggacacgctgtacgcgcactccaaggcgcagttctaccgcaactgcgtcatcacgggcaccatcgacttcgtcttcggcgacgccgccgccgtgttccagaactgcgtcctcacgctccgccgccccatggacaaccagcagaacatcgccacggcgcagggccgcgccgacggccgcgaggccacggggttcgtgctccagaagtgcgagttcaacgccgagccggcgctcaccgacgccaagcttccccccatccgcaactacctcggccggccgtggcgcgagttctcccgcaccgtcatcatggagtccgacatcccggcgatcatcgacaaggccgggtacatgccgtggaacggcgagttcgcgctcaagacgctctactacgccgagtacgccaacaaggggcccggcgccgacacggcggggcgcgtcgcgtggccggggtacaagaaggtgatcagcaaggcggacgcgaccaagttcaccgtcgacaacttcctgcacgcaaagccatggatcgatcccaccggcacgccggtcaagtacgacttcttcacttgaatccgaacgaccctagctacccgtagcggatcggaggaagtcgagaggacaggtaggggggtttcgttggatatatcttggatggcgaaagagtttcggctgtcactatacacgagtggaaatgttgcgaggtgtacgcatgaactcgcttgttgatcagatattgatcagagttgaacgcgtgctgtgtgccttagttttcatttgcgtttgtatactggctgtacgtatgtgtttatgtaactgtacatgatttttttttctcgatcatgattatatttgagtatagcagatcatttttttttccatggagagtatagcagatcatgaatacagaggttcagatttacagc

SEQ ID NO: 22173 - DNA, 4631 bp, Oryza sativa
  ref <308>: DATABASE ACCESSION NUMBER: AK072370
  ref <309>: DATABASE ENTRY DATE: 2001-12-06
ggagttaagcgctgcacaaaatttgctctgtttcctctgttctgcgaatttgcaggtttagccacagtacgcgtgcattgtgttcgtctggtttcctgctagcgatcgctggggaaattcctaacaattggtatcagagcacggtttaggaagtggactcgtgaccgcgcattggaaggcgtcttcatgccgcgtcgtcgctcgtcgtcaccgatcgtgcgcactcctcatgactccggcggccgcgccacgggcagcggcgggggtgaccgcgggctggtgatccaccgcgtggtgaaagaaggaggcggctcggtgaactacccgctgctgaccaagaccaactacaacgactgggcgctactgatgaagatcaagctgcaggctcgctgcctgtgggcggcgatcgagcccgacggcgtggacgtccctctgcatgaggaccggatggctcttgacgctatctgcagtgccgtgccgccggagatgattggcaccctggcgaccaaagcgtggcccgggaagcctgggaatgcatcaagacaatgcgagtcggcaacgaccggattcgcaaggcgagtgcacagaaagtgcgctctgagtatgaatcgcttgcgttccgcggtgacgagaccgtggaagatttcgctctacggctcacaaccatcgtcaaccaacttgcaaccctcggtgatcctgaacctgctgataaagtcgtcgaaaagtaccttcgggtagctcgtcccaggttcaatcaactcatcttgtctattgaaactcttctcgatatctctactctgtccatggaggaagttactggcagactaaaagccgctgaggattctgggcaatcctcgtcgcacaccgccgatgggaagctgtacctaactgaggaggagtgggctgaacgtcagaagaaggaggatcaagaggcaaagcggggtgactcgggcggctctggcggccgcggcaagcgccgtggcgggagagggcgcactggtggcggcgggagctgcgagccccgagagcacgaactctggttcggcgcgcaagggagacaaattccgaaattgcggcaaacttgggcactgggcgaaggactgcaggagcaagtccaagcgcgaagaacaggctcacgtcgcccaggaggatgaagaagagcacaccttgatgttgctcaccggcggctgcgttgacacggtcgacgcggcggcaccggagggcgacacgcccacaccgccccaccaagccgtggtggaactcgtggagatgaaagtatttgcagcgctcgacgacgcggctgaccatgatcccgggcgctggattatggattccggcgcgtcaaaccatatgacgggcagcaggatggcgttcgccgacctcgacacgaacatcaccgggaacgtgcgactcggcgatggatccgtggtccggatcgcaggacggggcacaattctctttgcctgcaagaatgaggatggcatcatgcgggtctgggatgagcagcggcgtctgcttgcccggatccctcgcaccccagggcgactgtacatgcttgacatcaacctggcgcgcccggtctgtttggcggcacacgccgacgaagacgcgtggcgctggcatgctcgcctcgggcacataaacttcagggcgctctgcaagatgggaaaggaggagctggtacgtggtctaccatgtttgtcacaggttgatcaggtctgtgaggcctgtctcgccaggaaacaccggaggtcgccgttcccgcggcaggcactttgccggtctgacgagccgctggcgctgctacatggagatctctgtggaccgatcacgccggcgacacccagtggcaaccgctatttccttctactcgtcgacgactacagccggtacatgtgggtcgccctcctctccaccaaggatgcggcgccggctgccatcaagcgtattcaggcggtggcagaaaggaagagtggacgcaagctccgcgcgttgcggacggatcgcgggggagaattcacgtctacacagttcgccgagtactgcgccgagctgggaatgcggcgcgagctcacggcgccctactctccgcaacagaacggcgttgtcgagcggcgaaaccaatccgtggtgggcacggcgcggagtatgctcaaggtgaaggggctgccaggtatgttttggggagaggcgataaataccgccgtgtatctgctcaacaggtcgtcgtccaagggtatcggcggcaagaccccgtacgcgctgtggaacggcgttccgccggccgtgcaccatctgcgcacgtttgggtgtgtggcacacgtgaagacgaccaccccgaacctgaagaaactggatgacaggagtcgtccaatgatctttgtcggctacgagccggggtccaaggcgtatcgcgcctatgatccggctactcggcgtgttcacatctcccgtgacatcgtcttcgacgaagcagcccagtgggactgggatgctgaggcggccgctgatctcgacaccgacttcgtcgttgagtacaccacggtgtaccatcctggctcgctgtcaggaacacgccaagacgctggggagccgcctgctcgatcttcatcatcgccgcaaacgccatcagactcaccgacagccggccgaacaccttcggtgcatggcgatgcgccggcggttgaatttgtgtcgccaccaactggagcagctgctaatcttgatgcagaccacgacgacgcaccactccgtttccgcacgatggacaatgtgctggggccggccatgctgccaggtctcgctaatcgtgaggtccaggaagagctgatgatggtgagcggagaagaaccggcaacgttcgctcaagctgaacgcgacgaggattggcgtcgggcaatgctcgatgaaatctcttcgatagaggagaacaagacctggaggctcgtcgatctgccttcgggacatcggccaattgggctgaaatgggtgtataaactgaagaaagatgctcagggcgtcgtcgtcaaacacaaggcgagattggtggcaaagggctacgtgcagagggctggaattgactttgatgaggtattcgctcctgttgctcgtcttgattctgttcgtttgttgctcgctctcgctgcgcaggaaggttggatggtgcatcatatggacgttaaatcagcgttcctcaatggggaactgattgaggaggtgtatgttgttcagccaccggggtttgagatcgatggacaggagaacaaggtttacaggcttgataaggcgctgtatggtcttcgccaagcacccagagcttggaacaccaagctagactgcacactgaagaaacttggcttcaagcagagcccgttggagcatgggctgtacgcgcgcggcgatggcagtgggcgactgctcgtcggtgtgtatgtggatgatctggtaattgtcgggggtgacagtggcatgatcaagggattcaaagagcagatgaaggctgaatttaagatgagtgatcttggtcctttgagtttttatcttgggatcgaggtacatcaagaagctggaatcatcactttaaagcaagcagcgtatgcgtcgcgtattgtggagaaggctgggctcaccggctgcaacccctgtgcaacaccgatggaaccacgtctaaagctgagcaaggaaagtgcaggatcgctagttgatgcgacagaatacagaagtctagtgggaagcttgcgctatctggtgaacacccgaccagaccttgcatattcggttggttatgtcagtcgtttcatggagaaacccacggacgaacacttggcggcagtgaagcgcatcataaggtatgttgctggtaccattcatcttgggtgccgctatgtgaaggaagttgaaggaggactgcagggttacagtgacagtgatatggctggagacattgacactcgcaagagcaccacaggagtaattttctttctcggcaaaaatcctgttagctggcagtctcaaaaacagagagttgtagcactctcctcctgtgaatctgagtatattgcagctgcaacagctgcatgccagggcatttggcttgcccggctcctcggtgacctcaggaatgcagcaactgaagtcgtcgatctcagggtggacaaccaatccgctctggccctgatgaagaaccctgtttttcacgatcgaagtaagcacattcaaacaaaatttcatttcattcgtgaagccgtggagaatggggaaatcacaccgagttacatcggcacagaagggcaacttgcagatatcctgacgaagccgctttctcgaaatcaagtttcaggagcttgcgggaaaaaaaagaggaactatatacatacatgtgtattctcgtgagaaggcgaaacttgcaactatgcaataattgtggtactctctctctctctctcctctcttctaagtacaaagttcagttaagctataggtttccatggtaactagcatggaggcccgcgcagattgcgcggctagcatcattatattttctctcatataatagcatatatgttttctcattatattattaaaatatattacaatgacaacataattttaaattttgcaataactttacg

SEQ ID NO: 22174 - DNA, 4054 bp, Oryza sativa
  ref <308>: DATABASE ACCESSION NUMBER: AK072371
  ref <309>: DATABASE ENTRY DATE: 2001-12-06
gctccctgcacttcgtcctccttcccccttttgcctgtggcgtttctgcttgaaaaatttcagatcgcaccgcgtcccaaaccctagccccgccggactgccggagccgcacgaagatgagctacgcggcttacaagatgatgcactggcccaccggcgtcgaccactgcgccgccggcttcgtcacccactccccctcggacgccgccgccttcttcaccgccgcgacggtgggccccgggcccgaaggcgacatcgactcggcggcggcggcgtcgcgtccaaggcgcttaggcccctcgcccaacctggtcgtggcggccgcgaacgtgctcgaggtgtacgccgtgagggctgagacggcggccgaggatggaggcggtggcacccaaccgtcctcttcgtccggtgccgtgttggacggtatctccggggcgcgcctggagctggtgtgctattacaggctccatgggaacattgagtccatgaccgtgttgtcagatggagcggagaataggcgagccactattgcacttgcatttaaggatgcaaaaataacttgtttggagtttgatgatgctatccatggcctgcgtactagttcaatgcactgctttgagggcccagaatggcagcatctgaagagaggcagggaatcatttgcttggggtcctgttataaaggctgatcctcttggaagatgtggtgctgcacttgcttatggacttcagatgattattctaaaagctgcccaggttatattgagcctgtgttggtcatacttcatgagcaagagcctacatgggctgggcgtatcttatcaaagcaccatacatgcatgatatctgcatttagcatcagcatgactctaaagcaacatccagtgatatggtctgcagctaatctgccccacgatgcataccaacttcttgcagtgcctccccctattagtggtgttcttgtgatctgtgcaaattccatccattaccatagtcagtccacatcgtgttctcttgacctgaacaatttctcatcacaccctgatggcagcccagaaatttctaagtcaaatttccaagttgagcttgatgcagctaaagcaacttggttgtccaatgacattgtaatgttctcgacaaaggctggagagatgctgttacttacagtggtttatgatgggcgagttgtgcagagattagatcttatgaaatcaaaagcatctgtcctcagttcggctgtgacatctattggaaactcattcttcttccttggtagtcgtctgggggatagccttcttgtgcaattttcctactgtgcatcaaaatctgttttgcaagatttaacaaatgagcgctctgctgatattgaaggtgatctgcctttctccaagcgcctaaagaggattccttctgatgttctacaagatgtgaccagtgttgaggaactttcctttcagaatatcattgcaccaaacagtttagaatcagcacaggtctgagtattactttcagggtttcaactgtatgctagctacctgtggttccagaatcatatgttctaattatctgtactcctttaaaaagagcaagtggtggtggtgaatctgccaccacctcatcaccagtgtccccaattttgatatgtgggacctactagcggagaaaaggttgtgccaaacataatccttcaaacttggttagtcaatatttgctaatataagaaagttgagataaaagaagaaaagcgcacaatcttactcatttattggttatgtggattgattatacagtgacgtttatccttcctgtacaatgcacaattccattatctttttcaattaacaaagggtcttcatcttgtatatagttgtttactatttctttttggctaccatttccaatcacgaactatattacttattctcttaaaaaatatcacagttgcttctcattatattctgactatataattcactggctttttctttgcagaagatatcatacattgtgagagatgcattgatcaatgttggtccactgaaagatttttcatatggtttaagagccaatgcagatcccaatgcaatgggaaatgcgaagcaaagcaattacgagttggtgtgctgttctggtcatggtaaaaatggttcactttctgtccttcaacaatctatccgtcctgatttaattactgaggtggaattaccaagttgcagaggtatttggacagtttactataagagttaccgtggacaaatggcagaagataatgaatatcatgcatatctgataataagtctggagaatcggacaatggtaaaaccttttttttttttgttttactgtttgatgtatgctccttcccatgggtatggtgatgcgtactctcattggttgtggtgaactgatatgcttataatgttgtcccaggaaacctgcattggttcctttttaggtatggtatatgacaattaaacaataataagatgatccaagaaatcctaaacaatttaatgaatactagcatattgcccatgcgttgcaactggattttaattaattaaaggaaattatcattaacctgttattaccatctcttaattgctgtatatatttgttattgacatgtggaccctttagtcccacactatcctttttccttcctataaaaagtagagagttggtggaagtggttgacatgtgggtcctctagccccacatgccatttttcctctaaaagaaattgggagttggtggtggggttggtggcagaagaacatcaccactactaccttttataaggagtatagattgctatatgtgggaggacataaaaaggataaatgggaccaaaatatatgctttcagcctcctatttctatctcatgtcctaaatggctaaatgtcattccatacgattgcaagttttctggaagtacatgtgacttaacgtgttccacacagagttattttagaaactttggaaatttctaatgccccaactgttataataattgaggatactgttatgggcagggatcaaaaggattgccaggcagtctgtctactggctgctagagatgagaaataggttggggtgtagggaaggtgatgtcaaatagtagtgaggataatcaggcaaagagtagtgaacggccaaatatattttttcttggtactatttttgcctgtttatctcccctacatagtttgtggagtggttctcatgattttactaaattgatgcttttcagctaatatttcccacaacattcccccataaaataatggttcagatttgtactgtatatgttttcgctttatgtggagttggttttggaacaaaatcatgacacaggaatagttgattaagtgctgagtggttaactatggtccggtttgttgtctcttctaggaaacttatttctcagcttcttgaaacacaattgttgcttcatgtgaacattaccttccaaatggatcggaaaatgggtgtatacctgtatgcaaggtttttttaataattttacaccaaaatggttgcatgcaatgtgaatatcagtattaaaagcaaacctatttattccctgtcccaagcaatatctgtactggtttgacctgcattatgtgtatgttgtttctttcacttctttttatttgtttgtgcgagtgttcctaaaccatgtcatgccatgtggtgtgtttttcaatgttctgaatattttattcagctgacacatggttttgctatttaacttatgattggaatcgatcctcccctttacttttgatggaatgatggctaaccatttgataattgtgttgtgaaaggtacttgagacaggtgatgacttaggagaggttacagaaactgttgattactttgttcaagcaagcaccattgctgctggcaacttgtttgggaggtatacaactgctaatatttctgtaatttatatcaattatgtaaatagtagtttggcattatctgctgtggaacagatagattttgcatatgtcttatagttatgacaactatctcatgtggattgagc

SEQ ID NO: 22175 - DNA, 2110 bp, Oryza sativa
  ref <308>: DATABASE ACCESSION NUMBER: AK072372
  ref <309>: DATABASE ENTRY DATE: 2001-12-06
gattgtggtttcgccaccggttccatggggggttttgtgggtttgcgtggtggtgctcctgctccggctccggctggcgaacgcgaacccatggaattccgtcccttcccttccgtttctccgatcctcgtgtgggcgatgaatgtattgggcgatagctgatcagcgagcgactgagatggagaaggagttggttgggagtcgagcggccatccatcgatccattattatatggcctgggcgcgcgcaagcggattggagtcggagagggagtagcgatgtattccgaagcggtctccaattacgcggctctgattcggagtttcggactcggatctgttcttctagttttctgtttccctctctcctgttcgactcgactcggactcggccgccgcctgcactgcatcagccccgatctaccggttttctcccattatattccatccatttttctggtctctctccatccgccatggtgagttttgtttgttttgttttgtttcattttctggtcgagattaggtcttctctcccttcctataacatgaatttattgatcagttttttgttgcgatttctaacccgttctttcctgttttgtcagacttttctgtcccagtcaagatttacttggatttaccttatgtcttctcgtagttagtacttcctccgtttcactttctagcattgcatatatttatatgtgtgtttagattcattaacatttataattctatatgaaattataaatgtgagtaatattagaaagtcttgtaacctgaaacggaggaagtatcttccaatttattagcaatttgctagtatggttcgtactcaatatgattcctgcaatagtaaaccaaatgacgatcatatactacaagatttgctcataacaagtataaaccaaaaatatactgattgaagcatccactacaagaatctaaaagacatacaaaagtacaaacctcttgaaagttttaaaaaataactcaacaaaatagtccatcatacagttttgaaaaaggtaatctataactgaaatagtcacattctttctactaaatcctagtaaaagattatggtagacatatatacaacagataaagttgccatacaccagaaatcaatactacatcatagccatatacagcagagacatccatgcacagctccttgactatcttgaagagcatgcaccatcttttacaaaagcaaattattccaatgcacgcatcaattcatcatcatgtccacacaaaatactctaaaacgatgaaaaaccgtaaacactgaaatgcagagggcgttcaattgtcaaggggccatgtatgtctccacgcactgcaaacccccattgaacctgtaaacattgccccctaaaactgtcaccatagcaacttgttcaccgtagtgcagcctcagggtgcattttgggttgctagaccacaccgttgcttcttgcagctcccatttctcccagctgatgttcacagtcacattgccgcgagccctcaatcccttcacgtagcctttgggccacttttcgcgcggcagtgctggtagcaagtagagatcagcatcaccatgggtgctctggagcagcatttcagcaattgcagctgtgaatctgtaagtgaagaattggggacataccaataagcacaagttagttacaagtatttgctccaggaacatggatcaatactcgttaaatttacaagcaagtggaacttactaggaagagcaagaaataaatgatagtcattgaccaaaataaagtaactaaaaaggtgagaaatttgtacccaaaatttgcatcaatttggaagggtgggtgtgctgtccaaagattggtatacaatcctccctcaaagtcaaccttgccaccaggaggaaccaaggtgatcaactttaggatcatcctgtatgcattctcactattcagaaggcgtgcccacagtgccatcttccatgtggtcgaccatccagggccatcttcccctgataagcaagcagccatgattaacttacttgccctgggtaaaattattcttctaattttccttaatgtaatcaaccattgttcatgaaaatattttttaag

SEQ ID NO: 22176 - DNA, 3109 bp, Oryza sativa
  ref <308>: DATABASE ACCESSION NUMBER: AK072373
  ref <309>: DATABASE ENTRY DATE: 2001-12-06
ggaagaccgcacctctcctcctcgctcgctcctcctcctccccgcgtcctggcaggagctcctccccgctgccgccgctcctccgcgccatgccgtagccgccgccgggtccttcttctttcccacctccgggtcttgcttcttccccatccccaccgacacggccgacctcttcgctcatgcctcctcctccctgctgccgccgctctgccgcatccttgccggagctctgccggagctccgccggactcttactcggagccgccgccggagcaggcctcggcccctcatcaaacctcaatcgcgatctccctcgctcgatgcaaagcagcggacttcagcgatcaacgcttgattgccaaatggcccgatccagccgctccgctgccaaggccaccaccccgagatcgtgtggatctggctgctccgccgccgaggccctccaaccctgagcccttctgccatgagtctgcagcaggctccattgttgtgttcaccacctgagcccctcaccgccagatcgcagtccactccaccgtgtagtcgctgtcctgtgcccctttgcagcttcactgccgaggccaacatccaggttgccagaccaccaccttcttcaacaccatattgtggcccttgacttctgcctgattgccgtcacagagacgttcatcaaccctaggtggccatggtaccacgatgctgcggtgattgctgatactattcctgttatgtcatgcttgatgctgaatcacgagggattctccaagagttggaagctgtcaaacagcactaggcagtcaagttgtagaaatggtgaaaagtatggagaagctgcagtcaagttgcttgccgctacattacgagtaacatgtgatttttcatctgaagaccaatccagaaatattgggacaatttgactgaataactgctaattataaccaatgttttgctcgaagtgttattggatgttttcattagtggtacaggttgcttacgtaatctatgatcaatgggcgcttgctgataaaagaatgcatataaataacaattggtggaggcagaaaaggaggctggtcaagtcagcctcctgcaattatgtcactggtattatgctttcctatagctgatcttttccctcttcggtcatgttctgttctgttctgcttaccacacctctcctcctccccaaaaaaaagatatggaacatcatcatgtagaaactaaaatttaagttgactcaaattaagtagaaaacatgctagaacgaagtatccctccctcactgctgacaaaaggaatgagtgcttcaaaagaattgagagtacatgtagcggtcctagcagaagaaaggaagcatatggagcaataaattggtctgcctctattactattagaggtaagctgaaaatgattataatctcatttggatacagttagcataaatatgtaagtcataaactcacagtggtgcagtataaatttttttatatgaattttgaatagcaacccgatatgacacccatgcacattacatttacagagagcatatgacatgcttgcaatgatcaaaattccgaagaaatgtgcggttgttgtcgttatgagctgtgaggcccagcaagcagagcagattagtgtgatttattgattctatatgttaaaattgatatactacatcatgtttctatgttttgtagtgcagactttttctagagataatttgtgtatccattcaataatatttttttctacagctaattcaggcaaacaacaatgctgggatgatttttataagtaggacatgaacgctagaaagctaaattgacaccctggtgcctcccgtttatagatgtcaccaacaagtaagagtgttcctcttgtgtttatattggaatattgttattgcttctatctgtaaaacctgaaaaatctgaaaccattcctatgctgaataatagaagatataaaatgaatatgtgtcgccattgcatccttatatttatttcttcaatccacaattaactatctaaaccacttttttattttaattcacacaaattattttcgttgctggttttagtatgaatattttgatatatctccgcgcaaaaaaggattttgatatagctatatgcatgtgcattgccattcgattccttttccaatatgtaacagtagtcattgtaaatatactttcatattgtttctctctgttggggcaagaactctgaaaaatgatatttggggtggttgataagctcaccaggtaaaaaggtagaaaccatgtaaagaaaacttccttcaatttagtttgtatgggcattaataagttacctaaaacaaatactaagaattttgggtcaaaaggtatgcttctccacataattttgatgtaagagtgatatggttcaacccataactctttttgatatgggtgttcagttgctacttttcttctttttgcaggaaatttatttgcaaagcactcaatttactgctctgcaattgcttcacagagcatatgctcctagcaagaaatgtggcatgggtgagtttattgtcttgctttcaccatgtatggaatgtggcatgtgagtttatactctttctttcaccatgttgactttttgcacatttatagaatcttttggtatgatgctttttgtcgattcacatgttttattaattattaacgaccagctgcataggaaaactgaagatgtacatggttgaaaagcctataacattattactatgttcatttatctacaatcgtttggatttaagagtttccaggataatttactaaggtggttatctctggtaattagtttcttgtcttcatctactccttttataccagaaaaaataattattggatgatgataatatactaaggcctactgcagatgttgtgactaatattgcacatcttcagtgcatgcttctctagggtggacactgtttattcccgacagttcttaatcacttagaaatagagttatggaattcagcaacatatgtgatttgatctgaaagaatcatcaaagagttcatcttcgtgtaagcttatattataaaagattttatgccaacattttatctttcc

SEQ ID NO: 22177 - DNA, 4356 bp, Oryza sativa
  ref <308>: DATABASE ACCESSION NUMBER: AK072374
  ref <309>: DATABASE ENTRY DATE: 2001-12-06
gattccattcccctcccgattgatctccgcctcgatcccccccgacgccgccatatggagctcaccgccgccgcgtgatgagctgccccggtcgcgattgctgggctccgctggtgattcgtcggttggatcttggaggttttttatccccattattcaagctggttactcgggtgggtggtttcttgaggctgggaagacaaaaaggggagtgaggttttggattaaggaaaggggaaggggatcttctttagcatcgatcggatcctctctgttgggatttcgaagcttctgcgcttccacggatggatttcttcaagatcaagaagttggggaaggcccggaagagcggcgggggcgggggagaggttgtagaatcagaggaggaaaccaaggctgggaacaatgcagcttccgatgagcagaagggcaagatcttggaggatgatcctgcggcggcagcagccggtgcgggtatggatgcagatgcaggcaatggggccgtggaagggcaggaggaggatgatgacgatgatgatttcatcaccaatgaggtgaagcgtaggctcaaggagctgaggaagaacagcttcatggtgctcatccctgaggaggagtgtgctgaggtggaggaggatggggaagaggaggaggaggaagggagtagttccagggagtggatggagtccgacgtcggcgacgggttcccgctatgcgggttcgattcgctctatgagaagtattgtgagaggatggcggtgttcgataagatgatcacgcagcttctcaaggatccagggtccttcaacatctcaaaaaagtcgcctagatcagcatccaaattggcatcaaccctgcgcaacctctctttcaaaaggagggatgacctccaggaggactgcgaacatcttcagcaacagcagagcgaggatgatccctaccaaacacttgagacagcatatgttgggcatgtttctttaagttgggaggctcttcattgtatgtatgtgcacctgagtctgatactcgcagctcaacctgataatcccaccacctacagctgtgctgctcaagcattccagcagttccaggttctattgcagagatttgttgagaatgagccatttgagcaaggttcacgggttgagatatatgcacggtctcggagttccttgtcgaagttacttcaggtccccacttttcaaggtatgatttttaggtttgcaatctttaaacggacataacccatcatttgacaatcgaatatctttccgtgagcggtacaattcacccttaatcctcctggcagcttattgacttttttattttctagaaaataattatatcattgggttgagtttctgtgtagcatagtaattcatcgattttattacctgatgtttcttttaatcaaataatttctgtgcacattagtttcttttacaaaagccattacatttgtttggttgaaattttgtgtcttattgaacttaacttctgatagattgcccagtgacaaagccagcaagatgtacgtaccgttttggcatatgaagtaaaaagctctagcaattgtaggtaggtacattggcatactctcagaaaaaaaaaaggatacatcagctgtgcacactaatgcctcatctggcaaggcccaaatcttagtttaaattcctggtccatctctagggatgggctgggatttggacattgccaaacaaggcctaagacaccatggtttaccattggtaacatgtccagaatgacctactatgcagttctgtaagtaccagttactacagctaggacctaagcacattgaagatatcgtgctgtaggatggagatttctgacaatttttgcatcttcttcctcctacctgtaggttactcctgtgcaacacaaagtaatgcataccctttttttttgtgattgggttgtcacgtgcttgatatattgatctttattgttgctcgtacatctttcatcaggtcaacttaatctatttgcttatccaactaatgacattgtttagtacatgttttcacaatctgttaatctggtgctgctcttgggtaggtccttggtgataagctatggtactaagatgcatttaaaaatcaaatgtgttgacactaatgttggagagttataagtgtatgactggggtagattcagttgagagctttcatccttagatgtttaactcaagatgagtttaggatctagaacatactatgcatttgtccgtacagtctatatctcagttactagctgttgtgccagatgatagtttcttttttaaatcacacttatgtttaggatctaaaactttcagctactgattaacaacttgcgatttatggcaatgtctcccagaagtacaatcaaattggtaatgacttaatataattatgatggaaatgtttaagggccattagcccattataggagatatatagatcttacatcatgtttatccacatcagcatgtttgtcgtattaaacgacatgcagatactgccctggacgtagattattttaactttttaagtgtgactatctttggctttggcattgaatagcctagacattgcacatgctataagccattttgatctgctgtacattatggcactattaatggccagtattgcaccaccattggatcttttttcctttcaattctgtttcacatttcgtctgcgaccaagaaagatattaacagcagtcagatttataacatcattgagtaattatgtgaatatggcaacacctgaacactatatgtatccaagaattaagagccacatgtttcgtactgttgatttctgcaacatgtgctcaacctgtgactgaaatggtgtacacaagctttaagagcattctttgcaaatttaagatgtgtcagaatgccatgcccataaacttcctcatttattccataggattttgaaagatttctatcagtctagactcacagcaggacttggtacaggtataaattgtattacctagatgcaagctaatcggttggttgaaccaaatcttgtttaatgtgatgcttagtacaaaaaaatccctgaactccccaaaagatttccttgcatcagattttactttggtctaccagcaaggcagtaagttctgaatgcaataaacactgttgtctcttctgtggggccatggcttcacttttgcttttgttacaggattttttttttatgtttttgcattcatttgagaactgggttctttaaacacaatttttacacgactctgttaattaatgccattcttgtttttaattaatatatttcttttcatttttgtattctctatacagttgcagatgggaaatataatgctgaagatcaagtggaaccttcaatttttgcatctgacctcatcaaattattagaggagtctatcatgactttccgtcttttcctgaaaaaggacaagaaaaagaatagtgccctcatgagtgttcatagtcatactggaagctcgattcaacaagttcaatcctctcttgataagaaggaagtgaaagtgaaggagctattcaagaagaagaaaggatggaagagcaagacctggccagccacaatggaggaagttcagctgctttttgccttaatcgacatcaaggttgtgtcaagggtcctaaggatggcgaagctcagcaaggagcagctcctgtggtgtgaggagaagatgagcaagctggatctctccgacaacaagctgcggcgcgatggatccccaatcctgttcccctgttgacccatcgagtgcctgaggcaccgcaaaatgtggcatctgctacactttgaatactttatagcttagctgctgtatgagctgataccaccctattatatgtaaatgcctttaggtttaaatgctcatactaaaacgatacctaagaagagttgctgctagatccccatttctggagcctgtgtttagcatgaggtttttatgcagcatagcaacatatggaagcaagacaaatggttaatcagaaatcaccgagtaaaatcctacttctggacatagttgcaagctgtgtctgaactctgaagctactggagcaatgagattgaagcaggtggctttaaactactcaatctccacatgcaaaggaacttcagtgtgtttgattgcaacctgcaaactgaagtgagatctgctcaattttctgcagtgctttctctgaatttttaggtaggtgttgtacctctcccttatcttttagcacttggcttctgcaaggataaacctgctgctcgtgcaagcacgcatgtaactctgcagaaaaaatcatagtgcaccatgatgcaactttag

SEQ ID NO: 22178 - DNA, 3667 bp, Oryza sativa
  ref <308>: DATABASE ACCESSION NUMBER: AK072375
  ref <309>: DATABASE ENTRY DATE: 2001-12-06
gattcccatcccaccgccgctgctccacctccccacacgtcgtccacgtccggccgccgcctgccgcgccgcgctgccggcgccgccatggccggggctccctccgtctacgccaatgtctcctgctcctgctcctgctccacgcgccgtcgcacaccgcgtgctgccttgcaaccgccgccgccgccgctccacctcccgcatcggccaccgtcgccctcgccgacatggccgacccggattccttcttccgccgctgccgcgtgctccgatgctctcgtggcgtggcgcacagctcgggcggcgagcccgcgagcgcgaggaggcgctagcctggaccccggaggggaggggtgaggctgtgattgtgcggcggccggagcagaagacgaagggggtggagctaagcggccgacgacggcgagcccggcggcgcgtgggcctcaatgcagctcctcggggctcctccgcctgtactcccgagcggctcggcggcgccgaccaataccccggctacggcggcggcggaggaggaggaggaggaatccctcctcgaaggccacaaggcagcgcgcgagtgggcccaggtgcacgggcagcacgaggggcgcacctgggccgtcggatcaggcgcagcagccacgttgggccaatccaacggacgagatgcgcccgctcgggccgaagacggaagctttgggttggttttactactttttgtgccccacctcctcttgcatgcaaggctttggctcctctcacccacttttgcttcgcaaccacaacaattttcacaagtcacaagcgcagcggaatcgcggagaggtgagggcttgatttgatctctctcccactctctcctcctcctcctcctcctctgctttcctctgctccaagacaaccgtgagatttcttctcttcttcaatgtccatgtgtttgtgttggtgatgctgttgctagtagccgctgctcttctagttcttgctgtttcgtttcgttcgccgtggtcctgtggagtacttgatcgagaccattgggtgttgtgtttgtcttcgatcttgagacgattctgtgagagttttactcttggtctggaatgctgcggcctgtgttcttgcgttggtgtgtgttgatgttgttgcggttggttttgaagttggtctgtgttcttgcattggtatgtgttgatgttgttgcggttggttttgaagttggtggtggttttctttgaggagggagggtgacgagcaccgagggccatggtgatctctttcccctcttttttcttcgttttcttgcttgctcttgttgttgctgttcctgctgctttcgaagatggtggcagttttcttggaggagaaggaggtgacgagcaccaacctatggtgatcttcgttgtctccttttattttcgatcttacttatcattcttctccaccttgttcctgttgttgcgtctactgctgcttccgtgtcgctgctgttgcggttcgcatggtctctgttggaggaggtggtaatctgtaattctgtatctgtccgtcttcttgcaactggatagtgttcatcagttcatgagttcatccttcatcgtagcacccgtttctacctacgcattttcttgatgtttcttttcctggcgttatcgatgtaaacatggccgctcgatgatctatatctgctcgtctctatcgtttacttattttggtatgtttttccagattctttctgcgtgtaggtgtgctttcctctctttttttttcccacactgggttttgacgttctgttgattcctcttattcttgttgattcttgatgatgctgtgcacgcggaaactcggtgatcttgatttataacctgtccgttcttgctgttgagtgccagcgagcagtgttactctgtttttcatgaaagtacttttcattcagtagatgtttacatccatagatgtatgagtctcttagttcttacttactatcaagcaatcaagttcaagccatctttatttgcagctcacattaaatggtctaacacttgatgatgtttcacttccccagtatggtgtgaagtgcgattctgttaagtagtttgttacccggcaccaggtgttactgaaatttgagtgggaaatcttagcctgtgattatttgtcccctttcatatcgtgtgcactgcaggctgctgcatttgttcttggcacaaactttggagtttttatttttgttctgaaatgctgaagccatttttcatggtcttcttaagtcttagtgaccctgatcagtattgaacaatgtttggttcaacagatagtacaatagtgtgttcacattagtccttacaggaaagaggcttctgccatgggtgcatctcccagccgtccactagaacaatcaccatcatctagtgaaggagagaatcacagagttaagtatgcctcatatactacgcaaggatttcgcccgcacatggaagatgcacttgcagttgaactagatctagatgcgaccacgtcattctttggtgtttatgatggccatggaggagctgaagtagcaatgtactgtgcaaaacgatttcatactatgcttcttgaggatgtagactatatcaacaatctgcccaatgcaattacgtctgtatgcttcagacttgatgatgatttgcaacgatcaaatgaatggagggagtcacttaatccctgtgctaatcgcaattgtctcactaacatttgtgctaatctccaccatttcacagaggattacgttccgccgtcatatgaaggtagcacagcatgtgtggtaatcattagaggaaatcagatcattgttgggaatgttggtgattctcgttgcgtgctttcaaagaatggtcaggcaattagtttatcctttgatcacaaaccacaccatgaagctgaacgcgaaagaattcaaagagcaggaggacatgtatttttgcaaagaattctaggaatgttagccacgtccagagcgattggtgattttgcatataagcagaacagaaatatgcctccttcacagcaaatggtgacatgtgttcctgacattcgcgtcgaaaacataactgatgatactgaatttcttgtcatagcaagtgatggtgtctgggatggcatgagaaataacaatgttgttcagtttgtgcgtcaggaattacgtccgggggaggaaaatctacgcgagacttgtgagaagcttgttggtcattgcttgcactcaaatgacaacgcgactgccatactggttaagttcaagcccattgaggaggaccccgatgaagttgccagtgccagggatgaacatcaacacaaccccgagggcggtgatgaaaaacttgacatcaacaatgacaatgactaatcactggccctccaatttagtgcaccttagttcttgcaaggatcttagctagctgcagggagttttggggttagatcaggaaaagaaggtccagagagtcctatttttgtccaaggcgacgttgatgggatgccactaagtacgtagtatgatgccatcagtccattagcataggagacagtccgttacatttgtgcctgagagtcacttggattcgtttaacgcacctttatcattgtactctggattactgaagattttggtcgatgtagtaatactcatttc

SEQ ID NO: 22179 - DNA, 2149 bp, Oryza sativa
  ref <308>: DATABASE ACCESSION NUMBER: AK072376
  ref <309>: DATABASE ENTRY DATE: 2001-12-06
gatcctcctcgaatacacaatttcttttttcacggtctagccaaatttcccaatccgtcggcgctcaccgtcttctgtgccgcctcacttgcgccggcgaccggatgacgcctgcatcccctccaattcatcttcctcatcccgatctgatcctccagccctagttccacaagcgacatgccggagatgtgtgcgggagggatccaagcgaggtgcctggctagaggcgccacatccgccggggaagacgagggttcgctggggaagacgagggttcagtcaacgcatgagagagccactacaatggaaggatgcgagggtacacagggtcggcttcggccccggcgtcgacgaggaagcggagccggaggatgtcgcttgctgcagatgggggggtcggccgcggcgccatcgatggaagttgaacgcagcgccgccgccgtcgatggaagccgagcgcagcgctgccgttgacggaagccgggtgtatcgtcggatgccgaatatgccgcgtcgcgccgctgccgccgccgccgctgggcgtagcactgcctccaccgccggacgccctatgccatcgccaccacactaccacgtaggccagggcacaaagctgccatccaatgggttgtggaggtaattaaattgagttattggagaagatagagagaaatcagactggaagacatgatttattttttttactagtgctattgatttcccaggcataaattcatattatttttgtatacatatatagacgtatcccgtatccatgtttttcagaaaatgatgtatcctatccatatccgtatccctgtatctcggtaacatagagcaaaggatgttgcttgctgcagatggggtgacggccgcagcggcagcgacagtgagtagtttagaacttcagattagctatcttagtaggcaagcagagcaggcagggcgagcattgctagcgtagaatagctcagatgagttatgtttgtttctgaatttctgtctttgtttctgaatttctgtctcccacaaggttaccttggttatactgcacaatatccaaatttgctatacacggtctctcatatttattaatttcttcagtttgtccaatttctcatatgaattttgaaaaataagaaacaccttccatgggaataccaatatatctgttactgtccaatgtctatttttcagctcaaatcctcatgattttgtttagttctaatttatctgttcatatctttgtacaggaatattttttctggtcagcctacagagacaagttctggcaaggaagcatgtcagtagataagagttggatgcgcatgagtagggcaactgcagagtggcaaaaagggttgcaggaatttttaaattttgcatttcaagatgataatcctggggataatgccccctgtccatgtagaagatgccttaatgtggtacacaaaacacgctccgaagtgcaaagtgacttgctaaggaatggattcgatgaaagttacatacagtgggtttaccacggtgaagattcagatgatgacaatgtcacgggaagattcagaagaacgtaaggaaagggaaatgctacgggaggatattctcaaaatgattactacgcaaagcgtagcatcggaacaacagtctgatctggcaatagattgtccaactgagaatagagaaccacatgacacaacaaagaaggctcgaagcattcagaacaacacagttgtgaaagcactttttaacagcgctaatttgcaaggaacaacaagtactacccggcaaaatatttcttcacaacatcttaggaatgttgctagaaattttgtacggtcccgaactgatcaggccagaggagaaaatggaagaatgaatgaaagaaatatctaaatcagctcggggtttggtgtagcatccaggaggaacaatcaactctgttactgttgaatggctggagcaaaccacgacaaaatcaaacaagtgatggctagaaaagctagtttcgacaacaatgttacaaactcattagtttcagaacttttagttttatcagacaacttgtatttcagcatttggaaatttaacatactcatattgtcatcattactttgggtatctgaaatatattatgtcttattcgcgg

SEQ ID NO: 22180 - DNA, 3101 bp, Oryza sativa
  ref <308>: DATABASE ACCESSION NUMBER: AK072377
  ref <309>: DATABASE ENTRY DATE: 2001-12-06
gaggtgcacttgcttcagtcaccacctcctcttctcctttgccgactcctgagccatcagtgtggcctaactcgtgtgactttcaaagtaagagtatctacgacttcgattcttttattgcctttctgattaatgaatagtggtaaacgaagcaataggatttgactcctggagaaggagaagctaagatagcactgagctctttctagatacacatccttctccgcggccatttcttggagcaaatctcattttgcacagccccaaagatttcttcatctttgaaggcaaaaaaaaaagatggtcctttttcgagggaaataggggggaagatggctatgaagagagtggtgtttctgttgctgcttgtggcggcatctgcattggtgaagtcgtcaagaggaggaggaggaggggaggagaagttggggaagttctatggatggcggcgccatctttcttctggaccagctgcctcttcgttggttctcagtggggatctcgtagacaaaatatggtcagtttgcttacaagacatagttagcccagaggatacatttggctttggggaatcatttgcctgggatgagttatcgagtcattccacggaagatgaactgaaggcaacactgttcatggaacttatggctcttcttccacctgagaaatcttcttttacttatgattgtatccgtgcaaactgcttcagcctgggtgttccacaaatattcagtgttgcactgagcaactatcttgagagccagaaatcattggtcggttcaaacttctatccgagacggcgtttggtagataaactgatcggagatgctccttccatggctccagctttcgcaccatccatgtcctctggcggtgaagttcactctcccctctctgtggcggaggcaccacttacaccttccaactctctgaacatggaacctcccagcccatattatcccagtaaatctgcacacaagcatcagggagtggcacctccagtttcaccttcagaggagtatcatgactacatgaaagtagtcttgatcgctgttcttccaacagccgcactctcattcctagctgcatttctatgtttctactgctgtggatgcaacaaaagcaaggtctcggttggcgagcaacgagatgaccatcctcttcttcacttgcagttctctaacttgcctggttcgtcacctgatgtgcatgttcctgccagcccgcttcataaggatgatcatggggttaggccatccaatgctggtgtaagcatgagcaagtgctttccatgttgttttaaaacctcaagtgatgccacaacacctacactagtaactggaggaacacaggagaacaatgccacaagtgatgcccctaaactgatgcctccgccacccccacctcctccacctccacctccacctccccctccacctcctccgcgtccacctcctccgcctccacctatcaagaagggtgctccaccacctgcacctcctaaagccaccatggcaagatttcctaagctgtcacctacagagtcaagtcgttctgaagagtcatctgcaagcgagctggccagtgaatcgtctgaaactgaggtgaatgctccaagagccaagctccggcctttctattgggataaagttcttgctaatcctgatcagtcaatggcctggcatgacatcaaatttggttcttttcatgtgaacgaggagatgatagaagaattgtttggttatggtgctggcaaccaaaacaatgtcaaggacaaggaaatttccattgcagatccttcacctcagcatgtttctcttcttgatgttaagaaatcatgcaatctggcagttgtttttaaggcaatgaatgtgagggcagaggaaattcatgatgctctggttgaagggaatgaacttcctagattacttcttgagacaatcttgaggatgaaaccgactgatgaggaggaacagaaactcaggctttataatggggactgctcgcagctaggcctagcagaacaagtgatgaaggcactaattgatattccttttgctttcgagaggattagagctttgcttttcatgtcctctttgcaggaagatgcttcaagtctaagggaatcattcctccaattggaggctgcttgcggtgaactcaagcaccgccctttttctgaaactactagaagccattctcaaaactggaaatcgtttgaatgatgggacgttccgtggtggtgctaacgcgttcaaacttgacactcttcttaagttatcagatgtcaagggagctgatgggaagaccacattgctgcactttgttgttcaagagatcattcgatctgaaggtgttcgcgaagcaagactcgccatggaaaatggaagaagtccaccatttcctagtacttcggatgacaattccaatgaatctctacaggaggatggcaattactactccaaccttggccttaagattgtatcagggcttagtaatgagctggacaatgtcaagagagtagcagcactggatgctgatgctttgtctacaagtgtggcaaatctgcgacacgaattattgagagccaaagaattcctgaactccgacatggcatcgctagaagagaacagtggattccaccgctcgttagaaagtttcatagaacatgcagagactgagaccaattttctcctgaaagaagacaagagattgaggatgttagtgaagagaacgattcgatatttccatggaaatgatgagaaagatgacggttttcgcctgttcgtcattgtaagagattttctggtgatgctagataaggcatgcaaggaggttggtgcttcacaaaagaaggcaacaaataaatctcaagccaatggcaactctaataacccatcatcccagtcaaatcctcaggagcaacagtttcctgctgttttggatcatcattttgatagctcagactctaatgattgaagatagatacaatcttagatactaagatacatacattatgttagatattttatattttttcgcccgagaccatgtaaaaagtcccatttgcagaggcattgttcatacataatcacattcac

SEQ ID NO: 22181 - DNA, 2189 bp, Oryza sativa
  ref <308>: DATABASE ACCESSION NUMBER: AK072378
  ref <309>: DATABASE ENTRY DATE: 2001-12-06
gtatcgaagattcgaagtatccgccgcaaatgtcaaaaaaaaaaaaaaagtatccgccggcggcggcggaagtggcggccgctagcgccggtgaatctcgcgcggccgcctgggcgctcgctaggcaggctcgccggtggagtctgctgtgacatcgatgcccacagtctggtgactggtgagaatccccaaccgaataggcccaaatcggtagtgtattaaagaaagcaaatttgcttgtggtagttgtttgtctcgagaaagttcttgcagccatggttagagatttcggagttttcttgttgttactcaagaaagttaaaaaaaaccctcttgttctagtacatttgttttagcttgggcataaagtgcgcagttcctgaagatatttattttttaccaatgaagaaattaggatattatgcatgatgcatctaatactatagcttttgttgatattctggctgtgatcgctatctcccaaaaggttctacttttttctatatctaagcgttaatcggcatagaaaaaaaaagtttttttttgccaaagggttggaggttgccaatgccaagtaattacccccacaatgtgttttaagttgcatgttgtattcccaaagattctgcgaagcatctgtgtttcctataatccccatgtgcatattttcctgagcagaaggagaagagcagagtacacttcattggatttgtgcgtgcagggactaattagtacttgaaacttctgtgtttagcagtactaatttcatttggtgtagattaatgccacggacatggggtaggattgtgtccctcaattgggtttaagctaacttccagaaaatttcatatctcagttttgattggtctccttgatttgtaatgtgtcatgttgaatccattattagagagttggagtcttcctgcacctcctctgagccttccataagttgtgaaccttgatgtgctggctttagtttcctctcttcatcttctttttttaaaagaagttcagaaacatctgttctagtatgtgctaatatgtgacagttagtatataatcctttttcttgtctgcagactcattgtattttttaaagaaatgcaatagaaaataatatgaattatgactgtcggttgtgattgacctggtttctcctcagttggcttcagcctttccagataaaatgggattcacatactgatgttatcaaagtggcagatgccaaattttgtcatatgagagaatgtacaactttttccttctatctagaactactttacatgcaagagtgcttaacaaatgactactaggagctgcaaatagcaacttgcatgtttactcccagagacggtgtcgtactgtttgcatagtggcacgaaatcgccatggagctcaagaatgccttctcaacatctactgaagcatttcttctaagagctcaccgaagaccatcgtgccgaggtaccgcagtggcacctcaaaccgcatgccatctgcggtgtatacgatgcagtagcccttgcctgccaccattgttgagcatccttcagcttcttgtggtgccaccattggcggaagctggaaacctctacctgagttgcagtgctttgttcgtggatgaagtgatggtgtttggaggccacttagccatggatttatagttggagagaaggaggtatccagccaagttaggcatggttggaaacgctgggtaaggagacaaggtcatgagcacatcatgtgcgatgttccagtctgatcaaggcaaggtgatcgagatttgacattgctttagggccaactgtttgatgtgtggtgagcacataacagtgcaccgccatataacgtgcttagcggataagtggcacgagggccccatgcaaattgggtccagtgtgtgaaggtcagttcctcaggtactacacaatgagatattggcagacaagtcttgtgctgatagtgaaagataagctgcatatgttaatcaaaagaccaatcattttcacaatgatcagggaccctgttcttgtacttcgcagtttgcagtgtatcaccgtgagttgcaatcaatttaagggccattatcatgggtatggccagttcacaatgtgcttatgtatgttcttgacagtttgattaagtctgaaaggcagtttgttaataaatgcagagtatgaaacttactg

SEQ ID NO: 22182 - DNA, 2166 bp, Oryza sativa
  ref <308>: DATABASE ACCESSION NUMBER: AK072379
  ref <309>: DATABASE ENTRY DATE: 2001-12-06
gtatcaccaactgcccagctccattcctcacccaacaagctcaccgccttctccttcatcatcttcctctattcatcgccgccgccgagctcagccgagcagttgggaagggaacaacaagtagacgtcgtcttcgtcttcttcaaggagaagccgatgactctgcggccactcaacacagagagaagcttcctcctctcctccccgaagccacacagccccagggatgcctgctcgccgccggtgaggtcgccctcctccaccaggctcctcgcctgcaggaagctcccctcctcctccaagcccatggccaccggcgccggcgtcctcgagaggtctctcagcttcaagaactgggagcccactgccgccgaggaggccgccgtcgccgctccgccgccgcacgatgaggcggccagccggtgcatcaacggcgcgcggccggggatcctgctgctgcagcagagccccaaagccaagcagggcgacgccgcgacgtcgccggcgcaggccgcgctgatcgagttcatctcgccgaagccgcggtcggagctggaccaggcggcgaccaaggtgcagaagctgttcaaggggcaccgcacccggcggaacctcgccgactgcgccattgtcgtggaggagctgtggtggaaggcctacgactccgcctgcctaaacatcaagtccatctccttcttcgacgaggccaagcaggagaccgcggcgtcccgctggtccagggccggcaagcgcatcgccaaggtcggcaagggcctctccaagaacgagaaagcccagaagctcgcgctccagcactggctcgaagctatcgacccgcgccaccgctacggccacaacttgcatctgtactacgacatctggtctgcgagctcgagcactgagccattcttttactggctggatgtaggagctgggagagacatgcatcaccaaaagtgcccgagaagcaagctttattcacagctgatcatgtaccttggaccaaacgagagggaagcttttgaagttgttgtggagggtgggaagctgatgtacaggaagagtggagttcttgtgaacaccactgaagattccaagtggatatttgtgttgagcacaacaagatcattgtatgttggacagaagaagaagggtaaatttcagcactcaagtttcctagctggggcagctacaacggctgctggaagattggttgccaaagatgggttcttcaggcgatatggccatacagcggtcactacctcccaacagaagagaacttcagagagttcatcagcttcttggaggagaacagtgttgatcttgccgatgtcaagagatgttcggtcgatgacgatgaattcccgtcattcaagaagacagaggagaaaccagaggaagctgagaagcctactgaacccacacatgatgagatcatggacagctcacaaattgagctgcctgaggtagacatagtgaaggaagcggttgtcgaaaacagcgaggacaccaaggtggcaccgatcatggccagccgcccatccttcaaatgggcaaccgcgaatggtgctcgcattggctgtgtccgggactacccggctgatctacagagcatggctcttgagcatgtcaatctttcaccaagagtggtgccctctcctactacaaacaggctgccgataccgtctcctcggccaagcccgaagatcaggctgtcacctaggctgcactacatgggtctcccgacgcctaccggttgcaagctcccgatcccgagcccggagatcaggaggtcaccaagggatcagttcatggggtttcagacaccgtcagtgtctctcacactcccaaagcttgggaagtgaatcaagtgatcatgccatggcattgttcatgcagcggtctcatgatatcaatactgctgttatggaagctataacagcaaaaatttttagttagttgtagcttagatcagagatgacaccatttttgtggtttgttttgtttgttcataagtgtgctgccattctttagtatgttcatcctctttgacctgaggtgaatccagggcacggtgtaaacaacgagctgtatagcctggattcgcaaactttcaagtacagaatgtgactggatttttttgaaattaaagagattattttgccc

SEQ ID NO: 22183 - DNA, 2832 bp, Oryza sativa
  ref <308>: DATABASE ACCESSION NUMBER: AK072380
  ref <309>: DATABASE ENTRY DATE: 2001-12-06
gcgcgcctcccctcctcctcctcctcctcctcctcctcggcggcgccgccgcggcggaggagcccccggcggcgccctcctcctcccctccgccgcacaagaacgcgacgctctccgagatcctcccgcgctacggcctgcctccggggctgttccccgccagcgtcaccgccttctccctcgccgccaacggcagcctcgccgtcgacctcggggggccctgctacgcccactacgagtacctcacctacttcgagccccgcgtcacgggggtcctccgctacggctccctcaccggcctctccggggtcaaggtccgccgcttcctcgtctggttcgacgtcgtccgcgtcaaggtcgacctcccgccgcccccgcgctacgtctacctcgacatcggctggatcacccgcaagctccccgccgacgagttcgagtccccccacgagtgcgaggactccaagaaatgccgcctctcgtccgcgctcgccacggtcgccgcgtggttccaggtctgacgggctcctccccctttgtgatttcgagctgtttgtgttcgataggttcttgatttaggcttgccaaattagtctctggttagaaattaatctgctgccaagtagcaatcgagttcaatttcccggattgtgttattgtgccgtcaatttcaaagttgatagcggaactatgctaagaatcttcgctgtttcctggtgattgtttcgtgtccgacttgtgttcttcctggctgctcactcctgtggtggttaattttgacttccatataattaccttgaggttgcgtaatgctgaaggaaacgcaagctgagagttgcttcctgtggtaatatttgacatggaaaatgaaatatatggcatattaggttgttgtaataaaatagggctattgtgtattattgcatcatgcagttggaatagtttaaacagacacgagacgtgttgcacattggcttatgaaaagaaaaatgcaattgtacagaaccaggaaggcaggaagcaaggtcgtattaagtcaataaagctcgataagatggtactgtactacctttcacatgccaatctttgcaatactgaagtaacttttatgttgaatggttttatgtgttgtataagtgaaaagaatgatagtttggtaatggggagattaagttcttgaagcctgacctatgtgtactagggtagaaaaaatgtgggtctaacatgaaaaatgcagaacttgatttcaaggttctgaagctaccacaaacaattgtattcagaaacttgttttagtgaaacttctggagggtgcgtggtgttatgtatggtattttccctcatggttggtagtaacggtggaaatgtttgctcagctctcgaaacttattattgatgtggtaagaaatgcttgcatttgcatttaatatgagtaatccttataatctactgttctgaagtattgcttattctgtttagtttattggttgtcatgtaccatactgaagtttatgtgggttactaaattatgaatttgcattactgacattcaacttagttttgttctgagtcatgaatgcttgtaagatgtttctatgtgactttgacatgaaaaggagggtcaaggtaaaggtgaaaagttatttatttgttcaagcctttcttgagcaatgtattctcaacagtatagctgtctaatattctcaaaggaagatcatttcatatttttttgtctgatcagaagtgaattagattaattagtctccttgacccttttatggttaagaagaattatccaattcatgcctaaatgccaacacctttgataaattaactcatgagttaaaagagattgcacatggcacatggctttcacctttcagaattaatgttgtgatatggttgtttcatgactcactgttgtagtgttgtttgctgcacatcaccgttggtttctatgttatacttgattattcaaacatttttgttgtttctgagtatttctatgtgatgcatcttgcagaacttctttgcccagttttaggggatggagaagggatttggtcttgtgacagtgttacatgagcttcgggccttccacgagtgtagtgattgccagcatccaactacagaagaataagcagtggttgagatatttctctacagcttctatattgtcttagatgcacatttgctcatgcccgagagacacatgatcttgtggagatttattggtcattttgatccatgatactggagcgtgctccatgattcaaatgcaattacacctgttaagtaaaaaaaaaaaaaaaaaaaagatcatagttacaagggattcaatactagtgccaaatttgatcatcaacacaaagacaaatcgatcaaaatgaagacatcacgcaagttcttcccaacaattgtagttctcctcctgctcgttgtcaccacagctgcacaggcaagggagtgcgagacgccaagcaacgagttcaaggggatctgcatgatggtggccaactgcgccaacgtgtgcctgactgagggcttctccggaggcaagtgcagcggcttccggcgccgctgcatgtgtaccaaggattgctagtcaagtggttaatccaaataactgcgcaaaattgcaacctatctatcttgcatgcttcaatgaataaaccttctctctaatagagccagaaggttttcattcatctcggctacaatactacctgtaacaattttctgtttcatgtaatcttttctttctattttttgtggtttgagtattaattgtattgttttttcttttgttgaagataattaaccccaattcgattc

SEQ ID NO: 22184 - DNA, 1336 bp, Oryza sativa
  ref <308>: DATABASE ACCESSION NUMBER: AK099274
  ref <309>: DATABASE ENTRY DATE: 2002-08-28
gtctcgcgatctccactcgcttcgtccagatctccgcatcaacccacagttagcgagcatgtcgtcttcgtcggagaaccccacggtgacggagcgtggcggcgggaaggaccgccgggacgacgacggcggcgaaaagaaggaaggaggcgggggattcatggagaaggtgaaggacttcatccacgacatcggggagaagatcgagggggccgtcggcttcggcaagcccactgccgacgtctccggcgtccacatcccgcacatcagcctccaccgcgccgacctcgtcgtcgacgtgctcatcaagaaccctaacccggtccctatcccgctcgtcgacatcgactacctcatcgagagcgacggccgcaagctcgtctccggcctcatcccggacgccggcacaatccacgcccatggcgaggagaccgtcaagatccccatctcactcatctacgacgacatcaagagcacctacaacgacatcaagcccgggagcatcatcccctacctcgtcagggtcgtcctcctcatcgacgtccccatcatcggcaggatcaagctccccctcgagaagtccggcgagatccccatcccctacaagcccgacgtcgacgtcgagaagatcaagttccacaggttctccttcgaggagaccaccgccacgctgcatctcaagctcgagaacaagaatgacttcgacctgggcctcaacatgctcgagtatgagatgtggctcggcgacgacagcgtcgccagtgccgagctcaccgagtcggcaacgatcgagaagcaagggatcaccaccatgcaggtcccattcagcttcaggcccaaggatttcggctctgctgtctgggacatgatcagggggaggggcactggctacaccatcaagggcaagatcgatgtcgatactccgttcgggaacatgaagctgcccattagcaaagagggtggaaccactcgcatcaagaaggatgacgatgatgacgatgaggattgaagttgtgctgataaaacatacagggtagggaagcagagatggtgatgccctgtgctctgaagcatatggtgctattgttggctgccttatctgagctgagccgctgtgttgtgttgttactcatctagctgcctcccgttattttgttcatgtttattagactcgggacaacttaatttgtggtggaaaccttgataataaaatcaacaggcccttgttctttgtggggtcagttgatatttttcgttatgttttccccaaatactggttgtgagggcgaatgctgttcaggaacctgttccaatggtaaactgaagaatggttgtc

SEQ ID NO: 22185 - DNA, 2366 bp, Oryza sativa
  ref <308>: DATABASE ACCESSION NUMBER: AK072381
  ref <309>: DATABASE ENTRY DATE: 2001-12-06
gtaatttattaacggtgtttgtgcatttgtggaattgtggatagctattctgattttcatgctctcttgctatttactatagccttaacagagaaaattataggtcataatcaaggtgcttaaatactgtctaactacttcatgtagtaaccaagtgaacaccatgtttgattcgataactacattaaatacaaaccaaaaaagttactagcaaggcacatctatttagctagtaaagacaaacccctaacaaccaatagatagaatggttaaccttttttattcctctcgaaacccttacagccaacagatagaaatataaaatggtggtttcctgacaaagttctagggacagcaacagaacaagtggatgagaacacagataattgtgtgcgcctgcgttgctcgattactcgaagcagccagtgtggtaagaatcccaatcctgtctcctctgtgggctggtcagtcaatgaagaatgaagaatctgcttcatgcctaccaagtaccaaatgctatcctcgcacgtgcattccaaactttccgagactctgttcttcccaaggacccataggctaaagagaatcacaatggagtatgtagtatagtttagaatttgggttggatggatgggtgtacaccgtgcacctagtaagacaaagtagcaaactttgcgccattatatttttcagaatgaaacacatggttcgttgtgccattatatatatactgttattttttctgatcctaactcctatctacgcttttgaaatgagttgggaaaagcaatttaagaactcttccagcttccattcacttgcaaattgaaaccaaatcatatggttctgctcctcgaacaatcagttaagattgcagacaaaaccaattaccaaaggctcaaagctgccctgaaggtaggcccgatctatggatgaaaacagtaatacgataagtactccttttctgaagtgagatcagtgtgcgtacaaagaaataaatcatccaacagccaacagatagaatggttagcctttttattcctctcaaacccttacagccaacagatagaatagtaagcctctttgtccttctcaaactgtaagacggtggcttcctgccgaagttccatggacagcaacggaacaagcggataataaaacagacaattgtgtgtacttgtgctgctcgatcactcgaagtagccagtgtggtaagaatctcatcctgtttcctccgtgggctggtcagtcactgaagaatgaagaatctgcttcatgcctaccaagtaccaaatgctatcctcgcacgtgctttccaaactttccgagatactattcttctcaaggacccataggctagagggaatcacaatggagaatgtagtacagtttagaatttgggttagatgggtacacataataagacaaagtagaaaactttatgccattatatttttcagaagggctaatgttctggcagcaaaatattctagagaacgcatatctattttttctggttctaagtcctcctaactcctatgcacatagtatttgaaaatgagttgggaggcagtttaagaactcttccagtttccattcgctttaaaccaaatcatatgactgtactaacacaatcaattcagtattttcagaatgcggagatgaaaggttcgaagcagcctagaagatccatggacgaaaatactaatatgataagtagttttcatcgtacatatggagtgtatgttaaactaaagaaaaactcctacatggttcgtgggacaaaaatgatgatactagtgaattacaacttaaatatgtggccaatatcatgatcatctcagaaagtgagatcagtgtgcccacaaagaaataattcatcttcatatacacacacacactgtagtctgaagttgatcctacaattgcagctggctggtcatcacagcgagaactggaatcaaataattgaaatgccgacgtatcacagaaaaagataagccattctctctcgtcctatcagataaaagctggaacgtaacagtgtgatatttttctgcaggtccaaataacaaaacaacgtgatacacacaagtggaaggttttccattatctaaaaaagcgcacacaaaatgggagatacgatgccaaagtaaagagagcaaatgtcgtgtcttccactatgagcaaagaacccttgcaacctgcagatagaaacgaataaagctacgataaaaattgtcacttaaatagatatacactcatttcatacatgtcacctaaaaagtcatgattttttttaaaaaaaattagcaagatagatcaatatatattatttcaatttttaaagttaaaattcaacctac

SEQ ID NO: 22186 - DNA, 2374 bp, Oryza sativa
  ref <308>: DATABASE ACCESSION NUMBER: AK072382
  ref <309>: DATABASE ENTRY DATE: 2001-12-06
ggaaccccaccaaaaaccccatcttttttttcttttcttttcattttcgttcttccctcgctgcggctttcaatttcgcggctcgtgttcttctcttctcggtgcccctgccttggctctcctccgatcaaatgcggcgagatctgcgcgcgtgaaggcgtcggcgcgggggcccaaagatcgatcctttgctgatcgggagtttgggtggggggaagcgagttcttggatcttcgcggtggtttcttgggggcgtctctcgtaggaaaaagggatggatcagtatgaggtgctggagcagattgggaaaggggcgtttggctcggcgttgttggtgaggcacaagctggagaagaagaagtatgtgctgaagaagattcggcttgcgcggcagaccgaccgcacccgccgctctgcgcaccaggagatgcaacttattgcgacggtcaggaatccgtttatcgtggagtacaaagattcatgggtggagaagggttgctatgtctgcattgttataggatattgtgagggaggagacatggctgaagctattaaaagagctaatggtacatatttctctgaggagaagctttgcaaatggcttgtgcaacttctcatggctctagattatttacatgcaaaccacattcttcaccgagatgtcaagtgctccaatattttcattgccagggaccaaagtataagacttggtgactttgggcttgcaaaaatattgacttctgatgatctggcatcttctgtagtaggaacaccaagttacatgtgtccagaacttcttgctgatataccatatggtaccaagtcagatatttggtctctaggatgttgtatatatgaaatgaccgcgctcaggcctgcatttaaagcttttgacatgcaagcgctgattaacaagatcacgaaatcaatagtctcaccattacccactaaatattctggtgcctttaggggacttattaagagcatgctgcggaaaagtccagagcacagacctagtgctgcacagctactcaagcatccacaacttcagccttatgtgctgcaagtccaattgaaatctagtcctactcgcaacatacttccaatccatcaatctttgactgacaaagttaagaagatgacatttcctagtgacgtggttgattctgcacgcagaagaatggccaggaggaactctctgggaaatgagaggactgtgacatttagcaagccatctccggaacggaattcagttagctctacacggagcatcaaagaatacacaaccacccagagtgtcaaagggctctctgttgacagtagtgaggctggggatgaggttaccagtaaagccatcataacaaagacatcaagcatcctaaggacgcccaagagcttgccagccaagacttatacagctagaaatcagcttgaacctcccaaaacatcgtataacagaacataccgctctgagctgccctcaaaaacaactccaaacaaaattgcccgaccagcaagaagagcatcactcccgctgtcaacatatgaaacacccaccaagcgcagcatcagcattctggaacaactagactcccctgacgtctctgtgaatgcccctcgaatcgacagaattgcggaattcccactggcatcgtctgaggaccccttgctccccatccacaacaagctctctcctggccatggctcatgttccactcctccctttatcaaccggtcaatcaccaaggacaaatgcacgatccaggtgttacgcaccgatggggacaacgggagcgactcctcaggccgcaacgccactgctgcctcgagccgcggatccaatgactccaggcagcagcggttcgacacctcgtcgttccagcagcgtgccgaggcattggaagggctgctggagttcagcgcgcagctgctgcagcaggagaggtatgaggagctgggcattctgctgaagccattcggaccggagaaagcgtctcccagggagacggccatctggctcacaaagagcttcaaggagacggcatcatagcgccaccttgtatcaggcgcgtctaaaatcgccagttttgtcatgtgcaatattagctcaggtagtggtaaacaatatttaggatttgagacttttagctgttgggaggcagcaccatctcagtgttgctgttaactcaaaatctacttctagctctagctagtttccagttttttactttctattaggaatcagcaatcagcagcaggagttgtagtagtagaactgtaagttaagctgaagatcttgcaagatcttagaacctttgtaatcatgtggcacctgcaatcatgtagtgatataaatgtggggttaaggatatcc

SEQ ID NO: 22187 - DNA, 2268 bp, Oryza sativa
  ref <308>: DATABASE ACCESSION NUMBER: AK072383
  ref <309>: DATABASE ENTRY DATE: 2001-12-06
gtcgcactcacgagccgcggcttcactcaccactccccagtcgccacgcctcggcccgacgggatgggaaggggagccccatcctcccatccgccgccatggcgccgcctcctccgctacgccctcctctgcgccctcctccccccctggggcacttccgaggctaatgaacaacttgctgagtttccaccaagaggctggaattcctatgattccttttcatggatagttgatgaaaatacatacatgcaaaatgcggagatcttggcagaaaaattgctcccacatggatatgagtttgcagttattgattacctctggtaccgaaagtatgttcatggggcatacacagattcatatggatttgataacattgatgagtggggtcggccatttcctgatcttcaaagatttccatcatccagaattgataaagggttcagtcaacttgcgaacaaggtgcatggaatgggcttgaaattcggaatccatttaatggaagggataagtttacaggctgtgaatggaaacacacccatattggacattaaaacgggaaaaccctacgtagaggatggccggcaatggacagctcgtgatataggtcttacacatagaacatgtgcatggatgccacatggatttatgagtgtaaatactgatattggagctggaaaggccttcctaagatctctttatcaacagtacgctgattggggtgttgattttgtgaaggttgattgtatcttcggtacggattacagcccaaaagaaatcataactatttcagagctcttggcagagcttgaccgccccatcatcctgtccatctcaccaggaaccgaagtgactccagcattagccaaaaacatcagtcaacatgttaacatgtacaggataacaggggatgattgggacaactggaaggatgttagttcacattttgacgtgtctagttcctttgctgctgcaaataaaattggggccataggattacgaggaagatcttggccagatttagacatgctcccatttggctggcttacaaatgcaggtgtcaatcagggtccacataggcaatgtgaacttacatctgatgaacagagaacacagatagcactttggtcaatggctaagtctcctctaatgtatggaggagatttgaggcatctcgacaatgacacgttaagcataataacaaatcctacattactgaaaataaatcactacagcataaataatatggagttccatcatgtgcacagtgaaaggacttccaaagaagacaagcattctagtcgtttcatatccgaagatcttgtacacgtaccaaagattgatggtgtatctcttggtctcactgcctgcagtgatgacaaagcaaatggatggtatatgttttcacaacatggtaaatcagatcatatatgcagggactatgggatgcaggatgacaaaaatatctcattttgcctgggcaaaacaattcctctcctgacatcggatgatataatcgtacataatgaagaataccaaacaaagtttcacctggcaaatatggacagtgacgatgcttgtctggatgcatctggcagtcaacggaggacatcctcagatagcaagtttcccatgttttcaaggtgcaggtggcatgctatgcagatgtgggagctgaatgagaaaggaaacctcattagcagttactcaagattatgtgccacggtggaatccaacaataaaggagttgtaactacaggagcagtagcacgtgcatggatagcaactgggagtaaaggagaaatatacctggcgttcttcaaccttgactccatgagcaggaagataaccgcgagaatatcagacctggaaaaggttctcgggagtacattcataagaaaagacacgtgcagctgcactgaagtttggagcgggaggaatttcggtcgtgtggaggaagagatttcagcggtagttaaatcacatggttccatggtgtttgaaattacatgttgaggtatcccataattctcctattgcgcttactgaagcatgacaggatggaatagataagtagggaaaagagccttgagcatgtatcaggtaaagctaccaaaatgaacatcctttaaaaggctggggtttcagtttaaaatctgggggttgtgggctttaaatgaggcctaaaagaacaaaaaaaattccggaatacggagctatatatgcaacaccactcactaatgaaggaaccaaatgcgaagttatgtaacg

SEQ ID NO: 22188 - DNA, 2437 bp, Oryza sativa
  ref <308>: DATABASE ACCESSION NUMBER: AK072384
  ref <309>: DATABASE ENTRY DATE: 2001-12-06
gtcggatcgagaaaaaagcgaaaggacctcttgaccccccaaccacaccgaggccgccgcggaggaggaggaagaggaggagatcgaggatgtttttcagccgcttcgatccgtggccggtgttcttccggagggagtggaagcgctgctggcccttcctcaccggcttcgccgtcaccggcgccatcatcaccaagatgaccgccggcttcaccgaggaggacctcaagaactccaagttcgtccaggcgcacaagaagcactgatctgatccgtgcctccatggtaaatccccccgcgcgcctccttcctcgatctcgtctcccctccggctgagatctggttctttccgctgtcctgcggtagatctggtttgtagaaactatttgggggttattattgtttgttcctgctttaagctgggcatggtatggtgtgatttggtttcgatttgaatcgaatcgctaggattgcagcaacatcacttcccgcgaaacgggagagtaatttggggggaatcaggagataggattaggggggaaaatgtaggaatcttctggcggcacattctctatgatgtgattattaattagtccatgaaggtgaggattaggcaactttgctcatcgatattgctccgtgatcaagatagcctaagttttctgaaaaatgcattaagggcatagcaagtggctaattcttaaagcatggttgagagtacaattcaacttcttttttgtagacagatgtgcttttgtagcctgtttccttttgaagggtagcagaaagtcccgattgttcttagtgtgctaattttaccttctaaacttggaagaatggaacatacgcaaatgataaatgtgcttctttacatccaggcattcgtaatcagtatgaaaaggatgcagaatacattgacgctacattttataaataaggttttcttttctaagagaaagaagggtgcgaaggaaaataatgctgcgttccaatcctattcataatattaggggaatgctacaggacggtatcccgttcggacaggatgatacctcagaggtatcgtctgatacccaggtatgccaatacctagtaggtattggcgataccttgaggtatcatcatgtccaaacggggtatcagccgataccttaggtgatcatcccgtctgaacgggaaaccgtcccgtagcatttccctaatattattgtgatacgtcttggaacataatgtttgggcagtacatagggattactatttaataatatacgaatgttgaaaaatagtttcatgcaaaagttggaaagggtgtatgaaatgctgtaatacggaaggaaaggtggttcttactccacgaacgcattttctagatatttatatcaataaaatttcctcaatcaaggtgctcatgtacctgtagatccgtttattgttgcttcccttttatttttcaaacaaaagctgatcacatatcaatttctaaaccagctaactgtgatttaaatttttgttgagtattgcacaagggattccaatcactaatgtaaatgtcttgtatccttgtaattcaaacctatctgatgcttcagagcccaactaattatgatcaaaccactgtttggagttactgtatatggttccttccacatcaatggtatttttgccactcatgggtgttgtatactttctggggctgggagtattatctcagaaactgttattgtattgacctggctggctggctatatgccctactctgtttgattttatcagcagctcatattaccttcagcacgctcaaattgttaacatctgtgaatgtgtatttgtttattgaggtacttaaggattcattgagcaaatttgttgtccattggacacaagcttatcttagtgtgcttccagaaaaaaaaatgttttgtcaatgtgaactttttttgtgaatgttttgaattgtgcatttctgctatgcactgcaatgatcaaatcaagctgtacagctgctgcttttgtttgtaattgttttgaagccctaagggaattgctgttgttattttttctagaaccataggtagcaagtaaaaacatgaaggcaacatcattcatactctttgcttgatagtcatttggcgtattttgtaaaatttggaaacctttctttgcatgcatgacatgtcaaattggagttcctaatttcaggtatcctgtttatggaagtacttactttgcttaaccttaccatatctgcaggtgaaggaacagctggtattgcctaagtcttcagtttggcctatttttctgttccaaatgaacctacctgttttttgtttatccatttgggtggacaaccgctccagttgtatctaataagaggcgtttgaatctttggaccaaaaaatttgagcttctggtataaacctgtaatactcttcaagtg

SEQ ID NO: 22189 - DNA, 2336 bp, Oryza sativa
  ref <308>: DATABASE ACCESSION NUMBER: AK072385
  ref <309>: DATABASE ENTRY DATE: 2001-12-06
ggggaaggcaggggctttcaaatccgcgcctcccctctcctcctccgccggctgcttcccccccacgaaatttcgcccaaaattttccctctcgcgctcgcgctcgcttcgccgatcggggctcgagtcgaggccgccggggcgagcgcgttggggattcggagatctggggggaggggattagggtttgggagcgccaggtcggtccccgatggcggagggcagcagcggcggcggcgggaggcagcagcagcagggggttgcggagcggcggctgctccggtcgcggtacctcgccgtgaagaatctcatcagcgatgagaaggatgacatggcgagggcgggctccgacacgttcgccgccatcatcacgcaggtggactgcctgcacgagctcggtatacgaaatcctccccccctttcgcctttgctaaaccgtgtgtttttctgcagtttgatgtggttatccttgccttggactcgctgtttccgatttgtattgcatttgagtcacagattagaaagacatcgtgatatttgaaccttatgcttaggctgttagtactagctgctgaagtggctgctggagcacttgttgcaggttcagaaaaaagaagaaggcatattagcaagttgttcatctgcattgtatgtgtagtgaatctcagcaggatctcaaaacattggttggtcttcagataactgatatagcattattgcgaactacttctggtttattctactgttgacattttacttcaaattgctactcgaacatcagagcatcagcatgattgcatttagtttcgttggttgttctcccatgctaatgttgatgtaattactcagttcctatcttctacaagaccaatgctttgtaatttgcctgcatgattgcatttcttggcaaaacttggtgtttattgccatgttaatattagaagttcagaactcactgtcgcattccaaaattagtactagtacttcgaatagctgcttatgatatattttactggtttggatcatttaagcataagtgctatatgaagtacacaaaatgatggcatccttctacaatgcagtgcagaggcctagggagcaaatagctgatgcagaaactctgttggacattgcaaacactttggtaacatccgttaggtctcagtcaagtgaaggaatcactccctctgatttcgtaacagccatgctgaagaaatttgggcaatcagggggccttgattctgaggctgcctcattgcgctggggggatgttgggctttctgtgtcccatgtcttcagggctgcacctggatgctgcactatgcttggacccatgaatacagaagtaaaacaacggaaggctgtggttgccaatagaaaacggactgcgaggccaacggaaaatgctcgtcctgaacagcttgctgaatctttggagggagtaaagacagacactgataggaatgtgtctgtcatatttgatatcctgaggaggaataaaagggcaaggctggagaacattgttttgaacaggcgttcttttgcccaaactgttgagaacgtttttgcactgtccttcctagttaaagatggcagggtggcaataaacatagatgacaacgggcatcatatagtctgtaagacccttttccgctgccctcatttgtttccttaaatgatatgacaagatgccgcttctttagtgacatgtctaagataattctattggtcctatgcagatcctagaaatgctcctgctgctagtgcgatagcctcaggagaagtctcctacagccattttgttttcagatttgatttcaaagactggaagcttatgcaagaagtcgttccggacggggaagaactgatgccacacaggaaccccgagaacatcccctgcgccgaagatcatgaccaggctgatccaccggagctatgcgcgcaaagaacacctatcaggaagctcacccggaaccggggcctggtgatgcagcaggaccagatggtggtcgcggagacgcccgaggagaagcagccaacctccaagcggaggcgcctcttcagagaccaacaatcttgaagcgaaaccccccctgccctgctcgtcggctgctgtagttttagcactttagcgtgtgcgcctacctgctctcgtgttgtatgtagagggagagatctattataagttataatagcccgctgtggttttgcctagtgtctgtacaacagtcgggcgacatagctcatctcgtgctagctcgtgtaacagcttagatgtaactaatgttcttcttttaactctattagaatttagatcaggcagcttcgatttttcc

SEQ ID NO: 22190 - DNA, 2145 bp, Oryza sativa
  ref <308>: DATABASE ACCESSION NUMBER: AK072386
  ref <309>: DATABASE ENTRY DATE: 2001-12-06
ggatgacaatattttaatgatggaaaaaaggtttggcgggagcgcgggaggcgggtaaaattggcgcgcaagagggggagggggaggcgggaggccgcgacctgcgacccttccactactatagtaggagtagtgagtagtccatcccaacacaaaagggagtagcaagccgagtggagggagaggcaatggcgcccactctccccgtcgtccccgcccacggggaggacaagaagaagaagaagaagaagaagaagccgctcaagccttcgcaggaggaggaggaggccctgccgctgccgctgccgccgccggatcgcaagaggaagaaggcatcggagccggtcaactcgccggagagagccaagaagaagaagacggcgacgccccacgagccgccatcggccaagcagcagaaaagaccgctccccttccagcgcacgtggagccccaacgacgaggtcctcatccttgaggccatggcggcgcatcgccaggagcacggcaaggtacctaccgccgcggagctcttccccgtcctcaacggacgcctcgacaggaagcgcctcacctataagaagctcgccgacaagttgcgcaccttcatgcgccgccatggcagagacgccaagaatggcccgcccacccaagcgcacgaccgccgcctctacgacctctccaggaatgtctgggtgtctcaaactcaaccgccaaacctaagcgccaacgccaattcaaacatcgcgggcgggcaacccaaccagcatgatgccatgcccaccgcaggcaaggcgttcgacaaaatgcgcgactcctaccccaacctcacccaagcgctgttgcttcttgtgggtacggacctggagaaagcgctcactgccattgacgaaaccaaggcccaggcgctggacttgaaggtcagcaacctcaagaaggagctgtctgaggctgtcatggaatcggcaacgattcaaagcacagaaagttctaaaataccgtgctttccatctaccaagcttcaaccagagtttggtgcagaaattgagaagaactttcagctagagcatttggatgaaatgaaaggcacccaagtgaaattggcaagaatggaacaagaaatattagaactgaaacaaaattttttagcttttcagtctcagcaaatggctgatagcaagcaacaacacgacaagtcatcagcgaagggtataatatgtgaatcttctgagagtggtcttcgttcaattgtagctgacaataatattttatgcaatactttgcaaaaggagatggtggtacaacagaaattgtcttgcgggaagaccaaggaggttacttctaagcatcgacatcctcagaagctggttgtctttcctttttgatactctattatgtgatatagtaacaattaaggggacatatgtagtgagaactaggaatcatcatttttctggggaaagtattaagaggaagtacaaaagatgatgtatggacaaaggaaaattccttatggtaggaaaaggaatgatgctggaagtcagattaagcgcaatggggagttaaggagggtaactatgcatggacaacaagaagatacgaataacgagggtgggaaagaggttttgttgctttcaactactcggccacatattccagtagccaaggctactcttcaaacaagttctggatccaaatttgttgggggcgtgccacttggatcagaatggtatcaggtgtttgtgaatgatgttttgaaaccagaggctccgttgctacgcccacctgggatgaagatggctgaggcacttaaaagtatcattgcatggccatgtgcacaaattcaatggtgtaacaatggtgacccagtaaaatctggcctaccatctcatccaggtcactggcaaagcagatttcatgtctgaaacaaagctgtatcgttttgcacattataagggatgtggatcttaatggcttagttttattagattcaaatacggtagactagctagtgacacctagacatgcaatgcatgggtaacacttttgtttagctattcctaagaggtgttttgctgcacttcgtcatgcttgatgaattttggtagcttctattaatctacgctgacagcttagcatgattggatt

SEQ ID NO: 22191 - DNA, 159 bp, Oryza sativa
  ref <308>: DATABASE ACCESSION NUMBER: AK072387
  ref <309>: DATABASE ENTRY DATE: 2001-12-06
ggtgactctctagagtgcttgctgctgcttcctctgtgtgatgtttgtatatctctacgagaatatgttctgctcccatgtgcagtaacagcgtagtgcaaaaactgtatcaaacctactatcagttgtttcttcgaaattcaaaacaatttcttcgct

SEQ ID NO: 22192 - DNA, 2152 bp, Oryza sativa
  ref <308>: DATABASE ACCESSION NUMBER: AK072388
  ref <309>: DATABASE ENTRY DATE: 2001-12-06
ggtcggttcgcccgcctcctccgctcgcgtgcgccgtcgccgccgcagctccctcttctctaccgtgctgccgccgccgctccctcccaatgagccgtcggatctcctagtaaggaggccggggccgtcagatccggtgaccccggtctcctcaccggcggatccggcgccaagacgccaacctccgctcgcaagcgtcgtcgccgtcgccgtcgccgtcgccgccgcaactcccttctcctctaccgtgctgccaccaccgctaactcccaatgagccgccagatccgttaagaggaggctggggaggagaaggggagtcgggagggacaccaccgcctggagcgaggcacaccccggccgcggccgcgaccccgcatccgtcgcccgctgcgagccgcatctctgccccggtctgtgcggcgccaaatccgcctcgggaccatcggctggctcgccgatgtatccggctacccaaagacgacggagctagcacatgcagaagattacggagtggcaggatgaggtggtggtggttcttccccagacccttcactgctctggttgcatttactagcttttgggttgttatcctatgaattgagcctaattagttgatattctgcgggttgctcaatgccaaatgtgccgctgttcctaggctaattaggctaaagattgttgacgatggtgctgcttgcacagcaggaggtcaggtttcgccgatgatgcgccatggatttgggcctcccggacctcaaaatcttcaaggtcatttctatctcccagccaaggtcactgttcaaatgtgctcctccattactccttccccaggtcagcagctatgcctcctttctccttctcacatttattctcctttttatgaacaacagctgtttatatctcacagagccacaataccatccccctcaatcggatgatgggttagtcataaattattttttgttcgatttttacaaattcacttatccctggaattaacctgttaatattagctgcaggtagacatgtatcatgtgtttttgtatggtctggagaaggcatgctttagccatggtatgtcatatttgccaactctctcacacaagatgtaacatgcacattttgatattattattggttttatatttcttggttgattgctggtaatactactctcatgatgtacacgcaaaccaatgcgcatactagcaaaatagatcagtggaggaatgattggtacacaaaattagcaattcactttattactgctgctttctctctgtgtgttcgttctgcaagtataatagcactagcattggtgaggaggtggatagcatcggttggcctgtggacatggccatatatatattggcattctttgtaaatgaaatttgctgtcatcatctccttactccaatggttgcatagtattgccttgctttccttctttaaaaaaatagttcttgctttatagaaaatccactgccaaggtatgctatatgaatttctagcaatgtctgtcattttgcataattgacatggcatgcccttcaaggactatttgtgcttgcattggagtttcagtgatgaacctaggctaatgttctgttttatttcagtaatatgctcaatcctttatttattgtggtgttcctgaacctgtaggatagtatagcctactgggaatcaatagtttgtgcctgcagagctaatgatgaatagctaaactaattctagagctcccaatttgcatgtttccaacatgaaacaagagttatccattcattggtacaacatatccataggtaagttttgtttgagacttccagttttgcccaaaccaaatgctatatgtaattctgcatgtggttgttctctcatttttgtctatacaacctctgataaaacatacaaattactgcctatttctcacaatgttccacatatgttttgatcgcttgatagggcacttataatttgcagttgccccatggtggattatttatttagtaccatgacatggagatttcgtgatccaaaattttggtagctttaggtctcctacatatggatttctttgcatgtacatttttcacaccttttcttacaatggagagacattttgccacgcaataatatcatattattgt

SEQ ID NO: 22193 - DNA, 2243 bp, Oryza sativa
  ref <308>: DATABASE ACCESSION NUMBER: AK099275
  ref <309>: DATABASE ENTRY DATE: 2002-08-28
gacaaatcgatctctctcctgccatcttcagatcgcatcgattttctccttttcgagtttttttccccttcgcttgagagctttcgacgagagcgagggagagggagatcatggccggcaagggagacgggccggcgatcggcatcgacctcgggacgacctactcgtgcgtcggcgtgtggcagcacgaccgcgtcgagatcatcgccaacgaccaggggaaccgcaccacgccgtcgtatgtcgcgttcaccgactccgagaggctcatcggcgacgccgccaagaaccaggtcgccatgaaccccatcaacaccgtcttcgatgcgaagcgtctcatcggccggcgtttctctgacacgtcggtgcagagcgacgcgaagctgtggccgttcaaggtgctacccggccccggcgacaagccgatgatcggcgtgcagtacaagggagaggagaagcagttctccgccgaggagatctcgtccatggtgctcaacaagatgaaggagacggccgaggcctatctcggaagcaccgtcaggaacgccgtcgtcaccgtcccggcctacttcaacgactcccagcgccaggccaccaaggacgccggcgtcatctccggcctcaacgtcatgcgcatcatcaacgagcccaccgccgccgccatcgcctacggcctcgacaagaagtcgagcagcgtcggcgagtagaacgtgctcatctttgacctcggcggcggcacattcgatgtctccctcctcaccatcgaggagggcatcttcgaggtgaaggccaccgccggtgacacccaccttggaggcgaggacttcgacaaccggatggtgaaccacttcgtgcaggaattcaagaggaagaacaagaaggacatcacgggcaacccgagggcgctcaggcgtctgaggacggcgtgcgagagggcgaagaggacgctgtcctccaccgcccaggccaccatcgagatcgactccctctacgagggcatcgacttctacaccaccatcacccgcgccaggttcgaggagctcaacatggacctcttccgcaagtgcatggagcccgtggagaagtgcctccgcgacgccaagatggacaagagcaccgtccacgacgtcgtgctcgtcggaggctccacccgtatcccccgcgtgcagcagctgctccaggacttcttcaacgggaaggagctctgcaagagcatcaaccccgacgaggccgtcgcgtacggcgccgccgtgcaggccgccatcctcaccggcgagggcaacgagaaggtccaggacctgctcctcctcgacgtcacgccgctgtctcagggcctcgagacggccggaggcgtcatgaccgtgctgatccccaggaacaccaccatccccaccaagaaggagcaggtcttctccacctactccgacaaccagcccggcgtgctcatccaggtgtacgagggtgagaggacgcggaccaaggacaacaacctgctcggcaagttcgagctctccggcattccgccggcgcccaggggtgtcccccagatcaccgtgtgcttcgacattgacgcgaacggcatcctgaacgtctcggcggaggacaagaccaccgggcagaagaacaagatcaccatcaccaacgacaagggccgtctgagcaaggaggatatcgagaagatggtgcaggaggcggagaagtacaaggcggaggacgaggagcacaagaagaaggtcgacgccaagaactcgctcgagaactacgcctacaacatgcggaacaccatcaaggacgacaagatcgcgtccaagctgccggaggccgacaagaagaagatcgaggacgccatcgacggtgccatcagctggctcgacagcaaccagctcgccgaggccgaggagttcgaggacaagatgaaggagctggagggcgtctgcaaccccatcatcgccaagatgtaccagggcgccggagctgacatggccggaggcatggacgaggatgctccggcggccgccggcggaagcagcggaccagggcccaagatcgaggaagtcgactaaatgatcgatcttttatcgcttttagttatacctgcaataatttgtcgttcgttttacaccgaattcttgagtgctcctgcaacttttttggtacgggctttcattatggccccggttttgctttacttgttaaagtttggattattatggttttattaatatagtattgagtagcaattt

SEQ ID NO: 22194 - DNA, 2532 bp, Oryza sativa
  ref <308>: DATABASE ACCESSION NUMBER: AK072389
  ref <309>: DATABASE ENTRY DATE: 2001-12-06
gcatttctttcttctcgcctctgcgacggcgcctccgccatggaggtgtaccggaatctactcctcctccccctcctcttggccctcgtcgccgcggcggcgtccgccgctggcgacgagcgggcggtactggaggtatccggctcgccggagggggtggtatgggtggtccagctctcggatctccacttcagcgtccaccacccggaccgcgcctacgacttccgccgatacgtcggcccggcgctcgccatggtcaaccccgcgctcgtcctcatcaccggagacctcaccgatggaaaaagcaaagatctgctaactatgaagcaaaacgagatggagtggatagaatatagaagcaagttaaaggatgtaattgaaagtagcaagcttccaagaagcattttctatgatctgagaggaaaccatgatagctttggtgtaccttcacctggtggggaccatgatttctatcagaagtatagtatcaatgccatactaagacgacacagccgtgtccagagcatcactttggagaacagtggccggaagcatctgtttgttggctttgatagcacaatggagattggtcttagaggaccgacaaatctatttgggcatccaactgacaagcaacttatagaattggatcagtcactttctcagtgggacactgacttcaacaaggctcaggtgacaaaagtcgcatttgggcattttccaatgtctttctcaacattaacagagtcaggaaaaagtatcaaggatgtgtttcttaagcactcattagcagcatacttgtgtggccatcttcatacaaggtttgggaagaatttgaagcgctactatcatcgatcaactgagggatcaccattatcagaacattactaccaatttaacatgcaccaaggatatgaaatccacagcgataaggagagttgttctaaagaggctgtgcatgccgaagaagagttctgggagtgggagatgggtgattggagaaaaagtagaagtatgcggatattagcaattgatgatggttatgtctcctacactgacatagattttaggttaggctcaaagagtataattgtactaccgacatttcctcttgactcgagattcatgcagagggccactgcttctcgtgacttcaaatgtcaggtcatgggggcttcaacttttgacacagtgagggctcttgtattctctcgacatgagatagtatctgtttcagtaaagatatatgactcaagatcaggacatcttgatgtagtgtttgactctgaaatgaaaagggtaaacgcaaatgaaactagaggagatatgtatttagttccatggaactggagagcatttgcagatccctctctgaacagatattggctccaaattgaagtaatggatataacaggtgacgctagtgtcagccagttgaggccattctctgttaatggctttgcttcaaaagttagctggacatggaaggagttttttgtgatgggtattcaatgggctttggtgtatcatcctgcactgtggtgtgttcttgctctgattttctcattgcttcttgtaccacgagcttcagttttgttgtttaaagatcaattcacatacaaatatctgcgtccaaatggtagtcagtgggtatcgttgaagtatctaattggtggtttcatctggctctttgttgagttttccagggtgactattgtgtggtctttgctcttggtgtatatgatatatttgttagtcttcccttggttgtttggtcaccctataactgaggatagtaacctcgcatccatgacatttagaggctggattcttggaaaatccaatagtggcagtgaagttctccatgctggcactccagatgtcatggtcattgttctccctcacctttgtttcgtggtattacccacaattgtgattttagctgccatggctgctgagagaacagcatatcgagaacagtatctttctcaatcaggaaagaagaaagatgatcactaccaaaagagcaggagacagaaggagcatgataatttttggaacagtcgttggacacggaaatttctttttcttctttgcctggcagttctgtggaaacattggaagcactgcagggctcttgtgaaggcttatgcgatgaaccctgtaatccactcgccagtacatttcttcttcattccagtgctcatagcgtttgctatctacaaaacctcgtcactttagctgttccagagccttttcttgtagcattgttgtattgctgtcaagtttcaaggacactggaaatatttagcgttacgcaggcatccctgtgaatctggtggtaactgtaggacaacagatttgttagatcatttaacttgcgtaaagatgctgttaacatcttgctgcacataattgttagactgcacggttattcttcagaactaataacagttagaacaagaaaagaaagaaaatgtcatactgctatgtttgtacttattttcaagaataaatttgctcctttttttt

SEQ ID NO: 22195 - DNA, 2136 bp, Oryza sativa
  ref <308>: DATABASE ACCESSION NUMBER: AK072390
  ref <309>: DATABASE ENTRY DATE: 2001-12-06
gctttccgcctctcgcctctccccaccccacccccccgcgacgacggggccccgaagcttccagaagcttccagggtcctcccctcccagatcgccccgccctccggagctcagcgggggcggccgcgggtggcggaggaggaggaggaggaggaggagccggggtgggggcggctagggttagggatccgggggtggtggggtgggggtgctgcggcagcgggtgggttcgagaaggaggatgcatatgatgcggcggctcaagagcatcgcctccggccgctcgtccgtctccgatccgggtggtgattctggcaccaaaagaccaaaattcgatcaggatggagcaggagatatagtcattgagccacatctaactgatgacaaacctatgcgcgtagaccaagaatcatcttcatctcatagagatgctgaggcaagcacatctactagtaagaatcctggtagaactgaagaagcaggtgcggatattcttccaaaagaaatgaatgagatgacaataagtgatgataaagttgatggccataatgataaggaatctgaaggtgttattgttaatgcaaatggaacagaaacaggtcagattattgtgacatcaattggaggtcaaaatgggaagccaaagcagaaggtatcatacatggcagaacgtgtagttggtactggttcatttggtgtagtttttcaggccaagtgcttggaaactggagagactgttgccattaagaaggttctgcaagataaaagatataagaacagagagctccaaacaatgcaactgcttgaccatcctaatgtggtccagctaaagcatcacttcttttcgacgactgagaggggtgaagtttacctcaaccttgtacttgtatatgtctcagagacagtttatcgtgttgctaaatactacaatcggatgaaccagcgtgtgcccatattgcatgttaagctgtatgcatatcagatgtgccgtgcccttgcatatatccatcgtgttgttggtgtctgccatcgagatattaaacctcaaaatctactggtcaatcctcatacacatcaactgaagctttgtgattttggaagtgctaagaaattggttcctggtgaacctaacatatcatacatttgctcgcggtattatagggctcctgaactaatatttggagctacagagtataccacagcaattgatatctggtctgttggttgtgtactagctgagcttctgattggtcagcctctgttccctggagaaagtggtgttgatcaactggtggaaataataaagattttgggtacaccaactagagaagaaatcaggtgcatgaatccaaactattctgaattcaaattccctcagataaaagctcatccatggcacaagctttttggtaagcgcatgccacctgaagctgttgatcttgtgtcaaggttgctgcagtactcgccaaatttgcgttgcacagctgttgatgcttgtgctcatccattctttgatgaactgcgggatcccaagacctgcttgtcaaatggacgatcattaccacccttgttcgacttctcagctgctgaattggaaggccttcctgttgagctagtccaccgaatcattcctgaacatatgaggaagtgaaacggaatggcaggaaaacacaatttcgctgttagaacagcggataggtgtgagtgagatggttgatgcaaacatccgtaacttatggatggatcaggagtagactagattcactgccttgctagatgtggaaagagggatgctatagaagttcctcatcatcacttcacataaagagtgaggcagtggctcattctgatgcaattccaagaggtaatgagcaactgagattggcacggcaactcgcacattttcatcatgtgccaccagagacgtttatctactaggctgctgttgtataatcaggtacatgctgagtttgcagttgtttgtagacacttgtttccctgaacaagcgatgagagaaatccagattccaaagtgcttgctttgctatcatgaaagcctgcccggaacatgtcaattttgattagtgcacgcaatggcctttcctttatgtttcagaagtctaatcaaattctccc

SEQ ID NO: 22196 - DNA, 2561 bp, Oryza sativa
  ref <308>: DATABASE ACCESSION NUMBER: AK072391
  ref <309>: DATABASE ENTRY DATE: 2001-12-06
gagaagcttctccgcggccagtggcgacgctaccctacgcggcgtctagaaccttccacacctctcccgacgcctctcgacgtacggcgagggtatttttatctctccgaccaccctccgccctcgctcttcttccccccgcacacgaagaatttctcgcttcgtttcatccccaccattttttttttgtttgacctcgaaagggaaagcagaagaagaaaaaaatatcccaaaatatccccgaaattccaccacctgtagcagcagcgatcgcgtgtgttcttggttccaattcgtcgcctgatactccgattcgagttcttgatcaaagttgctggggttaatttgggttcttggttgtgaaaggcgggagggggggtcatggacccggcggcggcgggcattgtgaaggaggagatgctggagtcgcagcagcagcagcggcaggaggatggcggggcggcgccgcggccgatggaggggctgcacgaggttgggccgccgccgttcctgacgaagacgtacgacctggtggaggacccggccaccgacggcgtcgtgtcgtggagccgcgcgggcaacagcttcgtcgtctgggacccgcacgtcttcgccgacctcctcctcccgcgcctcttcaagcacaacaacttctccagcttcgtccggcagctcaacacctacatggaacaagatactggatgaagtacaagaaccagattgtttttgttctagaagactcaactgatcaccttcaaatgatataatatactgatgggcttcagaaaggtcgatcctgataggtgggagtttgcaaatgagggttttctcaggggccaaaggcatctcctgaaaacgataaagagaaggaagcccccgtccaatgcacctccgtcacaacaacagtccctcacatcttgtctggaagttggtgagtttggattcgaggaagaaattgacaggctgaagcgtgataagaacatcttgatcacagaggtagtaaagctaaggcaggagcagcaggccactaaagatcatgtgaaagccatggaagataggctacgagccgctgagcagaaacaggtccagatgatggggttcttggcaagagcaatgcgcaacccagagttcttccagcagttggcacagcagaaagagaagaggaaggagcttgaggatgccatctcgaagaaaagaaggcggcctatagacaatgttccattctatgaccctggggaaacaagtcagactgagcaacttgattcgccgtatttgtttgattcaggtgtgcttaatgagttaagtgaacctggaatccctgagctggagaatctcgcagtgaacattcaggatctggggaagggtaaagtagatgaagagaggcagaatcaaactaatggtcaggcagagctcggagatgacttctgggcagagctgttggttgaagatttcacaggcaaggaggagcagtcagagttggatggcaaaattgacggcatcgacgaactggctcaacagttggggtatctgagctctactagtccaaaatagagttgattttgtgattgttcatccaacaactactgctgcttcagtgcttttgaagatcatcttgaacaaactggaatgttggctgtgtacatccgtttggatgtagaggccggtttaatccattatctaaaaaaaatctgcaggaatgtggattagagtagtgattggatctttgccatcggggctgaatattgataatgccgatttttcattccattttttcgaatatatgtttctccatttcagccctgctacttgcttctgaattgctctgttgcttgttaaacagatccaattgactagtggaaatatgaccaactacggaaggtgttcatggtgtttcccagactatggacgccactgtctagaagctgtataaacagtctgtttgccgagcgcgggtggaggcgatggccgggaaggcggcgacggcgacggcggcggaggcggcggcgagggtttacccgtggagggagaagcttgcaaagtacaagggggagctgacgaagggggtgtgggggtactgggagctcggggcatggaagccgctcggcctcagcgcccggaagcgggcgcgcctcaggaaggaggtcctcctcgccggcgaggactggacctacgaccctccccgcggcgagatgcgcaccaagcggaagggccacaagtgcgaccgcatctccgccgagaagcgtgcgaacacggttgagctgatgaagaagatgccccagatgctccttgactacaagaaacgtagatgggagaaaaagatgaaagaggaggagagtggaaagagctgagctcaagctactcgataagaatgctgctctgcctaaataagtttgaatctgatatagtggcttcaaatgatggctggaggtgatctgtttctttcccttgttggccaccagctttcctgctgcctaaggcactttgtagtgctgatatttgattgcttctatagttcccaacacttgggtcaatgaatcatgatcttacccaggctcaacttc

SEQ ID NO: 22197 - DNA, 2406 bp, Oryza sativa
  ref <308>: DATABASE ACCESSION NUMBER: AK072392
  ref <309>: DATABASE ENTRY DATE: 2001-12-06
gctcgcagctcaaaaaccctagccgccactccgccatttcggtaaggtttgctgcgactccgccgcgacgcatcttgcgccgccagccgccgccgccgcgcgcctcctcccccgtcgacctcggctgacgcgcggcgccctcgagctcgcgtcgcgtcgcgtcgtgtccctctcgttgatggaggctccggcaaatagcgtggcagtggctgatgggaacccaaagacagcgacagagactccgcgggtggaggattacaaggacgctgccatgtactatggaacgtacccggcttatctctatggagcctatggtggctggggggagtactccacatacctgagccatgatggtgcagagacaccaactgctggtgcttatggggatatgtactatggctattctccatatggttattcaacttcaggacatgatagtcagatgtatggatctcagcattaccagtaccaaccgacatacaacaaacaacagaataccactggcaagccttccaacaatggaaaaactgaaaatccggctgcactgccccaaggggatgtctctgctaatggtgttgatagtctgaaaggtcagaaaaagacgaatctgctcccgaaggcaagccagaatacaccaggttccaacggttcctatggccgacctagtgggcgttttggtaactaccagaaccaaactaaccgaacaacttatccatgctacagtagtcaaatcttcaatggcaagcagcaaaaacttcccactggcaatcgttctctgacaacttccaattctaaaagcaagggacagtcaaggaatcagaacacatatcctcatctcatgggtctgcagacacctacttctccgttgggaccaccatcaatttactcggctagtggaatgtatggatacaatgggagttcatatgggtccggcctatggtatggatcacacctgtatggttctggattgtacgggggatggaatgcactgtcggatggcaaatacaatcccagaggaagaggtaatggatcctatggttatatccatggaaatcaggatgggtttaatgagctaagaagagggccaagaagtggtcttttcaataaccaacagggagttggagctactgttgcacctgtgaagggacaagagctttcagccagcgatagctcgctttctgtcatgaaggatcagtataaccgggctgattttgtggaaacatactcagatgctaaattcttcatcatcaaatcatacagtgaggatgatgttcacaagagcattaagtacaatgtttgggctagcacatccaatggtaataaaaggcttgatgctgcttatcaggaggctaaggaaaaatcaagtgattcttctgtgttccttcttttctctgtgaatgcaagtggtcagtttgttggtcttgctgagatggtgggccgtgttgattttaacaagacattggaacactggcaacaggacaagtggactggctgtttccctgtaaagtggcatattgtgaaggatgttccaaacagcttactgaaacacatcattcttgaaaacaatgagaacaaaccagtcacaaattgcagagatactcatgaggtgaaacttgagccagggcttcaagtgcttaagattttcaaggaccatgtctgcaagacgtcgttactggatgactttgatttctatgataatcgtgagaagatgatgcaagagaggaaggcaaagcatcaacaactgaagaaggtcgttgatgagaagctgcttaatgctgtggacactgagaacagcttgttaactgtgaaatccaaattgcaggaaacagctgaggtagagattgatgtcttaaacaaagagcctcatggtaaagcaggacgagttgatgggaaagagaacggtgtgttggccgtttctgtaaatggtgttaccccagaagatgttcagttgacaaacgagaagttggccagtttgagcgtctgttaagttttttctcatcatttcagccattgaggggtggtgtaaggtgaagggctatataggttgggaaggcagcaatcaaggcaattcaagatccatttgagtttccttgtgagtttctccgttgcttttggttaggacttggaggtggtttcataggagagctagaagtttagctgattgtgtctggtgagatgtgcggatagcagtagaggttttttggacttttggttttcaatgatggatcattggtttgcgcagttccttttcttttatattctgttctcttttgcgttgggcaggtgtagctttttttagtatgtttggtgtctgaacctgaaagcatgtcaagagtgtttaaacctgggaattcaattaagaaatttactcttttgttccaatgcttattttctgatattgctttg

SEQ ID NO: 22198 - DNA, 2119 bp, Oryza sativa
  ref <308>: DATABASE ACCESSION NUMBER: AK072393
  ref <309>: DATABASE ENTRY DATE: 2001-12-06
gcctttcaccgtcaccgcctcattctttccgatcctccgcgccgcgctgctcggtgctccgccgccgccgccgccgccgccgctcaccgcaacgagcatactaccgcctctcttcctcgtcgtgccctagtgggaactgggaacccccgccgcgcccagctggaggtagaaaatctctcttggaagatggttcaactcttttttcaagggaccacagatggtggtagtgttgatacagatgctgtaaaagcaaggcgatctcttcttggcaaggtggagcctataatcaggtcggttataaagtctggaggtgggtatgaggctcggatgtggctctgcagtacggtctcatccattcatttgctcgacccatatggccagcgggacctgtttctcaatctcttggggatgaaaaattccaaacgggatgtcgctgcccgcttgctgcggatgatttttgacaaaaagcccaaaaaagcaggttctattatagcaaagaaatgccagatgctagaggacttcttccaagggaatccaaagcagataatgcagtggtttggtcactttgcggttactggagttgacacataagaagggtgctagggcactttctcaatttgcatttgtgaatcgtgatatttgttgggaagagcttgagtggaaaggcaagcatgggcagtctcctgctgttgttgctactaagccccattattttcgtgatctcgatgttctgcggactgtggaaaatttcctggagtatgtcccagacttctggtcttctgaagagcttgctgattccgtcaaagacggtgaaatactgcaaattgacacagaatattttgtagatcaattcgtttacttgatgtatgaggagaattccagagatgcatggcagttagttgatgaatttttgatggacgagcagttttcttctctttctcaacatcttcttattcatttagatgaacaaaggcttcttaatttcttgagagctttggggaagttgatcaagctgaattcacagtgcaaggaaatggtgttcccatgctgttggcttgaggttcttttgtcagcacacagtgatcacatatctcttgatgaacttgtgctattgaactgtgtcatttctaagggcagacaactttggcgcctcatgaatgatgaagaacaagaggaagaacaaggacagatgcaagagcttctgaagagcactaatcaattgactgatgctgatcattttgctctcatgaagggatttgtggatacagaacttccggacgcacttaagtggataggcatccagtcctggctagttttctgtgaattgtcaaaagggtgcaaatcagctgattcttgtgagcatctgttcacttgtaacagaatagaatttcgcaaggctgatgattacccattggtccaaaatgatgggaactcaattgcactagacagtgatgatgaggatctcataagaggtagccataaaaggagaaagagagatcggaagagaaagcgacggagatatgattctgacgaggacgatcttgatcagctgcttgaacttggtacctccaataggaggggcattgaatcgcaccatggatgttggtatctttcaactgatggcttttctgcttcatgggacattgcagacataccagatcacctttcctctcattatctaaaaacatggctaaagtttgcttgctttagatgatcctcacaacatgagttcaacaacccaccagttttcgggtgaattcatggggtcatggagatgtatgtacaggcttcgctctgttttccaacctcagatgcgcatctttaggccatgaattctgagaattcatgcatttctggacgtgctagccgctgctacatgaccaaagtaccgtgctggttgattccattgaaaaattacaggctaggacactgaattggcaggtttcactggaaagcggaaagtgaaaatacatctgaatgttgtaagacttgactagagctgttaaaagttgtatgccccggtctgcgggccttaccgccttatgctgtagttcgcagctggtgacttaagaattttgatcgacctttttctacatgaaaattggttgctgtttgtgcc

SEQ ID NO: 22199 - DNA, 2469 bp, Oryza sativa
  ref <308>: DATABASE ACCESSION NUMBER: AK072394
  ref <309>: DATABASE ENTRY DATE: 2001-12-06
tgtcggattctcctcctccgcaagcccagccctgacgttgtctcggacacccaaaggctgtgtttgatctccgcccgccacctgtcttcctcctcctgctgcgcgcgcgcctgcttcttcttcccgttgagccagagagcggttcttggtgcagagccggggatggcggctctgatgaacggctttgggagcctccaaggcaaggcgacggtgcatgtcgagaaagggcacatgcaagcatcggggatggccttcttctctcccgtcaacagatgcgcccaggttcatatctccagtattcctcatttcatcggcgcgaagtctgttagtgcttcccaacttcgaatgaggcacaaggtcgggtccatcagagcctctgcagcctcgtgcttgcaagatgaaacaacaaaatatttcgattttgtggtcattggcagcggtgttgctggcctaaggtatgctctggaagtgtctaagtacggctctgtcgcaatcattaccaaagcagagcctcatgagagcaacacgaactacgcacaagggcggtgtcagcgcggttctatgcccctcagattctgtagagagccacatgcaagacaccattgtcgcgggggcttatctgtgtgatgaagagactgtcagggtagtatgcacagaaggaccggagcgtgtgaaggagctcattgccatgggagcttcatttgaccatggcgaggacggaaggctgcaccttgcaagggaaggtggacattctcacaacagaatagttcattctgctgatatgactggaagagagatcgagagagcactgcttcaagcagttgataatgatgataacatatctttgtttggccaccactttgccattgatttactcacctgtcagagtaatggtgaaatatattgctatggtgtggattcattggacgctgaaactcagaaggcaattcgtttcatctcgaaagtaacattgcttgcatctggaggagttggtcatatatacccctcaacgaccaatccaccggtagctactggggatggaattgcaatgtctcatcgtgcgcaggctgtaatatctaatatggagtttgtgcagttccacccaactgcactatcagatgagggtctcccaataaaaccagctacaagaagagagaatgcattcctcataacagaagcagtcagaggagatggaggaattctttataatcagtccatggagaggtttatgacttcgtatgatgaccgtgcagagttagcaccgagagatgtggtcgcaagaagcatagatgaccaactgaagaagaggggagaaaagtatgtcctcctggatatcagtcacaagccaagggaaaaggttcttgcccattttccaaacattgcagctgaatgcctgcgccacggtctcgacatcacacaacagccgatacctgttgttcctgcagctcattacatgtgtgggggtgtccgggctgggttgcagggggagacaaatgtgaaaggcctgtatgttgctggtgaggttgcatgcactggattgcacggtgctaatcggcttgcaagcaactcactgcttgaagcactggtgtttgctcggagagcagtgcagccttcaatagatcatatggtcgatgcagatgtcgatccttctttcgcgaagaaatgggctcgtcctgtgctgtctgtctcccttagggacagtatactatctgatatcattgagaagacaaagcaggccaggatggagcttcagtcaataatgtgggagtatgtcgggatagtgcggtcgacgaaccgcctgaagcacgcggagtggaagatcagtgatctggagtcagaatgggaggagttcttgttcaggagggggtggaagcctacaatggtgggggttgagacctgtgaaatgaggaacctcttctgctgcgcaaagctggttgtgaaaagtgctcttgcaaggcacgagagccgaggcttgcacttcaccgaagacttcccttacctggaggagagcaagaggaagcctacagtgatcttccctactcatatccaggagctgacatggagctcaaagccattgcagaagcagctgcagtgcaagtagatggcacacccatacaaattacaaagggagtttgggattgcagattccattaatttattaaaattaggctgaaccagcctgctatttgacaataaacacatgaattcaacctggaattgtgagaagttcattggctacaagcctacaattaggcttgaagtagcatgtatttaacaactgtttgttctaccgttctcatatgattcagctgttgtaagatgtaaacgaggttgtgttctgatctacagagattgtagtattttttttttctaaaagaattggcaggaatcaatttgtagtataggatcaaagatggttgtataaatcgattcgattgaagggatagactcccaactcaatcacctgat

SEQ ID NO: 22200 - DNA, 2285 bp, Oryza sativa
  ref <308>: DATABASE ACCESSION NUMBER: AK072395
  ref <309>: DATABASE ENTRY DATE: 2001-12-06
ggaacgctttagcaaacacgcggagaaggagaatgcgcgcaacctcgcgcgccacgccgcccgtgtaaatctattggtgggattttcccttcggttccccaagaggcggaaggaagattggccggataagccggaggccacggaggggcggtgacgagcagagcggccacggcggccggaatgaagggcggcggcggtggcggcaaggaggccgtcaccgcctccatcctccggttcctcctcctgctccttctccccctcaccgccctctatttcttctacacgctgcacctcctcctcgcctccgccgcctcgtcatcctcctcctcctgcccacctgacgctgcctcctcctcctcctccgtgcgcttgtcgaccaatggcaccagcgcgggtgctgctgcggtgacggtggcggcagggaagaaggcccccgccgcggcctccacggagacgacgctgcagcatgtcgtgttcggcatcgcggcgtcgtcgcggttctgggacaagcggaaggagtacatcaaggtgtggtggcggccccgcggcgccatgcgtgggtacgtgtggctggaccgcgaggtgcgcgagtccaacatgtccacggcgcggacggggctcccggccatcaggatctcgtcggacacctcgggcttcccctacacgcaccgccgcggccaccgctccgccatccgcatctcccggatcgtctcggagaccttccgcctcggcctccccggcgtgcggtggttcgtgatgggcgacgacgacaccgtcttcttcccggacaacctcctcaccgtcctcaacaagttcgaccaccgccagccatactacatcggctccctctccgagagccacctgcagaatatctacttctcctacgggatggcgtacggcggcggcggcttcgccattagccggccgctcgcggaggcgctcgcgcggatgcaggacgggtgcatacgccggtaccccgcgctgtatggtagcgacgaccggatccaggcgtgcatggcggagctgggcgtgccgctcaccaagcacccgggtttccaccagtacgacgtgtacggcgacctcctcggcctcctcgccgcccacccggtggcgccgatcgtgacgctgcaccacctcgacgtcgtgcagcccctgttcccgaacgccaagtcgcgccccgccgcggtgcgtaggctgttcgacgggccgatcgagctggacccggcggggataatgcagcagtccatctgctacgacggcggcaaccgatggacggtgtcagtggcgtgggggttcgccgtgctggtgtccaggggagtaatgtcgccgcgggagatggagatgccggcgcggacgttcttgaactggtaccgccgtgccgactacacggcgtacgcgttcaacacgaggcccctggcgcgaagcccgtgccagaagccggcggtgtactacctctcatcggcgcggcgcgcggccgccctgcgcggcggggacaccacggtgacgcggtatgagcggtggcgccgcgccaacgagacgcggcccgcgtgccggtggaatatcgcggatccggacgcgcatctcgatcacatcgtcgtgctcaagaagcccgaccccgggctatgggacaggtctccaaggagaaattgctgtagggtgctatcttcgcccaaggaagggaagaagggaggggacaagacgatgaccatcgacgtgggagtatgcagggatggcgagttcagccaagttgtgtaatactgtaacctagccaaagtgaaataggatgattcaattttttttctcttctgttcttgtattcttctcggaagattacaaacttgtcatctcctgccgcgtcttcttttcgcctcacgagtcaccaactacaaagaactcgaaattttggccggaccttttccactatacatttgctgcccccacggctacgggccatggctactccggtccggtctacagtgacggaggcggggcacagaagagtgcactagtggatgctcagcgtgcttctgctgtgtatagtagactttgtgctgcagttgcagacttgcagtagtgctgtaaactgtggggctgcaacttggaccttgtgaaagcgcggcctagcattacgatttacgagctccatgtgaccacggcgcaggacagcagacaacagtcgccacgcgtcgtgggatggaaacggaaacgagggtctcgcctctgttctgggggcatggtctactcgtgaaatcttacccgcggcaatacatttcccccttcgtttt

SEQ ID NO: 22201 - DNA, 2223 bp, Oryza sativa
  ref <308>: DATABASE ACCESSION NUMBER: AK072396
  ref <309>: DATABASE ENTRY DATE: 2001-12-06
gcggctcccacttcctttggatgattttatctgcaaagtggttacagagttcaactcttcgctaagatgggctcacctgtgcaaagattagagaggaggagcccttcttgagctcagaggtgcagtgcaggcttgcagcggagttgttcacttgtaggctccttccttaacctgctcaatgtatcatagccgctccaagagataggatcagttcttggctaatgcctaatgatcttgacgaatttgcatcggcagcgactctgttagaatgctcagaatggatggcacggatttgtcttccccaaggtgcaatgttcagcatctacagaatgccgaagaactgaaggatcagaatagcaccaataagaggctgccccggactacagagctcccatgctctttgatacaagaggtccaacaccttgagaagcgactaaatgatcaatttgctatgcggcgtgctttggagaaagcattaggttataagccttgtgccattcattcatccaatgagagctgcattccaaagcctactgaggaactaataaaggagattgctgtgctggagctagaggtcatatgcttggagcaacatctcctagcactctaccggaaggcctttgatcaacaaatttgcagcgtgtcttcttcctgtgacatggaaatcaacaagcagtcagcaaggtcattctcaggtatactcacaggatcttcagaactggatttctcaaccccaaggaaacaccaactcctgcagtccagtggcatggtcatggcacgcaagtctacaccgacaactctcactagcgaaaccagaacttcacattacaatgacaagactggtatcggacgcagccattcctcgctcctgcagcgttccatttgttcagccagagtatctccttcagcaaacaatcttgctagggctctcaaaccatgccatactttgcctctatcctttgtcgaggagggcaagtgcatggatcctggtattgtgagcctggcggatatcctagggaccaggatagcagatcatgttcctcaaacaccgaacaaaatatctgaggacatgatcaaatgcattgcttcgatatacataaggattagggacttcaatgccgtgcaacatcccttcttcccctcaccatgctcatcattttcatcagcgagcgggctctcttccaaatacactggggatatatggagcccaagatgtaggaaagagggctatattgaggcctggcaagacgatgcgttaggaactggcgaatcaagatacttcagtcaacaatatgattctgtgattgaggtgtctgctctttgcaagggggcccagaggtctgctgatgttaaagacatgctacacaaatacaagtctcttgtacagctgctagaaagtgctgatctcaacggaatgaaaaatgaagaaaaaattgctttctggatcaatgtgcacaatgccatgatgatgcatgcccatatagaatacgggattccgcaaagtaacagcaagagaatattgcttactaagttatcttacctcatcagtggccagagagtaaacccggagttgatagagtaccatatcctatgctgccgagtgcactctcctacacagtggctgagactactcctgtacccgaaatggaagtccaaggagaaggaagacctgcaggggttcgccgtcgacaggccggagccgctggtgcacttcgcgctgtcgtcggggagccactccgacccggtggtgcggttgtaccggccggagcgcctcctccagcagctggaggcggcgagggacgagttcgtccgcgccaacgtcggcgtccgcggggggcggcgcgggcgcgggcgccgggtgctcctcctcctcccgaagctcctcgagccgtactcgagggacgccggcctcggtgcgcacgacctcctccgcgcggtggagtcctgcctcccggagccgctccggccggcggcgcagcaggcggcgcggtcgcgcggcggcggcggcggcgtcgagtggaggccccacaacccggccttccgctacctgctcgcgcgggagctcgtgggcccacccgcgccaacggcccacctatcctccacgtaaagtttcacggcccaatgtacagagccttgtaaagttgatattttgggcccggcccaacaaacttggaaagttagttatctgggcctgaaaagaggccgtggcttttggaacgttct

SEQ ID NO: 22202 - DNA, 2210 bp, Oryza sativa
  ref <308>: DATABASE ACCESSION NUMBER: AK072397
  ref <309>: DATABASE ENTRY DATE: 2001-12-06
ggcccgttctagtatctatagctagctaactgttactgtacctcctcccatatatcatcttcatatttttgcagatcgataagcgagaaaaatgggagcacgctgcctcgcattgcttctcctctatggcacgttgctgctgctgttgctgctgccacagctgccgctcgccggcgcggcgacgagatactacaccttcaatgtgaagcttcagaatgtgacacggctgtgcaacacccgggcaatcccgacggtgaacggcaagttccccgggccgaaaatagtcaccagggagggagaccgcgtcgtcgtcaaggtggtcaacaatatcaaggacaacattaccatccactggcacggggtgaggcagatgcggacggggtggtcggacgggccggcgtacgtgacgcagtgcccgatccagacggggcagagctacgtgtacaacttcaccatcaacgggcagaggggcaccctgttctggcacgcgcacgtctcctggctgcgatccacgctgtacggccccatcatcatcctccccaaggccggcctcccgttgcccttcaccgagccgcacaaggacgtgcccatcatcttcggagagtggtttaacgcggaccctgaggcgatcgtcgcgcaggcgcttcagaccggcggtgggcccaacgtctccgacgcctacaccatcaacgggcttcccggcccattgtacaactgctcaagcaaagacacgtttaggctcaaggtgcagcccggaaagatgtacctgctccggctgatcaacgctgcgctcaacgacgagctcttcttctcggtggccaaccacacgctcaccgtcgtcgacgtggacgcctcctacgtcaagccgttcgacacggacgtggtcctcatcacgccggggcagaccaccaacgtgctgctccgcgccaagccgacggccgaggccgccggcgccacgcacctcatgatggcgcgcccctacgccacgggccgccccggcacctacgacaacaccaccgttgccgccgtcctggagtacgcgccaccggggcacatcaagagcctcccgctcctccgcccgtcgctgccggcgctcaacgacacggccttcgccgccggcttcgccgccaagctccgcagcctggcctgcccggactacccgtccaacgtgccgcgccgcgtcgacaagcccttcttcttcgccgtggggctcggcaccaccccgtgcccgggcagcaacaaccagacgtgccagggccccaccaacaccaccaagttcacggcgtccatcaacaacgtctccttcgacatgcccaccaccgcgctcctgcaggcgcactacaccggccagtccgccggcgtgtacaccgccgacttccccgcctcgccgctggagccgttcaactacacgggcacgccgcccaacaacaccaacgtgtcgaacgggaccagggtggtggtgctgccgtacaacgcgagcgtggaggtggtgctgcaggacaccagcatcctgggcgccgagagccacccgctgcacctccacggcttcgacttcttcgtcgtcgggcagggcaccggcaactacgacccgtccaagcacccggcggagttcaacctggtcgacccggtgcagaggaacaccgtcggcgtgccggccggcggctgggtcgccatcaggttcttcgcggataaccctggtgtctggttcatgcattgccacctggaggttcacacaacctgggggttgaagatggcatgggtggtcaacgacggcccgttgcctgagcagaagctgatgcctccgccgtccgatcttcccatgtgctagagatcgatcaatcgttgacattatttgaccaaggctgtgattcgtttattccgtttggtttgctacacataatttgtcaatggataatgccgtacgtacatacctgcaggattgaggtcttgttttccattcttccaaaggtgttgtttattcttgtaaggggtttgccattgttttttttttaaattctacaagtacttttagctcgaaagttcggccgtatatggtcaataagaatagtttgactcttacattttgacacccacgatgggctcaatctcagatgactatattacggactagtattttacaagcgcgaactatgtatgatactggactgttacaacaagaattcatataagatcatataagcttgtagtcg

SEQ ID NO: 22203 - DNA, 2139 bp, Oryza sativa
  ref <308>: DATABASE ACCESSION NUMBER: AK072398
  ref <309>: DATABASE ENTRY DATE: 2001-12-06
gaagaaaggccgaaagcgaaagcggatcacaagggggtagcccgtcaccatcagcgctcacgcctcgcgcacctgcgctctccctcccccttcccggcctaggtgtcggaagcgcggtggggaggaagcgaacacgccgccgtccgggtctcctccgcctcctcctcccgagaatcgacttctattttgcctctgcatccaggttatttagaactctgtattcaggactgcacaatgtctatgatagcagcaactcttcgtcgatcgtctagagtaactggtagtcagaatatcatggagatatgtcttggaccttgtgtatcttctggtgcttcttcaaggtggttcagcagctgtactaagcactcaaacacttccatacttaaccagatcaaggcagttgatcggtattctccagttaatggtatgtcagtgatcagtagggtgcctctttcagctcatatggacacaaactggttgtctacttcaaatcccagatttaatgcactgccaggattcttaggtgcttcaagcatctgccgagcatactcctcagacactgggattaaggcagaagttccacagaatactgtctcaaatgtaccttccacagaaaccgttgcgcttggaacatctgatggtggtagttcttggattgatatcttcgacaatgctcgcaagtgtactctagatgctaccactgatgcaggcaagaaagttaaggagctgactgatgcaattacacctcatgtacaacagttctttgatgcaaatccaaacctagaaaaggttgtggttccacttggcgggacaatctttggtacaatgatggcttggtttgtcatgcctatcgttttaaggaggattcacaagtattcgatacagagtcctatatcagcacttttggggagctcaacaaagaatgatgtctcgtatgaaactagcctctggagtgcattggaggatcctgcgaaataccttatcacatttatggcattttcagaaatggctggattcaccgcaccaagcatatcagcttatcttccacaggcatggaggggtgcaattgttctctcttttgtctggttccttcataggtggaaaacaaacttcatcactaaagttgctgcctcaagtattgatcaaaccaggttgtcagcatttgataagatctcgtcattaggactgattgcacttggagtaatggctcttgcagaggcttgtggtgtagctgctcagtcaatactaactattggtggtgtgggaggtgttgctactgcctttgctgctcgggatgtccttggtaacatgctcagtgggttctccttacagttttctagtccattcagagctggagaatacataaaggctgggtcaatagaaggcaaggtgattgaaataggactgacttctacggaattgatgaatccagaacaacttcctgtcactgtacccaactctctgttctccagccaggtgatagtgaacagatcacgagctaaatggcgatccaatgtgacaaagattcctattagaattgaggatattgaaaaggttcctgccatatcagaggagataaaagttatgttaaggtccaacccaaaggttgtcttagactcagaagcaccagctccttattgttatctttcaagattggaaagttcatatggagagctcaccattggatgcaacctcacgaaaatgacaaaggatgagtggctgtctacaacacaaggcattcttctggaggctgctaagattatcaagttacatggcgttgaactgggaagcaccacgcagtgctgctgattacggtgcttttggaagttctaagtaagtgaattacgttagtcacactcaacagaagtacataggttggtggctttggaacacttctagtgcgaaggcaaggacgtcctttagtctttttggtatcttcagatttcagaccctcgactccattgctttctgttaaccgcgttttttttagctaaggtcaatttccaactctctttaactttcccttcgcttgatatatcatccgctaatagcctaacagagagaagcactgccaatgagccacggtaaacattttggtccgcatgctgataatgtgagcgggtagtttacccctgttcc

SEQ ID NO: 22204 - DNA, 2147 bp, Oryza sativa
  ref <308>: DATABASE ACCESSION NUMBER: AK072399
  ref <309>: DATABASE ENTRY DATE: 2001-12-06
tctctctctcctccccgcgccgccgtcgagatgtttcggagcccggccgccgccgccgcctccgccctcctccgccgcctaggcccccgcgtatccggcggtggaggcggcgcttccactcaccggcgattcgcgcctccggtatccacctccatcctctcccgctactcctccgcgccgacgtcctccccttcgccgccgccaccgccacccccaccgccctccgacgccgcggcggatggggataaccgagcggaatcgggggaacccggctccagtctcagcatcaccatcgaccgctccggcctgtacaatcccccagagcactcgcacgagccgtcgtcggattccgagctagtgaagcacctcaagagcatcataaagttccgcagcgggcctatcagcgtagccgagtacatggaggaggtgctgacgaacccgcagtcagggttctacatcaaccgcgacgtgttcgggacatccggggatttcatcacctcgccggaggtcagccaaatgtttggagagatgactggtgtgtgggcaatgtgcctctgggagcaaatggggcagccagagaaagtcaatctgattgagcttggtccagggcgcggaactctcttggcagatttacttcgtgggtcatcaaaatttgttaatttcaccaaagcactcaacattaacttggtagaatgtagccccacgttacaaaaggtgcaatacaatactctgaaatgtgaagatgagcccattggcgataaaacaaggacagttagcaagctttgtggagcccctgtacactggcatgcttcccttgaacaggttccttcaggattgccaactataattattgcacatgaattctatgatgccttgccaattcatcaatttcagaaagcatcacgtggctggtgcgagaagatggtggatcttgcagaagactcatcgtttcgctttgttctatctccacagcctacagcctctttacttttcctttccaagcggtgcggttgggctagttctgaggaacttgagaaagttgagcatattgaagtctgcccgaaagcaatggagatcactgaacagattgcagatagaattagctcggatggagggggtgcacttatcattgactacggaaaagatggaatagtctctgatagtcttcaggcaatccgcaagcacaagtttgtacacatattggataaccctggttcagccgatctgagtgcttatgttgattttgcatcaatcagacactccgctaaggaagcttcagatgatatttctgttcatgggccaatgactcaatcccagttcttgggctctcttggtataaacttccgtgtggaagccctgctccaaaactgtgctactgatgagcaggccgagtctctgaggacaggctactggcgtcttgtcggagatggtgaagccccattctgggaaggtcctgacgaccaaaccccaattggcatgggtactaggtacttggccatggccattgtcaacaagaagcaaggcacacccgttccattcgagtaaaagaaatactggaaccgtttctcctctcctcaggtaaaataacatcactgccgtgtaactcttatgctgctgatgaattctgccggcgggcagtccagatagataaggacgattcttgtcaaccttttctaatgcacaccatacatggactcgttcagatgcgtgctgttttttttataagaagtgtgtactgctttgtacttgctgcacggaaagaattggtcggtttgacattcctgttactacataggtttcttcgtgcaagatgggatagtggttgtatcaaagtttctggtacaattcctgaatttctactagtgttcaaccttgagatacaagttatgcacattgtttagctgcggagtcagctgtttagaccttgagatgtcatgcattacgcatttgtgcctctgtttggtatatgtgttccagttcactgcttctaaagtctaaagaggctatagattagtatttaaaaccggtttacccgtttcaaaagcatgcttatcttatgtcattcgtgcaaagccttgtatgattgtatccttgtatgccaccaatcagttgaagtcaaatatgtatttgttcggtacaattattcc

SEQ ID NO: 22205 - DNA, 2520 bp, Oryza sativa
  ref <308>: DATABASE ACCESSION NUMBER: AK072400
  ref <309>: DATABASE ENTRY DATE: 2001-12-06
gagtccccgctccggtcactcctcgcgctcgaggatcccaggtcgccgaccgcctcggcgtcctaccggatcctggtcgccgtcgtcgcctgcctcttcgtcgccgctctcgtctccgctccttccgtctggtcacgcatcaacgcgccctatctgtgccgcaaggacgggattcggctccactgccccagggtgaacgagcgggaatctctctgggagaatccgcatgctgcagcggcatcttggaagccctgcgccgagcgccgtagtgatgagatctcagatcttgtaccagagaatgaaacctctgggtatatttttattcatgccgagggtggattaaaccagcagcgaatagccgtacggatgttctttcctcacattattagcttgctgaagctgtgttgtgtaatcagtagttaactgcgatactcgatgtatttgcagatatgtaatgctgttgcaattgctaagataatgaatgccacacttattttacctgtgctgaagcaggatcaaatctggaaagatcaaacgaaatttgaagatatctttgatgtagattatttcataaattacttgaaggatgatgtacgcattgttcgagatattcctgaatggttcacagaaaaagatgaacttttcaccagtataaagttagttgcttccttttcacttattccttctatcttttcttttatcaatcaataagattgatgtgtgcacacactcctagaacatatgaattctggagacaagcaaacaaggtgattgccgctgcttgtttgcggtttgtagttgtctttcattcacacattgcattgtccacatatgtgatgccactatagaggcatctacttcaaaccatgtaggggttagcatgtattatagggtcaaaattagcttattttactataggatgccaacagtcttatacaaccgaaaagtgcaagggcaaaggaaaattgtatcactaggacaggtactgcttatgggcatttttttccttatttattcttccttttttcccctcttgtcatgatgttgaatgattataatatgtttctattttggtcatcactatctgctgtgttttcacccatagttagcagttactatatgtgctatatctataattgattaacactggaacatagtcttccatgaatgtaacttattttatttttgatgctgattataacaggcgaactgtgaaaaatattccaaagtatgcatcggcgcagttctacattgacaatgtacttccgaggatcaaagataaaaagataatgtctatcaagccatttgttgataggctggggtaatgtcttatcatcatgactgcacctcatccatacatcttgagattggttgtataactttttagcgctgttactgtccttgacatcagagtcttttgttgtaaagtgaatattgctcccggttcctcccctaagtatatgccttacaatttcgttcacatcaattgatgtgattgagtgtaacctaagcctgcaatttcaggtatgataatgttccaatggagattaaccggctcagatgcagagttaattaccatgccttgaagtttttacctgaaatcgaagaaatggctgagaagctagcaacaaggatgaggaaccgaacgggcaatgtaaatccatacatggctcttcatcttaggtttgagaaaggaatggtgggtctttcattttgcgattttgcgggaactagagaggagaaagcaatgatggctgattatagacagaaacaatggccaagacgcttcaagaatggatctcacctttggtcattagcactggagaaaagaaaagaaggtcgctgccctcttgagcctggggaaataggtattattttacgtgcaatgggatatacaaaggaaactcagatatatgttgcatccggtcaagtttatggtggaagcaatagaatggctccgctaaggaatatgttccccaatttggttacaaaagaagatcttgcaagcaaagaggagatagaacacttcaagaagcatgtgaccagccttgctgcattggacttcctggtttgcctgaaatcggacgtgttcgtcatgacccacggtggcaatttcgccaagctgatcatcggtttccgccgctacatgggtcggcatcggctcaagtctatcaagccagacaagggcctcatgtccaagttcttcggcgatccctacatgccatgggcaactttcgtggaggatgtgatgatcactcaccagacacgaactggcctccctgagtccacattcccacactacgacctctgggaaaacccccttacgccttgcatgtgtagagcttaaactatagacagatattgattgtgcgtagatattctttgttcatatactgattgtaagtttatatagttctttgtatcacatccatttttcattttacctgttttcttaattgtatcttctaccctacaatgcaccaactgtttttactcatttttcattcttaaaatccaacg

SEQ ID NO: 22206 - DNA, 3251 bp, Oryza sativa
  ref <308>: DATABASE ACCESSION NUMBER: AK072401
  ref <309>: DATABASE ENTRY DATE: 2001-12-06
gagtgaatcaacacgaaaccctgcgtccaccgtgacgctttcctgcatacacctgagttttatatggtatcagagcctcaaagtccggcgtgatggcaggttcctcgtcaagcactgcctccaccaatcctctctttggcgttcaagtttcagagaaactgaccaaaggaaactatgcgctctggtcggcgcaagtcctggccgcgatacgcggcgcccgtcttgatggccacatcaccggcgccaccgccgctccatccatggagatcgagaagacggcgagcgacaagacgacggagaagatcgtcaaccccgcctaccaggagtggtttgcctcggaccaacaggtcctaggcttccttctctccacgctgtcaagagacattctcacccaagtggcgacggcatccacggcggcgcaggcatggcagcaggtgtgcgccatgttcactgctcaaaccaaagcccggtcgctcaacgtccggcttactctcaccaatacccagaaaggtaacatgagtatatctgagtattgtggcaagatgaaagcactagcagatgaaatcgctagttcagggaaaccccttgatgaggaagatttagtcgcttatgttctgaatgggctagatgatgattttgaacctgttgtatctgctattgtggcacgcaatgagtcgaccacaatggcggaagtgtactctcagcttcttaactttgagaacaggcaagctcttcggcaagctcatgcttcggcgaacgcggccgtggtggttttcagcgtggtcgcagcggcggccgtggcacacgtgggcgcagcaatcctgctgctccaggacgtgggcgcggcactggaggaaatcagactcggggtggtaatgaccgccccatctgccaagtgtgcctgaagagggggcacatcgctgcagagtgttggcataggtacgatgagacctatgtccctgatgaaaggagtgcggctgcagcagctgcatatggcatcgacaccaattggtacctcgacacaggggcaaccgaccacatcaccaacgaactcgacaagttagatgttcgggagaagtacaagggaggagacaagattcacaccgcaagcggtgcaggtatggaaattaagcacattggtgattctgtcattcatacccctactcgtgaattacatctcaaaaatattttacatgttcctcaagcgaaaaagaaccttatctctgctcatcgtttagctatggataattttgctttccttgaggttcattccaattattttttgataaaggatcgagccacgaggaacacgattcttaaggggagatgccgccgtcgcctctactcccttcctacatcacctgccaagcaagtccatgccgccacaactccttccttctcccgatggcatagtcgtttgggacacccagccgtgcccatagtcactagagttcttagcaagaataatttaccttgttctaccgtagcaaataaagactcaatttgtgatgcctgtcaaaagggcaagagtcatcagcttccctatcctaagtcttcaagtgtgtcaagtcaacctctagaacttattttttctaatgtctggggccctgctcctatttctgttggtggaaagaagttttatgtcagttttattgatgattatagtaaatttacttgggtttaccttcttaagcataagtcggaagtattccaaaagtttcaggagtttcaaactcttgttgagagattttttggtcacaaaattcttgctgttcaaacagattgggggggagagtatcaaaaactcaacaccttctttgctaagataggtatctctcatcatgtttcctgtccttatgctcaccaacagaacggttcagctgaacgaaaacatagacatctcattgaggttgcactcacattactagcacatgcatctatgccaattaaattttgggacgaagccgttcttgctgcggcataccttattaaccgcactcctagcaaggttatcaactttgcatgtcctttagaacaattgttcaaggaaaaaccaaactatacagcattgagaatattcgggtgtgctgtttggcccaaccttcggccttacaataaacacaaattagctttccgttccaagagatgtgtttttctaggctatagtaacctacataaagggttcaagtgtctagaaattgccacaggcagagtctatgtctccagggatgtaacctttgatgaaagcatttttcctttctccgaactccactcaaatgccggcgcacgccttagagcggaaatatctctccttccaccatccttggttccgcatctttcttcattagggggagaacagaataaccatgtgcttaattatccgcctaatgttactgatcagtttggtgaagaaaatgcagaaatcggtgaagaaattgtagcaaacggtgaagaaaatgcagcagcagcagcagatgaaaatgcagcagcagcagcaaatggtggtgcacaggacgacgtgcatggtgtggcatatgatgcgtcgccggagcactcttcgcctgtgacagatgatgcgatggcgtcggcagctgagcagcatggcaatccaatccaggaggagcacctggtgcaggcgtccccacaaacagcgtcgtccacatcgccatctgttgcatcatcggctggcgtgcatgatgatgtgactactgatcagtctgatcaaactgatcaggccatgccagaagcagctgttgcaccgatcagaccaaaaacacgtctccaaagcgggatcaggaaagaaaaggtatatactgatggaactgttaaatggctaaattttacttcttctggtgaaccacagagtctggaagaagcagtgaataataaacactggaaggaggccatggatgctgaatacatggcactgatagaaaacaagacatggcatttggttcctcctcagaaaggaagaaatgtcatagattgtaaatgggtgtataaggtcaaaaggaaagcagatggcagtctagacaggtataaagcacggttggttgcaaaaggattcaagcaaaggtatggcattgattatgaagatacttttagtccggttgttaaagctgctactatcagaatagttttgtctcttgctgtctctagaggttggagtcttagacaattggatgttaaaaatgccttcctacatggagtcctagaagaagaggtctatatgaagcaaccaccagggtatg

SEQ ID NO: 22207 - DNA, 2535 bp, Oryza sativa
  ref <308>: DATABASE ACCESSION NUMBER: AK072402
  ref <309>: DATABASE ENTRY DATE: 2001-12-06
ggccgctgcgccctccccctctctgtccacgttcccccaccccacctcggcctaaaaccctagccgccggcggagcgggacctcaccggcggcggcgatgagcgggggcgggccgccgaagaaacgcaacttcaagatcgagctgttcaagcaccgcgtggagctcgaccccaagtacgcggagcggacatggaaggtcctggagcacgccatccacgagatctacaaccacaacgccagtggcctctccttcgaggagctctacaggagtgcctacaacatggtgctccacaagtatggtgagaagctatatgatggcctggagagaactatgacatggcgcttgaaggaaatatcaaaatcaatagaggctgcacagggtggtttgtttctggaggagctgaatgccaagtggatggatcacaataaggcattgcagatgatccgagatattctaatgtacatggatcgaacatatgtcccgcaatcccgtagaacacctgttcatgagcttggtttgaatttgtggagggatcacataattcactctcccatgattcatagtcggctgcttgatacccttctggatcttattcacagggagagaatgggtgaaatgattaacagaggcctgatgaggagcataacgaaaatgttaatggatcttggtgctgctgtatatcaagatgactttgagaagccgtttttggatgttacagctagcttctacagtggagagtctcaggagttcattgagtgctgtgactgtgggaactatcttaagaagtccgagagacgtctcaatgaggaaatggaacgtgtctcacactacttggattctggcactgaggcaaagataactagtgtggttgagaaagaaatgattgccaatcacatgcatagattggttcatatggaaaactcaggccttgtaaatatgcttgtagatgacaaatatgacgacttggctaggatgtacaacttattccgaagggtttttgatgggctatcgacaatcagagatgtgatgacttcatacctaagggaaacagggaagcagttagtgacagatcctgagaggttgaaagacccagtggaatttgttcagcgcttgttaaatgagaaggacaagcatgataagatcatcaacgttgcttttggcaatgacaaaactttccagaatgctctaaattcatcctttgagtacttcatcaacttaaacaacaggtcacctgaattcatatcgttgtatgttgatgataaacttcggaaaggattgaaaggagccacagaagaggatgtggaggttattctggacaaagtcatgatgctgtttcggtacctccaggagaaggatgtatttgagaagtactacaagcagcatttggcgaaaagactattgtctggcaaaactgtttctgatgatgctgagaggagtatgatagttaaactcaagacagaatgtgggtaccagttcacttccaaattagagggcatgttcactgacatgaagacctctcaggacactatgatagacttttatgccaagaagtctgaggaacttggcgatggcccaacacttgatgtccacattcttacaactggttcttggccaacacagccctgccctccctgcaaccttccaactgaaatccttgcaatatgtgataagttccggacatactaccttggaactcacagtggccggagattgacatggcaaacaaacatgggaacagctgacataaaagccacatttgggaaaggtcagaagcatgaactaaatgtatccacttatcagatgtgtgttctcatgctgtttaattctaccgatgggttaacctacaaagacatcgaacaagatactgcgatacctgcctcggatctaaagagatgccttcaatctcttgcttgtgtcaaggggaagaatgttctccgcaaggaacccatgagcaaagatatatcggaggatgacacattctacttcaacgacaagttcacaagcaagcttgttaaggtcaagattgggacagtagtggcgcaaaaggaatctgagccagagaaacaagagactcgtcaacgggttgaggaggacaggaaacctcaaattgaggctgctatcgtcaggattatgaaatccaggagggtcttggatcataacagcattgtagctgaggttaccaagcaattgcaagcccgattcatgccgaatcctgttgtcataaagaaacgcatagaatctctaattgagcgtgaattcttagagagggacaaagcagataggaagttatatcgctatcttgcatagaaggtcattatgtgattattgatgagcaaatggcttgtattcatgtaaaacggtttccatgacgtttgagttcagttttattcgttccactttgtccactgaatcatagctacttctcgtttcccgtaggcaagctggtgttcagagttttccagctaatactgatgtcatgttacgagttgctgctatcttaatataatggagatggatcgtcaaattcacagccg

SEQ ID NO: 22208 - DNA, 2294 bp, Oryza sativa
  ref <308>: DATABASE ACCESSION NUMBER: AK072403
  ref <309>: DATABASE ENTRY DATE: 2001-12-06
gaccaatccatctctcttctctctctctctctctctacaacttctcagctaagctaagccaagctagagccatctagctacttttgctgctttctctctcctcctgcaacacacgacctagctgagagctgagctgagttgcgccggccatggcagcatcgcagaggagcaggagcacggcggcgcagctcgacgtcgacgaccaggcggcggccgatcagctgatgacgatgatgcggcggccagcggcggtactacaggatgaggccgccgccgaggaggaggcctccgcggcggcagcggacctgcagctggagctccggcgagggccgtggaccgtcgacgaggacctcaccctcgtcaactacatcgccgaccacggcgagggacgctggaactccctcgcccgcgccgccggtaatctaatcaaatcaagttgtagtcaatcgattcgatgtcgatttgattcgaattatatatggaatcgatgaaaatcgatttgatgtttgtgatcgatcgatcgatgaagggttgaagaggacggggaagagctgcaggctgcggtggctgaactacctccggcccgacgtgaagcgcggcaacttcaccgccgacgagcagctgctcatcctcgacctccactcccgatggggcaaccggtaattaattaattattaactcacccattattccgctcgctagttaattattacccgcttcgctcataaatatttgacgtttaggacatgatctgttgaaccaattcgaaaccttttatggttcgattgacacaacaaaaaaaaccctccaaataaattggaggaaattaaattaggaggcttggaaaagaggcatgtaattataattgattaattaaaatagtttatttgtgggcatgtaaatcactatatcaggtgtaatttaatttgtaggctcattagctagctcttgatggtatatatatggccatcaattgtggaccatacatggtatgtgtgcacacgtcgcatgtcacgtgctgtatttaatatgtacacatatacatgtggccacacacacttggatgccacacaaaaacatactttgacaatattagctttagatatgacacaatagttcaagatactagcacagttcatattgtacaagtcttctatcgctacagaggaatattaattattatgcatgcattattggttttaattaattgatttgcaaacatatatatggagaaaaagatagatacaatgatatatacatcaagctaaagcttctagctaggccggctagctaagcatgtacaaccaagatgcctctcactttcacataaacagagtgcatgaaagctgcacgggttttaaagctgcacgtctctcttccttccctccctctctctctttctctctctctacatatatctccactagtctagtgccacacaacttagcttatattgtactctttttcttgtgtgttccctaccatcaatttttttctaattacatttcgatcccattgggggtgtgttgattatctgcaggtggtcaaagatagcgcagcatttgccagggaggaccgacaacgagatcaagaactactggaggacccgagtgcaaaagcatgccaagcagctgaactgcgatgccaacagtgctaggttcaaggatgctatgagatatctatggatgcctcgcctcgccgatgcaagccagctcggtgatcaccatgggtataatagtaccactgccatgggcgatgctcatgggatgccagtgatgacatcgtcgtcgtcggactcgttcgcgacatcagagtcatacgatgggggcctttatgcaaatgtgcaggacaatgagatggtgaatggtggggactactggatgcagggagcaaataaagggttttgtagtaattatgagtcagagcaacttcatcctcatgagcatagccagtttcaggatccagatcttgttggttgggttcaaggcttttctgagggcatttccgagaatttttggagcttggaggacatttggaagatgtagtgaattttgcattaatttgtattgtggctatatatacacatacgtacaggagtatacattttataatattgattgataactcgtggaacaaagattagagtcagcttattctaacttcaaaagttactacgagagaaaaaaagtaaatttcttctttgattttcctttttttttgtatggatgtcgattgacacatatgtatatgttgtcccaacaatgtaaaacatataagaagacgtgattgttacc

SEQ ID NO: 22209 - DNA, 2270 bp, Oryza sativa
  ref <308>: DATABASE ACCESSION NUMBER: AK072404
  ref <309>: DATABASE ENTRY DATE: 2001-12-06
gatcggtccgttggccacgcgatttctcaggcgcacctccgccgcaacgcgagtccccccaccgccgccggccgcggcgcgccgccgttctgacgctccacggccacatgaactgccgccacctcgccctccggctccgccacctccgccgccttctcgcggtcgcacccctttcctcgctcgcggccgcgcactccgctaaccgctcctccccacggctaaaccccacttcggtgccgccaccgccgcggcagctgcatctcccgaccctccaggctcgacggctctgctccaccacgcacgtcgtcctccccacaaacctccaggacgagcggttcgcggctctctcggataggatctacgacgccgtgattgagaccgcggcgggttccagcgagggcacggaggcggcccttgacgcgctgggcgccgagctgaccaccccgctcgtcgccgacgtgctgcatcgcctccgttacgacgagaagctggccttccggttcttcgtctgggcgtctcaccaggacggctacgagcacgaggccgcgacgtacaacgacgtcatcgacatcctctccggcacgcggtacaaggcccgccagttcggcgtcctctgcgacgtgctcgaccacatgaagcgccgccgcacaaggtccgtgccggtcgacgacttgctgggtatcctgcgcgcatacacggagaagcacctcacgcatctcaggaagctggctaagaagcggcgggtgcggatgcgcacgccgccggagaccgacgctctgaacgtgctgctggacgccttctgcaagtgcgggatggtccgggaggcggaggtggtgttcagccgcgtgaagaggaagctgctggggaatgccgagacatacagtatcctgttcttcgggtggtgccgggcaagggaccccaagagggccatgaaggtgctcgaggaaatgattcagatgaagcacacccctgagaacttcacttacaatgctgccattgactcattttgcagtgctggtttggtctcagaggcaagggatttgtttgagttcatgagaacagaggggtctacaatttcatcgcccacggctaagacatactcgattatgattgcggcgctagcaaaggctggtcagatggaggagtgctttgaactgatttcagaaatgagaaagtgcggctgtatgcctgatgtgtcgacatataaagacttgattgaaggcatgttgttggtggataaactggatgctgcttattgtgttttagatgagatggcaaaggctggctttccccctgacattgtcacttacaattgctttctgaaggtgctttgtggtcttcaaaaggctgatgacgcgcttgaactctgtgaaaggatgatagaggcgcattgtgagcctagtgttcatacatataatatgctaatggtgatgttctttgagatgagagagccagatagggcaatcaatatttggatcgagatggacaagagaggatgccatcgcgctgttgatacctacgaaacaatgattgatgggctgtttgattctggaagaacggaagatgcgaccgctcttctagatgaggtaataaaccgtggcatgaaactttcgtacaagaagtttgatgctatcatgttgcggctatcagctgtaggcaaccttggcgcgatacatcggttgtcagagcatatgaggagattttacaatgttgcaatgtctaggcgttttgcaatcacacagaagaagaagagcataggtctgagaaggaaatgaatatttcgagatttcttgttagtgcagatgatcaggagtttatatgaggttagctaattattggtttattattgcagcaattggttgtcacttgcaaatgtattaaaatatttcctgggtcctatataggttcagtgttattttaccaatttgtctaggagtaagttgcatctgtgaaatgctttgactgctggttgcatacttgaatagaaacttgcatgtagctaatagcaacacaacatcactcttatgtaccttcaacatagaaaagcacaattagttacatttttggtagctccaacactttgcagtgtgtttgtttcgtgcaatcagcataataatggctaaattggcgaagcaaacaaaaatatttcaatcaattgttcttatcttacctgcatttcctggtagcatttgtttggcaagtggcaaccctcacatgtagaccttatgatttccttagttctgcaggaaggatatgatcccagtttcacc

SEQ ID NO: 22210 - DNA, 2282 bp, Oryza sativa
  ref <308>: DATABASE ACCESSION NUMBER: AK072405
  ref <309>: DATABASE ENTRY DATE: 2001-12-06
gtcctccgcgtccatttccatcacgctccactcgcctcgctgcagcaacctccttcgctcgagagagagagagagagagagagagagaggcacagatttttgggttcgtttttgaagtcctcgatccagccggcggaggggcgccggcggggagcggaggccgccgccgctcgatccgggttttgaagtggacgaggaactgcttttatggtgggaagttgtagtctaggaagtgattgatatttgagcaattagtccgttgtcagggttgtaacttgtaagcaacatggagggggcggttgctagcaatgtggagcttgattctgcagtcttccaagtatcctcagcccagaacagatacgaggcaattgcttgcagtaaagggaatacagaattgattgcatctggtccttttgatcaattagtcctgcacttggaagatgctaggaagttccaatcgtgttcaacagctggcacttttaagctgtcgttgtctgggaatgcaaaaggatcttcctggttcacaaaatccaccatagcacggttcctgaataccataaattcaccagatgcctcaaaatctgcaaatggaattttacatgaaatctcacaactggaggaaactagaaagtttcatcaatctctctattctaaggaggtgtctttggtaccattggcgtagaacaacagggaaatgttggcccaaactcatctgaagcaacaaagaatgaattgcttcgagctctggatttgaggttgactgtactgaaagaggagatctttgcgttgttgaatagagcagtcgtttccaatatgtcaactagagatgtatctgatttatcctcatttgttcagcacttcggtgcatcagagttcagctggttgatgcggtgcctactgttgatcccagactgccaaccctctgaggtctcccaacagcagtctttccctgccgagaaagatgacaagggagaaaatgcacttcatactcgtaatatcagctctcataccattatccagaggcctattaccaacaatgtttccccagcaaagcttgctcaaattgagcgtgaaagctcaactgaaagtgatgattcttctgagtccagtgctgaagatgaggctgtcgttgaaagaagccggccactcatgaggtctgcttcacctaggagatctgcttctccaatgcgaagggttcaaattggtagatcaggatctcgtaggtcaacagcgattgccatcaagagtctcagctatttcccccctagtcaaagaattcctttggataaagatgatgaaagtggcagttgcaatggtgaaactgaccagccttcaaggaaatctgacaataatgtaagaaggatgagtgtgcaggatgcaataaatctcttcgaaagcaagcagaaggatcagaatccggattcgcaaaataagaaagctggcttgtttgctacaaagtcagtactaagaaggtggagtgcaggaatgggtgattccttgaacaataattcagaagaaaaaaccatagattccacatcccaaagtaaatccaacaatacaggatccgattcagagaaggatggagctgaaacacaggctgagccaggttcagcttcagcttctaacactgttgttacgccttctgttgaaggttttcacactaatatgcaaggtgttgcaatgccagaaacagagacagcggtttcatcccatactgaaatttctgctgagcagacaaagtcggggcaagaggaaaacagtgatcgggcaatggcctctgctgagtggaaccgccagaaggaagctgagcttaatcagatgttaatgaaaatgatgcaagtcatgcctggaaagttttcgagtgctaatgtcaccactactggcatcacttccacaaatgagaagaaaggtggactgcaaggtcagcataaagagaagcgagactcgaaagttcgaaccgataaaggtggaaggcggccagcaaaggaggcaagcactaggcccttgaaggaaacagttgggcagaagaaggcagcaattacccccaaaactggcactgcagctgagaaacgcaattctccagttccacaaagggcacggagaaattcatcacctccggtcctaccaaaagaattgaccccaaaagcgcctgccagaaagagctcacccaaaccatcacctgcacctgtgacccgcagttcatggtcaggtggatctttgactaaagcaactactgcacagaaaactaaaagctctcctgggacagtttcagcaccgacagc

SEQ ID NO: 22211 - DNA, 2588 bp, Oryza sativa
  ref <308>: DATABASE ACCESSION NUMBER: AK072406
  ref <309>: DATABASE ENTRY DATE: 2001-12-06
gaatcttcctatcctttgcatagcgtcgtactctccccctgcgaagaaagaaaaagctttttctttttcctcccggcaaaccctagatcggcgccgccgccgccgccaccggggtactctccccggccggccagcccccgtcgattcggctctctggaaggctggcacaccggatccgcgacgtcgggggatggtgttctgctctcgccgtgggggagagtgtccggcgccggccggtgcgctggagaagtggaaatcgatctcctcgccggccggcggcggcggcggcttttcttcgccggatgtatccggtgacggttatttgattcttgtctctgttttctcttttttttccttgtatgtataaacgatttattttctcaagatagagaggaaaagctctgtatgctgttcttccgatggatagcgaccgtgcgcttgttggagcggccaaaggcgccggcttttccgccggtatggtcttgtcgcatatgacatccgcctgcgattggtgatgcctcatgaggtcaactctttttttttttgtcgagagtatttgatttgaaggggactattttttcgagaggatttggacttgaagagaatgaggacgtgcgatgattgaagtttcgggacctgaatctcagtcgggatggtcattaggcgagagaattacaaagtgattataatcattatatggcgtgatttgtaggtccagagatccgtatttctgtggcttgagaagcatcatgctgttcggactttattggaagttgtcattatattttgttggcatatcactggcaatatacaagtgttattacagagtgaactaaaatggagatggtcattctattgttctgtatttatcatgcggattttgctcgcgcacaaggattttgaaagcatgttcatcttacaagttggagaatattttcctttcatgtccatattatttgccagcaccgtgcacagacaagtcgttgttaacaatggaggttgtccaatcatcacggaactccttttcatgtgatgctacgtggcaagaacacaaatagatatgcaatgttgggtaacataacaaagaacattatgtgagaagatttctctatggttcctagttggatgagctggaattatgtgagaagaatattgtggtcttcgggctgttcgctgctttctgctagagaagtttggaagtatctacagttattttgtggtaaaggagaattgttgggtggtgagttttatgcagcgaaggagatcgaacatgacatcctatgaggtttgctgggaaaggaaatttaaataaaaaacatatagtgattcttctcagaattggttcgagttgtatactttgctctcaatggaattatggcagaagcccactggctataaattgatgcaatcagaagctacttctagtgctacctatttaattagtgcggattggactataacagagagctgcaaattatcatacaaaataacacttgaagatggtgaagtagatgtgtactggttgaatactatgggccaagaattcttgtatgaacaattgatattccacaaagaggagttcgctacagtttgggtttatcaaagtactagttttatcaaaagtaagggcagtggcagggttgtcaccattgcagcaagtacctcatttaccaactctataccattgccactacagtattggaattatgggtctgtgtggaaattacagttctgttgtatggtctttctgatcagtgtcaaacaagcttgcggcgcctatggatatcttggatgaaaacttggaagaatctgatccagcaagatgaaagatgtggcctgttcattcaaaatatgttcagaggctgtgtaaatcaaatggatgaattgtgtcttagtgcacctgatctacaaatgccatgggatcctggtggtttatgtttactcaagtttctagctatctcttctcttggacaaatcacatttcaggcagtcaaattctcattgcaagacagttctctctttcacatgcgaagtgccaggatttgcttgagctgttcttttgagatgcaagttttctgttggcacgctgaaaacaaattggacattaatgaagcttttggaacgatgcaagaatactagagaaatcaaagtggaggtttgccatttctgaagtttacttgtcatcaacttatggacaagtcagtttcaaggagaggagattgtcaggaacccattgggctgcacatgggctgactcaattgctaatccatgccaagggccaaacaaacaaaggagagggatacaaaaggcagcagcaggagaacttcaagcaacgaacagatcaggcatcagcggcttcggccacggcggcggcttggttcggttgaacctcgtcgatctctatctctttcttactctctcgtgttcctcttcactgccatttctagaagcttcctctacttcttctcactcaatttctcttctattctctgagtttgtattgaattctattgttcttgagaacaattagtttggaggaagagggttgttaacaatggcagacaaaattaaacaattcgcacatgctc

SEQ ID NO: 22212 - DNA, 2497 bp, Oryza sativa
  ref <308>: DATABASE ACCESSION NUMBER: AK072407
  ref <309>: DATABASE ENTRY DATE: 2001-12-06
gaaattgaaaaaaaaaagaaaaaactcccgtctcgtcgtctccgctccttgcgagttcgcccaccgccgccggcgcgccgatttccatctcccgagcaaagcggggggagggccaccgccgccgtcgctgtcgtcctgctgctcccgccacatcccgagatggagtcagtgccactaactgctgaagctattgcttttaccgagaaaaagatggacatgactttagatgatattattaagatgtcaaagaaaaagaatcctggaggcaagaaacctgctagacaacctatcaagaaacgtccattccagaatgacaacactaatcaagggaatgcaaaggttcagcgatttatggaaactagatcgtccttaagacaaggggttcttgcacaaaggaggacaaatctgggtggaaatcagttcgcagctacaaagcaggctgcaaagaaggctgctacaatgccaatacgtagcaggggtgtcagatggaacaagccaaggtaaacgatggttcttttattgcttatgagaaggtttactgcattcaagaacttgttaaatatttttgacaaatgcacctgtggatacatgacctgagattgatcagtgctggtgtttgcatgcaactactgtattagattcaccactattggtgttcggttggtataaagcacatgcaagtttaaagttcaacagacactcttggggtatatggcctattttttggttgaactgatagaaacataatggatatgagttggagtaagctgatcagatcatactgggttgaacttgatttgtatgccaaaatgtcatcactcatcacaagcattgagcattttgcctttttcttttctggctgtgctggtcaagtttatggaatttgaaaggaccttggcatacatcagttattgcctggcaatcaatatggcaaatttttgatgtatttatggcagctgggtgactgctgcttggggaggtcagccaaaactctttgtgagggttcattattctcacttgtttggtgatctctagcatctccccatagctgttcatccccgatactggttatggattgatatgctgaagttgaatgactttcaactatgcgctgcatggtgtggatcaatggtttttattttgctttgacaacggaagtgtgaatctagcttgtagtgttttcagcaaagctgtgatcatctatgttttggagtaaactctgctgctggtctcactcctagttggccatatgaaccggtgtactgctgtgcattattttgagtgtcctcttgttggattttggacatcaggtgctatgtgctttctattttatatgccccgattagtggttcccaacagtgatattccattactcatctgaagatcttggcatatcatgattttgcttgttaagagtgggtggattctctagcattcttggttggtcctggaatgacgttcccaagtgttgactggtacctcattggttcaagcaagcaataaatcacaactattgggatttgggacatattgaactcaaatttggtatgaggtaacaattaggatgttgagggccttgtgaaccatggtgcaccatgtatttgccctcattgatgtaatggtcacatttactgtttctgcttggtattgttgtatggtatgtacaacctgactttaaaacttaagaggggtatggtgagttggtttgaccactttatgtagcatataggttatggaaacatactgcttttggtactctgttgcatacaacaatatctgcctgagcgaatttttgcctttgtgagctgctaatgttttgtcctggatgcagtgccccatctaactcaatacagcggaggcctgtaggacaggcttttcagaatgggaaggggaaggaggtgcagaacaaggcaccaaggacaatggatgcgctctttgcacaaatgaagcagcagaggatgaggaccattccacagcagcagacgaatactgcccctggccggcagattgcccagcagcggcgtaatcagcaacagcggcgaggaagaggatatggtggccgcaatggtggtaaccaatgagttcaaccacatcaaatgtccttcatgggagcattttcagttcactggtttcttgggtgggagaagaacccctggaatgctaacttggcttctttgttcccttgtattgttaggagagtcgcggacagaatcttactgaagtctgtatgcagtttttctggtttcctatttctgcttcagcttgtataatgtccgatggagtgtatgaaaatttgcctttttgtgttactagttgcgatgttatatttggcatgcttgtagatagttataggttgatgtgtgctatcggattttacagtgtcggttcagtttttgaaagtacaggaccgacttctgtgttagtttcagtattggtgttagtttccgttggtgacacaatcatttctctcagtagggaaaagaggaaacattgggcc

SEQ ID NO: 22213 - DNA, 2233 bp, Oryza sativa
  ref <308>: DATABASE ACCESSION NUMBER: AK072408
  ref <309>: DATABASE ENTRY DATE: 2001-12-06
gagttagattgcattagctagctgtagaaagctagccatggttagtaggaagagaggaggaggaggaggcgtggcaatggcggtggcgatgctgctggcggcggcgagcgcgtcgcggccgtcgtcgtcgctggaagggttccagccgctgtcgaagatcgccgtccacaaggccaccgtcgacctccacggctccgcgttcgtcagcgccacgccggcgttgctcggcgaccagggagaagacacagagtgggtcacggtgaaatacggctgggcaaacccttccgctgacgactggattgctgtcttctctccggccgatttcatctcgggttcttgccctaatccttccagatacccggatgagccgctgctctgcactgcaccaataaagtatcaattcgcaaactactcggcgaactacgtgtactggggcaagggcagcatccggttccagctcatcaaccagcgctacgacttctccttcgccctgttcaccggcggcctggaaaaccctaagctggtggcggtgtcggaggcgatatcgttcaagaaccccaaggcgccggtgtaccctcggctggcgcagggcaagtcgtacgacgagatgaccgtcacatggaccagcggctacgacatcagcgaggcgtacccgttcgtcgagtggggcatggtcgtcgccggcgccgccgctccaacccgcaccgccgccggcacgctcaccttcaaccgcggcagcatgtgcggtgagccggcacgcactgttgggtggagagaccccgggttcatccacacagctttcctgagagacctgtggcccaacaaagagtactactacaagattgggcatgaactttctgacggatcaattgtctggggcaagcaatacactttccgggcgccacccttccctggccagaactcgctgcaacgcatcatcgtcttcggcgacatgggcaaggcggagagagacggatcaaacgagttcgccaactaccagccaggatctctgaacacgacggacaggctggtcgaggatctggacaactacgacattgtcttccacatcggtgatcttccgtacgccaatggctacatctcccagtgggaccagttcaccgcccaggtcgcccccatcaccgccaagaagccctacatgattgcaagcggtaaccatgagagggactggcccaacaccggagggttcttcgacgtcaaggactccggcggcgagtgcggcgttccggcagagaccatgtactactacccggccgagaatcgagccaacttctggtacaaggtggactacgggatgttccggttctgcatcgcggactcggagcacgactggagggagggtaccgaccagtacaagttcatcgagcagtgcctgtcgacggtggaccggaagcaccagccgtggctcatcttcgcggcgcaccgcgtgctgggctactcctccaactggtggtacgccgaccagggctccttcgaggagcccgaagggagggagagcctgcagcggctgtggcagcgccaccgcgtcgacgtcgccttcttcggccacgtccacaactacgagcggacgtgcccgatgtaccagagccagtgcgtctccggcgagaggcgccgctactccggcaccatgaacggcaccatcttcgtcgtcgccggcggcggcgggagccacctctcggactacacctcggcgatccccaagtggagcgttttcagggaccgggacttcgggttcgtcaagctcaccgcgttcaaccactcgtcgctgctgttcgagtacaagaagagcagcgatgggaaggtgtatgactccttcaccgtggagagggattaccgcgacgtgctcagctgcgtgcacgacagctgcctccccaccacgctcgcctcctgatgaatgaaacaagggaaaggatcattattaggatgcatgagttgatgcctcatcgtcaaaatgctggcagctgagaaagagtgatcggtcggtcgatcgagttgggttttattttttttcttcttcttcaaccatttcgatcaggtgtggtagtggtcgatcgcttggctcgatcgtgtttctcttcctcatggatggtgatgttgtgcaataaaattgcttagctgctcgggcacaaatgtctaataagattggcaatctgaatttctgagtccacacaatgcccataaatgaataaattatagaaacaactatttacgccgg

SEQ ID NO: 22214 - DNA, 1893 bp, Oryza sativa
  ref <308>: DATABASE ACCESSION NUMBER: AK072409
  ref <309>: DATABASE ENTRY DATE: 2001-12-06
gactgtgaactcccccctctcgagaaaaaaaaaaaagatccaaaattttttcgcccttgggttcgaaatcttcgtgccttcctcctcctcgcggcctccaattcgaacgccccagttgctcgcgccgccgcggattccccagatcccacctcctccccagctcgcgcggcccaattcgaaggcggttctagggtttcccggcacgaatttagggtttcgggggagcttcggggggtgttgttccttgttccgcctagggtttggaatttggggggcgtggagagatgggataaggagggtgttgggagggtgggagctttgcttggggtgtgtgtgtgtttgggtggtgctgagctgagctagggtttggtggtgaggtgctgaggaagggaggtggggggtggaaaatgttctactcgcagttcatcttggccaagaaggggcccctcgggaccatatggatcgcggcgcatttggagcggaagctgcggaagaatcaggtcgcggatacggatatcggcgtctccgtagattcaattatattccctgaagttccgattgcacttcgattatcaagccatcttatgcttggtgtggtcaggatctattctcgcaaggtgaactacctattccatgattgcagtgaagcgttgctgaagataaaacaagcctttaggtctactgccgttgatcttccccctgaagaatcaactgctccttatcattctataacacttccagagacattccatctggatgattttgaattaccggaggctgcatttcagggtgacattgatcatcatgtaagcacaaaagaacagatcaccttgcaagacaacccagagaaaactggatactcaacatcccaatttggcttagatgaaagatttggtgatggcaattcttcacatattgggttggatttggaagaggaattaatgctgaacaaggaccagtcaattcaacttgaggctgatgatggcattattattcaaggtcgatcagcagttcatcctaccgatatggaagttgatgataaccaaaataaagatgaaagcgctgaaggatacaacatggaggatggaccttccagtcacaacaaactaaatccgttaagtgcagatggtctagtaggaaacagtcttcctaattggcatacatacaatgtgcaaacgcctgatctgaatgatatgctattgaacaatgatgggaatgcaggaccatcagcttcatactatcaacctagtcccttcccttgtgatgagcctgcatcaccagagtttgtaagtgcccaggccccggctacacctggcctaatggaagagactgttccttccagagtgcatgaaagtcctgttctgagtccacagcgaaaagcttcaccatcaagcaatgatgaaactgcaaagacagctgaaaatgctaatgatcttgtgggtgctgagacgactgaacttgcattgacaaagcctgtgcaaattgaatcttctggtgctgtacaggagattgattccttgagtcaacaatgtgcaactgaggaattgccaccccaagctgaaacctcaaacttggaagctaccatggacaagtcaatgataaatactgatggtgtagctgcatcaggtgaagctacagctgctaaagaaaccactgaagtgtcattggttgaaaattctttagagctatgcgctgatggtcctactgaacctgtgattgagaaccaaacacagtttaatgatggatcagttgatgtgcaagggggcggtcagcatgcacctcatgctatcttagcaactgcagattcccaagtgaatgtagaagcatcaacacaagaaatggcatctaacgatataccaagtgacctaccaaccttggaatttccagaacgtg

SEQ ID NO: 22215 - DNA, 2655 bp, Oryza sativa
  ref <308>: DATABASE ACCESSION NUMBER: AK072410
  ref <309>: DATABASE ENTRY DATE: 2001-12-06
gacgcaccactagcaccgtatccatatatatacaacgcacttacccacccatgagtcgacgagtttatctctttatcgtacgtctaaagattaaaaaacattagttttgtattaaaaacatactcacctatatgtaacatttgattatttatgatcactatgatttaatccttacaaattgaaacacgtggtacactctaattaaactggtactttagttgtaggaagttatcaaaagtcaacaacacaaaaatacggtccgcttttcaggagctctttagttatgggtaaacaatttgtacagtacggaggggaaacatgtgtacatatgaaatataaaaccatttgttaccaccgttaatccacctttttttatgtttaccttgatccaacaaaagaaatattccaggacctaacatatattagaatagagagggtttcaggtcggcaaaacaacacagtacactgatttcgcaactaacaccatctagttgccgtgtgggggcggcgcagggacgtgacgcgggaggtggcggacgcgatgtcgaggctggccagggcgctggcgcgcgtgctggcggagagcctcctgggccacgccaccggcgagcgattcccggaggggtgcgacgacgcgacgtgcttcctccggctgaaccgctacccgccgtgccccttcccaccggacgacgccttcggcctggtcccgcacaccgacagcgacttcctcaccgtgctctgccaggaccacgtcggcggcctgcagctcatgaagggctcccgctgggtcgccgtcaagcccatccccggcgccctcatcgtcaacatcggagacctttttcaggtacacccattaactccaacgttgtataaacatctcaacacaaatccctaaataccatatatgcataatggtactaagatggaagagagaaaacaaaagagaaaaagaggatgagtcaccccctcataaagagaaaaatatggcgctgattggatgaaaagtgcatgaaacaaatagttttcttgtattggagctagtatattagagataatgtgtagtatattttacctcctaataattaattagttgatgatgtggataatattaagggtgacaatcatccctactataaaacttgctgttacacctaatcatgcataccactcgtgctatatatagtgctatatacccaatcaacaactactccatattctacgaagctttgcacgggagaggagaaaaaaatgtgcataattattttggacaaggcgagtacaatacaggctctcgtggctggccggccggctggctggctggctggctgcggccggcaatgctttccaacctgtagagtcaaagcctgcatctgcctatggtaggtggtttgtctgtctgcgtgaaaaagtacagattccgtgaacatattccgggcctccggctctccaaaaggcggacgttgcagcgtcacgctttgcgtacttgtgcttgtgggcatgtcgtgcctatctatcagcagccttgcctgcgtgtatcgctgtaccgccgctagcgaaaaaaaaaaaaggctgcggattccgctatgatcaagggacagaaaaacatcgtgcaaaagggctagtagaatggaaagatcgacttgtcagttacactcacatggtacatttgcgacttttgctagggaacttgatcggtcacgataacatagtactactactattgtactactatatcgtgctataactagagtctaaaagaaatctctcaatctatgcctatgcccaacaacacgttctaagaaaatatctacgttagtcagaaaatagtacataaatctaaagcatatacttacatcttgggaggaccaaattataacagtttaggcaccatttgaatgtgataagcttaagcttattacagcacgaaaatgtagtggatgattaaagcatgattaattactaagtattaaccattgtaaacttattttttaaaaaaaaaatctatatattttttttcatgaaacatacaaatgtgaatcattaaattaagcatcagtggacagtgtatgcgaggccgtactaaacttatactctaccacgttgaaccaaattagggcggttcaattcaattcctgacgtttttccgactctacttctattttgaaggcgtggagcaacaacaggtacaagagcgtggagcacagggtgatgacgaacgcgacgacggagagatactccgtcgcctacttcctctgcccgtcgtacgactcgcccatcggcacgtgcagggagccttccccttacaaggcgttcaccttcggggagtacaggcgaagggtgcaggaagacgtcaagaagacggggaagaagactggcctcagtaatttcctcgtatgaggcgcacacaaattcagtggccggccagtttcagttccgttctgtgtatcatcagtaaatgtacaattattaatgactaagagtgcagtacattaattaattaattaattagtttattgtagcttagtttgacggtgtacaagtactggtaggagattgccggtatatatgtacgtaggaaataagataagggatccatgtacagtttatgtacggccttcgatcccttgtcctttggtttgaattatgatgtttctt

SEQ ID NO: 22216 - DNA, 2360 bp, Oryza sativa
  ref <308>: DATABASE ACCESSION NUMBER: AK072411
  ref <309>: DATABASE ENTRY DATE: 2001-12-06
gggcctttcgggacctcaacagagacgcacctcggtctctctcctcctccacccaaagctcccacctttcccttcctcctccctcctgcgctcgcctcctcgcccaattccgtccccaattcggcgctctcccgcggcgcgatccgtcgaatctgcccggattcggtgtcgattccacgcggccgccgggggagcccccctcccgccgatttgtttcggagcttttcttcttcttcggattcttccttccccaatcctttggttcttgttctttggtctctccttcgaaattcgatccctcgccggcagcttagccggcgcggcgcggcgcggcggcgatccatctcccgcggtttcgatttgggtttatttgggcggtggggagaaatccgtggttcggtgcgtttggtatgagctgaaaaggtcgtcctttttttttttgggttttttccccctgatctgcgcgtgttctcttctcctggctcgattgcgtgttgtagattttgtgtttttgttcttgcgtttaaatcaggggggaaaattcctactctgtaaacatttcagcccgattttctgttgatttccacgtttgatttggtgcaggaaaagctagaatttttacccttcttttttccgaataatatttctctgatttctacctgcgtagatctcgttttcctctttggttttgggtctaaggcctgcaccgattcgatcaaggaataaaaaaaaagccattgatttcccatttccgaaccttttatttacctcaacaaactccatttcttgctgttcctacgcccaattcgtcctgatctggttgtccaagcttgggattcgcctccacttcccttgatttgttcgtccgcgttaaatccgatggcgcaggagagctgtgatctcaacaaggacgaggctgagatcttgaagccatcatcatcatcctcaccttctccttccccaaccacagcctccccatcgccaccaacagcacaaatgacagaaccaccgcctccgcaatcgacaccaccaacaccaccggcagcagcagcagcggcatcggcagcagcagctcctcaattctcagccaagaactgcgaaggtattctcatagaggtttccaagaagaggaaactagccgaagccaccgccaccgatgctaatgccgtggtcgtggcggcggtagccgagccattatctccggtgctgtttgttaaccggtgcaacgtgtgccgcaagagggtcggtttgaccggattccggtgccgctgcggggagctcttctgtcctcgccaccggcattccgagacccatgagtgctccttcgattataaaaccgcgggcagggaggagattgcccgcgcgaatcctgtgatcagggctgccaagatcattaagatctgaggtataaacacttctgtggtggagtcatattaagatctgaggtataaacccatgatcatacatcattatttgtaattttttgttatgattccctgcttgcttagttcctataagatgtaaaatgccatacactcaaggtagcattttgtttggcagataagaattgtcattttaacagttatacatcgtgatgtgatgcttgtttccaatgtatagtatttctaaatgatatatttctttaagttgcaaattgatttacttatttgcattccaaactgtgagattatttgactcagctggattaactcctgagattattttcttgttgctggttcctgtctcatcatttgcacaatgctgcatttcatttttcctagttcctaggttgttcttggcatttgcacatccttgtttcatgtatatatattttttccatttctccatagtttctgtagatgttatacattaattgacctcaactatttccattcattgaaaccttgtaggttgtatgatctatgaactatatggaagactaatcctggagatgctgcaagtgaatcatgctgtaactacatgagctattcaagagcatgatatctgcatgtttgtgaagtaattcccatacagccgaggccatagtaggatagcagtctacatcaagcgaaaaatctatgggtcggctgatgtgggagaaagcttcactcttgttcatcgtccgccttcgatgcacaccatagctccttctcaagctaccacgcacacggatgatagcaagtgtactgtccagtcataattttattggatccaacaatttattgtagtatattgtaatctttcttttttaagtcttgttcggtttcgttcaacacaattgtgtgttactgaaaacatgtgtgatgtttggaatttcagttcaaggtggagataatcacctcctaccctgttgctattgc

SEQ ID NO: 22217 - DNA, 2306 bp, Oryza sativa
  ref <308>: DATABASE ACCESSION NUMBER: AK072412
  ref <309>: DATABASE ENTRY DATE: 2001-12-06
gatcggaggccgtcgtctccgtctccccgtttgctactccggcgccggcgaggccacctcggtcgtttccctccctcctccacccactcgccttcccggccgccgcggagctctgcccccccccactctccctacgtctagctgcgctacttgttgtctcccccacctctcttcctctgccgccgcacagcttgccttcctcgtcgtctcgtctccttcagcgccggcgagaagccccccggccgccgagcttgccccgtctccggcggctaggcgctgccgcctcctgaccacgcgggttttctgcccctgccgctgaccccacccaccgccggcttgctagggcttattggataagatgtcgtccaagaagaactactacaaggagaagatgatgcggcggaaagaggagaaaaaagaagaaccagagacaccaaggtatcgagatcgtgctaaggagcgtcgtgaagatcaaaaccctgattatgaacctacagagcttggttcatttcatgctgtggcacctcctggagcagatttaaggctagcagatgcacacaagatatctattgagaaaagcaaatatctcggaggtgatctggaacatacacatttggtcaaaggcttggactatgctctacttcacaaagtacgaagtgaaatagaaaagaagcctgaagcagaagatggaaaggatacacagtcaaggtctacaaaagaagatcaagcagtctcattccgcactgcagctgcaaagtctgtctatcaatggatcataaagccacaaagcatcataaagtcgaatgaaatgtttcttcctggtcggatggcatttatttacaacatggaggatggacttaccaatgatattccgacaacacttcacaggagcaaagctgattgctctgttccagaggagatggtaactgtcagtgtggatggttctgtacttgataggattgctaaaatcatgtcataccttcgacttggatcatctgggaaagtcttgaagaaaaagaaaaaggagagggacacaaaagggaagaacagtttagcaagtggtgactacgatgaggtagctagacctggccaaactaatgggtctgctctgaaacatcaatttgaaaaggatatgccaccgccgccaccccctcgaaataataatttaagcaaaaatgagaaaccgtctgctccagttgctagagcagatgaagatgacatttttgttggagatggggtttactattctgttcctaacaaggaaatgagccagagccctgtctctgaagatatggatgagtccccacataaccatcagaagcagtcctatttcactgaagagaaacctatctatgggcccatcccaccatctgaccctgctcaagcttggccacaaccgaatgcgtacgatgctattcaagctcaaatggtagctgctggatatcaaggggagtggtcaggctatcagtatggcgaacaacagatggcttatccagaacagtacatgcaacaaagcgctcaggactgtgatgtactagctgatccaaatataacccaggatccaaggttgatgactcaagcagataaagacagaggtcttggttctgttttcaaacgcgatgatgaaaggcttaaacagctgagggagaaagatgcacgggagaaagatcctaattttatctcggatagttactccgagtgctatcctggttatcaggagtataatcatgagattgcaggcagcgatgaagaagatgatttatcgaagatggacatgggtggccgggctaagggccgtcttcacaggtgggactttgagacagaagaggagtgggccacatacaacgaccagaaggaagccatgccgaaggctgcattccagtttggggtgaagatgcaggatggcaggaagacgaggaagcagaacaaggaccagaagctcacgaatgacctccacaaaatcaacaagatacttgcgagaaagaaaggtgacaaagatggagggcatgatggcgggcattacgatgatgatatgccaagtgggaagaagcaacgtgcctgatgctattagacacttatagtttatcctgcgagaggtaaaactgtatttgtactaggaattacagtgccatgaacacctgacagttgtaatgttctgcgttttggccggtgcagaagggaaaaagaacgggatggccatgctttcgagctgaaacagtgataatatgtagctcatccatttttataacagaacagcccgtaatttgctttgttttactacgaaaagaaaaaaacatcgaaagtcc

SEQ ID NO: 22218 - DNA, 2217 bp, Oryza sativa
  ref <308>: DATABASE ACCESSION NUMBER: AK072413
  ref <309>: DATABASE ENTRY DATE: 2001-12-06
gagttctcccccttctccatagaaaccgtgtccctcccctaccttacccatcccccccgctcctccccttcccgatcaacagcaacagcggcggtcaaaagcttccccccgcgacgaccccctccaccttcccccaaccgccctcgtagtctccgcgcgcaggcagcagagtcgccttcccctcctccggtcgatgcgacggggctgaatcggccaggatcccgaggaggaggaggagcggacggcccgcatgagcctcgctggctccgccctggaggcggccctgcaggcggtggggcgcggcctcgacgccgccggtgaccaccggctgctctactgcaagggcactgggaggctcctgatgctggacgagtcccgcgcgcgggacctgaccatcaacggcggcgtcctccgcggggtgccccccgacgtcgtggtggaggagggccacggcatcctcgagcgcatccgccaggtcccgggacccccaaccgatgagcccgtcgtctgcagcttcccgaagatggctgagtgcttcaacaggaaggcgggcttgctggaaacaacagtaccgctgggttccttcaactctctcttcagctttactggttcttggaagaatgatgaagcggcgacgaaatccctcgcgattgatggctactccgtgcctctgtttaaagttaagataacgagtggtgaattgtttctgcatgagagcgttaagcgcgcaattccacatagttgggatccttcagcattggctagctttatcgagaactatggtacccatattattacttctgttacggttggtggtaaggatgaagtatacataaagcagcattcctcatcccaattatcagaattggagttcagaaattacgtcaaagaaattggaagcgagagattctcagatggggatagcaagttaaatgcaactcccataaattacagtgagaaggatatgacagtaatcttcagaaggaggggtggttgtgatcttgttcagaattttaatgattggataaaaactgttcagtcagcaccagatgtcataggcatgacatttctccctatcgtctcacttgtcggtgatatgcctggaaagaagcacctcgctcgtgcaattgaactttatttgaaatacaagccccaaattgaagagttgcagtatttcttggatttccaagttcaactagtttgggctccagtaccaccaggtattgctggtcaacatagaaaggagcctgtatgtccatcacttcagtttagtttgatgggcccaaagctctttgttagcactgaacagatatctgttgggcgtagaccagtcactggtctgaagctatgcctggaaggagccaaacagaaacgtctggctattcatttgcagcaccttggctcattgccaaaaatatttgtacctcattgggattcccatatcacaattggaccgccaaagtggcaaggccctgaagagcaggatagccgctggtttgaaccaatcaagtggaggaattttgctcatgtcagcactgcgcccatagagtacactgaaacaagtattacagacctatctggtgtttatattgtaacaggagcacaactgggcgtgtgggattttggtgcgaagagtgtactccatcttaaactcttattctccagagttcctggatgcacaattaggagatcagtgtgggaccatagtccatcaagttctttggtccataggacagatgaagcttcatcatcctctagtgataatgctaaacttgtgaagattgttgacatgaccgagacattgaagggcccacaagatgcacctggccattggctggtaacaggagcaaagttgggggtcgagaagggcaagattgttgttcgtgcaaaatactcgttattaaactattgaccaaatgttgaaagcattcattcattcactctgctatgaagcatcctgtttaaagatagcatatgttcttttgttcatcatgtatggtttttaatgtaacatcatatggattcgtgcttcttgctgattctgtgagggattagcgcctagatgtttgtgtccgattacaaaatatttgacctggtctcagtgatctgttaagtcgtctctgtgtggcagtagaagatgtatattagtataaatttttgaattggtattttgttatgcgaagtttaacccagtggagttgaactgggcaatgcttt

SEQ ID NO: 22219 - DNA, 2115 bp, Oryza sativa
  ref <308>: DATABASE ACCESSION NUMBER: AK072414
  ref <309>: DATABASE ENTRY DATE: 2001-12-06
gaccgcatcatcggcttccctccggctcgagccaatctctcgctgtgtctctctcgcgctctccactagcaccggctcggctcggctcgcgcggcggcggcggcggggcggcgtggcgccgagggaggggaacgccggtgtggggagggcggcggcgaggggactcgccggcgacgagctggtttgggtatgagaggggttacccatgcggcgccgaccacgagcgtcccccgccgcggctccatggacggcctcctcatcttcgtcttctacctctcgcttcctatacgtggtggccgcgaccactcgttaatctcctcctctaattgttagccgatctcgcctctcccccacactctctgatcccgctctctctctctgcttcgattcgattcgattcgatcttctccacctcgtcgccgtcgaacgcaactcggatcgggaggataatggaccagccttctaatggcttcgccgccggaggtctttttcttcgtcacattgatgggcaaaatgcctctcccccttctgtcattgtgattggtggagggatttcaggcattgcagctgctcgtgcgctgtctaatgcttcgtttaaggtcacactattagagtcacgggaccgacttggtggccgtgtgcatactgactattcttttggctgcccaattgacatgggagcatcttggttgcatggtgtatgcaatgagaattcattggcaccactgattaggttgcttggccttagattatatcgcaccagtggtgataactctgtgctatatgaccatgatctggagagctatgctctctttgataaggatggtcgtcaagttccccaggagatagtgacaaaagtcggggaaacatttgagaaaattcttaaggagacggtgaaagtaagagctgaacatgaagatgacatgcctcttattcaagccatctcaattgtgcttgacaggaatccacacctaaagcttgatggtttgcaatatgaagtactgcagtggtgcatatgtaggctggaggcatggtttgccacagatgtggataatatatctctgaaaaattgggatcaggaacatgttcttactggtggccatgggcttatggtgcatggttatgatcctgttatcaaagctctcgcgcaagatcttgatatccacctgaaccacagggttaccaaaatcatccagaggtacaacaaaactatagtatgtgttgaagatgggacaagctttgttgcagatgctgctataataactgtccctcttgggtgtacttaaagcaaatatcatcaagtttgaacctgagctcccagattggaagctttcatcaatatctgatcttggtattggcattgagaacaaaatagcccctccgcttcaatagtgtattttggccaaatgtagaagtgctaggcagggttgccccaacatcaaatgcctgcggttactttcttaaccttcacaaagccacagggcatccggttcttgtatgcatggtagcaggaagattcgcatatgaattcgagaagctatccgatgaagaatccgtaaactttgtcatgtctcagctcaagaaaatgctaccaggagctactgaaccggtccagtatttggtttcaaggtggggaaccgacccgaattcgcttggttcttattcctgcgaccttgttgggaagccagctgacttgtatgaaagattctgtgctccggtgggcaacctgtttttcgctggggaggccgcctgcatcgatcactctgggtccgtgcatggagcttattcttcaggcattgttgctgcagaggattgccgaaggcatctgtcgacgcagctaggcatctccgaccttttccaggttgggaagattatcatgagggaggagatgactgaagtcatggtccccttccagatatccaggctgtgaaagaagaacaaagcctgcctatttagcaccgtgtttatcctgcagctgctatggttaatattgtagctgctgctctgtagtttcctaattatctcagatcctgtaccgtttcacagtttgatcgtttatgtgtattcaaataaaaacagaataattatatatcaacagaccttgttctctgaatc

SEQ ID NO: 22220 - DNA, 1240 bp, Oryza sativa
  ref <308>: DATABASE ACCESSION NUMBER: AK072415
  ref <309>: DATABASE ENTRY DATE: 2001-12-06
ggggtgggtcccctccccttcccccctcccctccggcgaactccgagctcttcccggtgagcgccgccgattcggccggagaggctcgccggagtcgcctccgccctgcccacgatggccgccaacttctggacgtcgtcgcactgcaagcagctgctggaccaggaggacgtggacaaggtcccccaggcggacagcgaccggggcatcacgctggaggagttccgcctcgtcaagatccacatgtccttccatatctggcgattggcacaacaggtgaaagttagacaaagggtgatagctactgctgttacttatttcaggcgtgtatacacaagaaagagcatgactgaatatgatcctcgtctggtagcaccaacctgtttgtatttggcatcaaaggtggaagagagcacagtgcaagcaagacttcttgtcttttacataaaaaagatgtgtgcttctgatgagaagtaccggtttgaaatcaaggatatccttgaaatggaaatgaagctcctggaggcacttgactattatttagttgtttaccacccatatcgtcctcttttacagttattgcaggatgctggcataacagatctgacacaatttgcctggggaattgtcaatgatacttacaagatggatcttattctcatacacccaccatatatgatagcattagcctgcatctacattgcaagcgttcttaaagacaaggacataactctgtggtttgaagagctccgtgttgacatgaacattgtcaagaatatctcgatggaaattttggacttctatgacacctacaagattgatcctcaaagagggctcccagaggacaaaatagcccctgtgatgaacaaactgccttcaaaggcctaaagcagactgagccctagttcagttgttatcagtctgagcgtcaaatcaccttatgctcgtacaacaggaaatatgtgtcaccttccttggagaactttatatttcaaagccatatatatatatagtatcagaattcagaattgcccctaacgaacgatttaattcagaattccgaactatatacagctgttcctgttgcagcagcttgcgaggcaaatcatttacaatgaagatcccaacgggttgggaatggtctgtatctgtatgtgtttttgatgtgtaaaaaaaaacatggctttggtactatttagtttctatagcaaatgaaatcctgaaaaattcttgcggtgtc

SEQ ID NO: 22221 - DNA, 2171 bp, Oryza sativa
  ref <308>: DATABASE ACCESSION NUMBER: AK072416
  ref <309>: DATABASE ENTRY DATE: 2001-12-06
gtggagagaaaatcgtccaaattttgcctgttgatctggttctgtagcgaggatttcgtctgtggcgtgcttcacatgaaagagagtagaattggctgaattatgaggattacatggcaaaagggagaaaaataatctattgctttgaaaatattgatactctgatcttttacaagtgaagtaaacctgcgttgcagagtacaattgtgttccttaagcatatttctttttgccaagcaaagaaattcgacatttctatcttcatggaagattggctcgatactagtttcctctattgagttttatttctccaaattccaaggtttcagcttccttgacgtgcttagttccatctgcagggaacaatatattgtggaagtacacaaactttttgagtatcgttacaaagagtccatgcttggatgagtacctggagcagtaggtaccaaagtcgtccattctgcattgtggagttgctctggatcaacttggagtgcgtccttcgaaactggaaataccaaattccgttctagataatttgctgggcgcgcagatggcagatgatcctagtctagactttggtgaatttcctcagccattctgcagccagcaagttgtttcatttcagccaagcgtgacaactagtgggtcaggaggcatgccagtgtacctggactgttccagtgggatggacagcaacacggtgatgttgagcaccacaccttctgtggttgtctccaccacttcgtccaatacggttgctgatcccgggcagaacctcaaatatggagggcccctggcagctgattggtcacgtcttgagctcgatgtgctgaaagatggcctccagaaatatggaaatgaacaaggcatcatgaagtatataaagatagcagcttcattaccaagcaagactgtgagagatgtcgcaatgaagtgtcagtggctagggaaaagagaaaattcaaggcggcggaagtctgaagaccatcacactggaagaaagatgaaagaaagaaaggctaaaatggccgagccttccttatggggtaccaatcatccagttcagacggacacaagagttccttcgtttgtgtcacataatgccattcaaaacaaccaaattctaactggaggttggtaggtcacttgagtatcaggtccatttttctagaatgtaaaaccatctgctgtgggtccaacgcatgataatccttcatttcgattatgctcttgggagagtaaataataaattaacggattagcagatgcaatttaaataagatattagaattatgcgctgatggaaagattcataagaactggtttttgacaagattaagctgatgacttttcatacacatattacatatatgttccttaatttgaccatgtgcgtatttttctaacatgcagccactgaaatagatcgtgcaatgcagcaattactagtacaaaatgatcgacttcttgatcagattgaagcaaatatgctagcatgtcagccgcaaaacaatattgaactcttccatcggacaagaaggaacatcaatggtcttctgcaaaccatgaaccaaatgcctgggataatgagtaagatgcctccgttgcccgtctcggtgaatgaaaatcttgctagcttcgtacttcctggtcttacagtgccacaatttctcggaggcagccaattgaaggaggaaccaagaggatggtaagtcactgccaacaggttgcacatgaagcaaacgtttaaactccatcacaaacttagtgaaatatttgggaattactgctgtcagatggtgatgactgatgagtagaactaccagggatcctgctttctctatcagaaggcgaaggggaggtaactgtaaccaatctgctgctcggcctccactgacatgggttgaacgtacgccccagctggccagcgacaagcctgtaaaactggtggctgaacagtaatatttcaggaaacttcagttttgctcgtcttggtgcacctgcacatattgaatttttttttcttttcgatttctcatcctgtcagtttctcagtatagtgaatagaggatgtagaataggaagttagttaataataagtactagctagctagctagctattagctaagcttagcaaaagaggaaaaaaaaggcctttttgcccgtt

SEQ ID NO: 22222 - DNA, 2741 bp, Oryza sativa
  ref <308>: DATABASE ACCESSION NUMBER: AK072417
  ref <309>: DATABASE ENTRY DATE: 2001-12-06
atttttgctgccctgtggagcctcaaattctactcgcgttttcatgactgccctatagatcagctcctgattggaaggactgtagttccatgagatagaagggcatattgaagtagaatttggcctttggtgaatctaaatggacagtggcttgggaagaagttcagagacatccttgaaagccttgccatcaatggcaagtaatgcaacaaggaatactgatcctgaccaacagggtgttcgattcagttccatggaccagcctccatgttttgcaagacctggtcaatcgttccctgcttttcctccactctttggggttcagtcttccagcttgtatttacctgatgacattgaagctaaaatcggtaaccagttcgaatcaaatccttccccgaataatcctacaatggattgggaccctcaggcaatgctgagcaacttatccttccttgagcagaagatcaagcaggtaaaagacatcgtgcagtctatgagtaatcgtgagagccaagttgctggtggttccagcgaggcacaagcaaagcagcagcttgtcactgctgatctcacttgtattataattcagcttatttcaacagctggttccttgcttccttcgatgaagaacccaatcagcagcaacccggcactcagacatctcagtaacacactttgtgctcctatgatcctgggcaccaattgtaacctgcgaccaagcgcaaacgacgaagccacaattcctgacattagcaagacccatgactatgaggagctgatgaatagccttaatactactcaggcagaaagcgatgagatgatgaactgccaaaatccttgtggtggggaagggtcagaaccgattccaatggaagaccatgatgtgaaggagagtgatgatggtggtgagagagagaatctcccccctgggtcttatgtagtattgcaattagagaaggaggagattttagcaccacatactcacttctgcttgatctgtggcaagggttttaaaagagatgctaatcttaggatgcacatgaggggccatggagacgagtacaaaactgctgcagctcttgcgaaaccttcgaaagattctagcttagagtctgcaccagttacaaggtactcgtgcccatatgttggctgcaagcggaacaaagagcacaagaagttccagcctctcaagacaatcctgtgtgtgaagaaccactacaagagaagccactgtgacaagagctacacctgcagccgttgcaacaccaagaagttctcagttatcgcggacttgaagactcatgaaaagcactgtggccgcgacaagtggctatgctcgtgtggaactaccttctcaagaaaagacaagttatttgggcatgttgctcttttccaagggcacacgcctgcactccctatggatgatatcaaagtaacaggagcatcagagcaacctcaaggcagcgaggcgatgaacaccatggtggggagcgctgggtataacttccccggtagctcatcggacgacatcccaaatcttgacatgaagatggctgatgatccacgctatttctcgccattgagctttgatccttgcttcggtgggcttgatgacttcactcgacctggatttgacatctctgagaatcccttctccttcttgccctcaggatcatgcagcttcgggcagcagaacggagacagctgatcgaggccaacgttaacgatgacggcaatggccttgcctacctttgtgtaccttgtctagccctattcttcctctgttgaaggagccattttaggtcattccttcttcctgaagtgtactttattttatgatcatcagtaatgatcaagtactttttatctttccttatagattgagatagcccaatcttggtatatatatgcaagaagcgtttctaattaaaaacgaaatgggagtgactccagtattgtttgagcaaccagttcatcgagatgactgggaaggtctccgcgatgttagcattgttgccaaggagaaatacagagttgctgttgcagctgatgaaagttgtcgtagtttgcttgatgctcagaaaataatggatggaaatcttgctcatgttattaacatcaagctagcaaagctagggattcttggagcccttgaagtaattgatgctgcaagaaaagcccgcattgcgctgatgataggcggtatggttgagactaggatcgctatgggctttgctggtcatcttgcagctggtcttggttgtttcagttttgttgacctggacacacctcttttactgtctgaagatccagtgttcggtggctatgaagtttctggacctgtatacaagtttacaaatgctcgaggccatggtggtttccttcacttagacaacaacggcttgaaataaggaatgccctagccctttgggagcttcacagacaacggtgacacgttcaatgaacaattaattgttcattatttaccttcaacaataatcaattggagttgaaaccaaaggagcagttgtaaacttgtaatcctatatgaccttgaagaggctaattattgttgccagtccagttaggcctgaaatatttgatcagtctgtagatggataaaataatgaggcattttcagctggccttgttgttctgttcgataaataaattactaaatatggtataaaagaccttatgtatgcagcctcaaatatgctcaagtacaatgtattatgcct

SEQ ID NO: 22223 - DNA, 796 bp, Oryza sativa
  ref <308>: DATABASE ACCESSION NUMBER: AK072418
  ref <309>: DATABASE ENTRY DATE: 2001-12-06
gatttgctgcatcccagctaagctcgagagagaagcgagagagagagaaagagagagagaggttggtgcattgcggcaatggagatcgaggcggcgaagtgcgagtgctgcgggctgagggaggactgcacggtggagtacatcgccggggtgaaggccgacttcggcgggaggtggctgtgcgggctgtgctcggaggcggtgagggacgaggtggccaagaagggcggcggcggcggcggcggcgggcggcagctggaggacgccgtcagggaccacatgtccttctgcggcaagttctgccggaagaaccccgccttccgcgtcgccgacggcatgcgccagatgctccgccgccgctccagcgacatctccgccccctccggcgcctcctgatcatcacccatcaagctccggcgagagagatcaagctatgagctctgaacacgaagacgacgacgagcaattaatggcgccgcggcggcggagctaattaagctaagctagaggctaagctaagcttaagcttaagctgaaggcttaacgccatttttaacctcgaaatctcaatcaatcagctgcctcgtgtggagaagggtctccgttgaggtggtggtgccaagtgtgaagccttctttggcctagaagatggcttcttaaatcttaatgatgaacattattgttcgagttttggttaattgtagcaaggatgagattaatattgattcattgtacaaggagatgaatagaagttcaaccactgctgcaatgtagtattcagtggtttcatgaattc

SEQ ID NO: 22224 - DNA, 1588 bp, Oryza sativa
  ref <308>: DATABASE ACCESSION NUMBER: AK072419
  ref <309>: DATABASE ENTRY DATE: 2001-12-06
gaggggctcttctccctcgcccagcccagggcgtacgtcgcgctcaacgaccccgccgccgccgaggccgacatcaccgcgctcgtcgacgccatcgcgctcggcctcttctgcgtcgttgccacgctcggcgccgtgcccgtcatcaggtgcgctggcggcgggccggcggagatggtcgccgccgcgcttgacgcccgcctccgcgatcacctcatcgccaagcccaatctcttcactgaggccgcgtccacagcagttgcatccttccagcggccactcctgtgcctgtttgataggaatttcgagctttcggtggggatccagcatgattggagctaccgcccgttggtccacgacgtgctcggcctgaagtcgaacaaattgaagttgccagagaagtatgatttggatgacactgatccgttctgggtggcaaacagctggttgcaattccccaaagtggcagaggaaattgaggcccagcttgccaagtacaagcaggatgtggatgaggtgaaccagcgcacaggtggtggcagggatggtgttgagtttgatggcaccgatctcattggcaacaccaggcatctcatgaatgctgtgaactcgctcccagaattgacggaacggaagaagatgattgacaagcacacgaatattgcaacggcgctgcttggccatatcaaggggaggtctctggatggatatttcgagtgtgagaatagtatgctcgtggatggcaccttggaccggaccaagttgatgaacctgctgagagggaacggcaccaaggaggataagctccgactggctgtgacctacctgctttccttcgagacaccagtgccatctgacttagagcaggttgaggccgctctgcgtgagtcagaagtggacatgtccgcgtttcagtatgtaaagagaataaagtcactgaattcccagttcgctggtgcatcaaacaccgcaagcaaggttaacatagttgattgggcagaaaagctttatgggcactccattagtgccatgacaggtgtgaggaatttgttatcagatggaaagcagctggccgctacaagggctgtagaagctttgatggaggggaaaccaaatcctgaagttgacaactacttactatttgatccacgggcccctaaatcaggaactgctggacagttcagaggacccttcagagaggccattgttttcatgattggtggtggaaattacattgaatacaggagcttgacagagctaacgcaacgttcacagactaccaagcaagtcatatatggagcaactgaaattcttaatggggtggagtttattcagcaactctcagaactggggcagaaagcagggttgggtggtgtcagcagcagcctgccaccccagtaaacaggctccttcaagatattttgatgttaatgggtgtttaaagcttcctagatcagtggtatcttaccagacttttgatgttaaagagtggtccagactgcatagatcaatggtatccaatttccaaaaagctcaggtttatggccttgctttgaatgtcatctatacaaagttttcttatgatttt

SEQ ID NO: 22225 - DNA, 2241 bp, Oryza sativa
  ref <308>: DATABASE ACCESSION NUMBER: AK072420
  ref <309>: DATABASE ENTRY DATE: 2001-12-06
gggagtcgaatcgaaaccgaagccagaatctctctagggttcgttcccttctcgcgatcctcccccacctctcacctcccgcgccccagtctccgtccgccggttaatctcgatccctcccccaccgcggatcgcggattgggatactgcggcgaccatgatgtcatcggacgacaaccttgagccgcagctcaaggcggtggagaattactacttcgttgacgacaacgatgtgccggtatccttcgatgtcctgccgttccagttcgatgcggccgagggggtcgcgtcgttcaagaaggatgtgtacctgcgggggttcaccgacggcggcctccagaaagtctacaagcaggtggttgcctggaagctagtcctagatggagactcgcctgagatcgcggtgctttcgacggagggcagttggattgccctgctgaagccgaggcctagctacgaggagaccatccggtctgtactgatcactgtcgaaatgcttcacttcgtccgaaggaggccaacggattccgagaaagacatgtgggatcacctctatggggtttttgagagatttgtggttaggcccttagaagatgactttgctaatcatcagaatttaataaaactctttgctcagagggacccagatttagcaaattcacaggttttgcaagtcttcatcaaagacaagattatggaaaagaccaatgaggttggttcaaataatctggataataaacgagagccagacattaaacaagagccagacattaaacaagagccggttgctgctggtgatgaaatggaggagatagttgaagaaggcattccagatgcaccaagcaatgatgatgatgatgatgaagaggatgaggaggatggagatttgtttgattcagtttgtgctatctgtgataatggaggggagctgttatgctgtgaaggtccgtgtatgaggtccttccatgcaaaaataagagatggtgaagattcttactgtgcaaccctagggtacacaaaggcagaagtcaaggcactaaaaaattttgtgtgcaagaattgtgaccataagcagcaccaatgctttgtctgtggagagttggagccttcggatgggccaaatgccaaggtatttctctgtaataatgcaacctgtgggcatttctaccacccaagatgtgttgcgcaattgcttcatcctaacagcagaaatgaggcttccgaaatggagaaaaagattatggctgggttttcatttacatgccctgtacattggtgctttcattgtaaaggtctagaagacaggactcaagaaccactgcaatttgctgtttgcagacgctgcccaagatcgtatcatagaaaatgcttgccaagggaaatttcctttgaagatattaacacgcagggcatcataacccgtgcatgggagctttcaaaaagaattctgatctactgcttggaccatgaaatagaccttgatattggaacaccacccagagaccatataaagtttcctcatgttgaaaaatcagcttattctgcaaagaagaaagtcaaagaattagctgagaagaaaagacggatttgtgatgattcatatgtttctgaacctttacagaagcgcgcaaagttaaatgagaagtttaatgcaaaaggtgacaaatctaaaaaagctggtgtgaaaagtgaatttgaggaagttcttgaatctgaaaagaaaaaaacaaggagcctgaaaaagagaacacagcctgaagaacctttggttgagtgtgctgctgctgctgctgcaaacaatgcaaatcgacctgtgaaagaacgagaaaaagaattagggacttcatcgttggatatggggaagatacctcttagctctttccctattgtggatagtgaaacggagaagaggtgagtcagttggatatattgtttcatgtaaacagactataacagcgagggcaacagaatatttttcttctcctcaaggcaaatatgttagtggttggtgatggatgctatttcgtttagagtataattgaacatagctcatcaagccaatccttctttccttctatgtctaccttctacatcctactaaatccctgagcaaaacccaggccaagcagggctgatgtaaaataggcataaagttggatttgctaagttttgtctactttcgctagacagcctatcgtttacgcattctccatcaaaaaaagtgaagtcacattctccatt

SEQ ID NO: 22226 - DNA, 2332 bp, Oryza sativa
  ref <308>: DATABASE ACCESSION NUMBER: AK072421
  ref <309>: DATABASE ENTRY DATE: 2001-12-06
gggtttgaggagccaaccccgccccgcgccgccccgccgcggccgcgtcgtctcctccgccacctccacgtctagggttcccctccgccgtcagcattgcccgccggagcttctggttagtattgagtggaattcagctgatggaactactaaagattccctttaagggtgtcgtcgctgatatcgaaggccgagcagcttggtacaagcatgattggcttgagggattccactctggcttcaggatattggcacctactatgtatatattttttgcctctgccctcccagtcatagccttcggaacgcaactgagcagagaaacaaatggtatactcaccacagtagaaacactggcatctactgcaatatgtggcatcatccattccattcttggagggcagcctctgttgatagttggagttgcagagccaactataatcatgtacacgtatctctacaactttgccaagaaccagcaagctctgggggaacgactgtatttagcatgggctggatgggtctgcatctggactgcgatcatgttgtttcttctggcaatgttcaatgcttctaatgttattagcaggtttacaagggttgcaggagaacttttcgggatgttgatcactgttctgttcctgcaacaagctattaaaggaattatagaagaattcaaggtacctggaggtgtcgaccatagttcacctatatatcgattccagtggttgtatgtcaacggcctacttggtgtaatcttttcaattgggctgttatacactgcattaaggtcaagaagggcaaggtcatgggtgtatggtcaagggtggctcagaggcttcatttctgattatggtgtcccacttatggtgattgtttggacagcattatcgtacgcattaccaaaggatgttccttcaggagttcctaggaggctgttcagtccacttccctgggagtcaagttcactgcatcactggaccatagcaaaggacctgttttctgttcccccagcatacatatttgctgccattctgccagctttgatgattgcaggactttacttctttgatcatagcgtggcttcacaattggcgcaacaaaaggagtttaacttgaagaagccctctgcttaccattatgacattttggtcctcggattcatggtcctgctttgtggtttgattggcatccctccatctaatggagtacttcctcagtccccgatgcatacaagaagccttgctgtccttaaggggcagctgctacgcaaaaagatggttcaaactgccaacgaaggcctgatgaatcgtgctagcagtttggaaatctatggcaagatgcaaggggttttcattgagatggactgtgaaaaaaatactgattctgttgacaaggagttaaagagcttgaaggatgctatgctgcaagaaggtgataaagaagggacattggctgaagaatttgaccctataaaacatattgaagcacatttgcctgttcgagtgaatgagcagagactaagtaacttgctgcaatccttattagttggtgcttgtgttggagctatgccagtcatcaagatgataccgacatcggtcctctggggttactttgcttatatggccattgacagtctacctggcaaccagttttgggaaagaataagacttatattcatcccatcaagccgacgctacaaggttttggagggtccccatgcgtctttcatggagtcagtgccttcaaaaacaattactgtcttcacgatcttccagttggtttacctcttgatatgcttcggcataacatggataccaatagcagggatcctgttcccgttgccattcttccttatgattcttatcaggcagcatgtcctcccaaagttttttgagccaaatgaccttcgggaattggatgcagctgagtatgaagagcttgaaggtgtccaccacgatcacacgctggaggatggtgcatctgattcagaaagctgtggcagccgtgacgatgccgagatattagatgagctgacaactaaccgtggagagctaaagcacagaactttcaaccaccgtgaagaaaggcacccgcaggcgcatacaaaagccgttcagcccaggtgtggagatacagaaaactggtccgagtgctaaagaatttcggcttactgtcggatgggtatacgataggcatatatagcacttcctcatacattcctactttcctatacatcgcactgtagcaggagatcggcggccgtatgatatgatatgcttgtcagttgtcacattgtgcatggagtaaacagaagcaactggattttacg

SEQ ID NO: 22227 - DNA, 1940 bp, Oryza sativa
  ref <308>: DATABASE ACCESSION NUMBER: AK072422
  ref <309>: DATABASE ENTRY DATE: 2001-12-06
ggaatccaagaaaaaaaaaagaaagcaaaaatggccaccggtagccttggcctctccacctccttcctccccggccacgacaccctcctccgccgccgccggcggcggccgccggcgacgacggcggcgtcgttccgcccggtgacggcggagctcggcggggagctggggcggcagctggtggaggcggtcggggtggggctcccctgcacggtgatggcgtgcggcgacgtcatctaccgcagcacgctcccccgcaacgacgggctcaccatcaccgcccccggcgtggcgctcgccctcgccgccgcgtcctacctctggtccacccccggcgtcgcgccgggcttcttcgacatgttcgtgctcgccttcgccgagcgcgtcttccgccccaccttccgcaaggatgaattcgtgctcgggaagaagcttggggagggcgcgttcggagtcgtctacaaggcgtcgctggatgaccccaaagctgcggagaagcaaggtgctgtggttgtgaagaaggcaacagagtatggtgcggtagaaatatggatgaacgagcgtgtcaggagggcctgtgctagcagctgtgcagattttatttatggctttcgtgagagcaaagctaaaggtaagggagctgatgaatactggcttatttggcgttatgaaggtgaggatacactattcgatctcatgcaaagcaaggagttcccttacaatgttgagactaagattctaggagatgttcaagacctgccaaagggaatagcaagagagaataagattattcaaacagtaatgagacaactgttatttgctcttgatggccttcattcgacagggattgttcacagagacgtaaaaccccaaaatgtgatattttcggaaggatctcgtacgttcaaaattattgatcttggagcagcagctgatttgcgagtgggcatcaactatattcctagtgagttccttttagatccaaggtatgctgcaccggagcaatatataatgagcactcaaacaccatctgctccctctgctccagttgcaactgctttatctccagtcctttggcagttgaaccttcctgacagatttgacatatatagcctgggccttatattcttacaaatggcatttccatcattgagaacggacagcagcctcatacaatttaaccgccaactgaagaggtgcaactatgacttagaagcttggaggaatttggtagggccacgagctaccccggagctccggaggggctttgacatcttggatttagatggtggtattggatgggaacttctcacatcgatggtccggtacaaagcacggcaaaggactggtgctaaggctgcactggcgcatccatatttcaaccgcgaggggctccttggcctctctgtaatgcaaaacttgaggctgcaactgcttcgtgcaacccagaaggactacagtgaagcagcccgttgggtcgtcggcctcatggcaagatcaggaacagaagcagaaggaggttttacagaggcacaacttcaagagcttagggaaatcaaaccaaagaaaggtagtgcacggaggaacttgcttgcttccgtgctgcgtgtacagagaaaggtcgtgaggacaatcaacgaaagcatggatgagcttagcagccagagcaaaagcatttggtggagccggtggataccaaaggaggagtaggcagacgcagctctgtccctctgtgcatcgcccatttcttctgtagaaacctcgccatgtagcaatggtaatggtacagcctacttacttccctacctctggtgagtacaaatcgtcgttccatcggaaaaagaccacaatagcatataccgatgtccaaataggtgtacatatatttgacatggaaccaaaattttcagagacccttatgataagttcataacagatcc

SEQ ID NO: 22228 - DNA, 381 bp, Oryza sativa
  ref <308>: DATABASE ACCESSION NUMBER: AK072423
  ref <309>: DATABASE ENTRY DATE: 2001-12-06
gacaaggcccacaacccaacaaccttccactgatccacacacagccgcgaggagagagaaagagagaggagagagagatggcggcggagctgacggcggcgcagctgcgggcgtacgacgggagcgacccatcgaagccgatctacgtctccgtccgcggcaaggtctacgacgtcacctccggccgcggcttctacggccccggcggcgcctacgccgtcttcgccggccgtgaggccagccgcgcgctcggcaagatgtccaaggacgacgccgacgtctccggcgacctctccggcctctccgacaaggagctcggcgtcctcgccgactgggagaccaagttccaggccaagtaccccgtcgtcgcccgcctcaccg

SEQ ID NO: 22229 - DNA, 861 bp, Oryza sativa
  ref <308>: DATABASE ACCESSION NUMBER: AK072424
  ref <309>: DATABASE ENTRY DATE: 2001-12-06
aagatgctccaaggctgtattggctaagtgttgtttttctagcatttgatgtcttcttcgctgtgttttgcgttgctatggcctgcttcatcgggatcgcattgtgctgctgcttgccttgtgtcattgcaattctatatgcactggctggccaggagggtgcatcagatgcggatattggctttcttcccagatatagatattctgatcccagtgaggatggacaaaaaggaactgacgagggagttatgatccctgttctgaataatagcggaacatcaaccagtgaacgtattctccttcatgaggatgctgaatgctgtatctgcctctcatcatatgaggatggagcggagctatctgccctcccttgcaaccatcacttccattggacatgtattaccaaatggctacgcatgcatgcaacctgtccactttgcaagtacaacattcttaaaggcagtgaaagtgcatgaccaacttacactgacacaatttccatactcaaaggctgtatgattggagatcctacttgaccacttgtagagaaagcagcaagtgatgctttgtgattccgatctgtttgtaagctgatgataagagtttttccccccttctaagtgagaattggtcgtgtgccttcctgtttaggatgtggtgacggcctgtacatgagtaaactcactataccgtgctaatatcagttgtaaagatcttctcaagttgtgctgtctttttttccttttgtacataatggggtttgaaattgatgaaaagtcctggttatgaactcgtcagactttacaacattgtctggtggaagctggtgaatttctatttgaatagaagcattatagatgg

SEQ ID NO: 22230 - DNA, 2497 bp, Oryza sativa
  ref <308>: DATABASE ACCESSION NUMBER: AK072425
  ref <309>: DATABASE ENTRY DATE: 2001-12-06
gattcaagaagcaacagctccagccaaaatcgttcgtccccagtggctgaaacattaggctcgcttgccgagttagctaagctacctctcaagtatagtctagtagctagagatgcgcctcgccggcggcttcgtcttcctcctctgcgtgcacctgttcttgattcctcccgatggggctctctcggcccccggcggcggcggcgagcggtgcaggcggcagtgcggcgggttggttgtcccctaccctctgggattctccggcagctgccccatcctgctggcctgcgtcgacgccggcaactccacggccgcgttgatcctccctggcggcggcggcggcggcaacgccacgacgacgacctcgtcgtactcgtataccgccagcaacttcaacgccagcaggtcgacgttcgtcgtcgccctcccgccgtcctgcagccgcaccgtctccgaggcgaggcggtggctctctggcgccaactacggcgtgtcgtcgcgcaccggcctgttcctccgcggcgactgccatagaaacagcagcgcctcgaacgccaccaactgcagcatccccgccgaaaccatgtccaggatggtccccacggcgagctgcggcgccgaaggcaacacaaccgcgtcggcgctgacttgcgtcacgtcgacctcgccggcgccggacccagcaaagccagagtcgtcgtcggggtcggggatagtaggcctgttcgcggagtggaagaagctcgaggaacctagctgcgacaacctgctgacgtccgtgtacggtgacacacgggagggggtgttctctctggagttctcggtggcggagatggggtggtgggtcaacgggaactgcacccacggcggcggcggcggcgacctcgcctggcggtgcgcgccgaacgcgacgtgcctcaacgtgcagacaccgaccggcgggtgggggcatcagtgcaagtgcctgcacgggatggtcggcgacgggttcgccgccggcgagggatgctactttgccgctaagaagagctctacgaagaaaatccttatcatagttggaggtgtcttggcgggaacggtggcggccggagtgctcttcctctgctgcgcgcgttgccggcgatccggcggcggcggcggccggtccggcttcgacaggctggcggcgaagcggctgctgtcggaggcggcgtcgtcgagcggcgtgccggtgtactcgtaccacgaggtggcgcgcgccaccaactccttctcccacacgcaccgcctcggcacgggcgcctacggcacggtctacgtcggcaagctgccggcgagctcgccgtcgctggtggcgatcaagcggatgcggcggcggcacgacgacggcgacgacgacgccgccgtggcggtgctcctcaacgaggtgaagctcatctcgtcgctgagccacccgggcctcgtccgcctgctcggctgctgcctagaccgcggcgagcagatcctcgtctacgagttcgtccccaacggcacgctcgcccaccacctcgccggtggggggctcccatggcgcgcgcggctcggcgtcgcggcggagacggcggcggcgatcgcctacctgcacgccaagcggccgcccatcctccaccgcgacgtcaagtccagcaacatcctcctcgacggcgacctccgccccaggctcgccgacttcggcctctcccgcgccgtcggccgcctcgaccaggcgtcgctgtcgcacgtctcgacggcgccgcagggcacgccggggtacctcgacccggagtaccaccagaacttccacctctccgacaagagcgacgtctacagcttcggcgtcgtcctcctcgagctcatcaccgccatgaaggtcgtcgacttcgcccgccccgcggcggaggtcaacctcgcgtcgctcgctctcgaccgcatcgggaaggggcgcgtcgacgacattgtcgacccggcgctcgtcgaccgcgccgacgagtgggtgatgcgctccgtccgccatgtcagcgagctcgcgttccggtgcctggcgttccagaaggacgtcaggccggccatgagcgaggtcgccgccgagctcgcccggatcagggacgccgcgccggcgtccgtgccgggagcccggaccggagccggcagccgcccgcccatggtgatcgacgtcggcgtcggcttcgacggcgtcgacgccgcggtgaagaaggtcgggtcgccggtgtcggtgcaggacgtgtgggtcagcgaccagagctcgccgtcgaccaacggctccatgccgcgatttgcttagctctcgatttgacttgtaattcaaagaggaatctgaatttgatgtgaatttaacatttttttgatgtgtcgaaatgtgtgctacttagcctagttctaagacatggcaaagtatttcatatgccgaattgaaaaaacgtttgctgtatagctaaagttggactagcacagaaacaaaaatttcaagttgatagttttt

SEQ ID NO: 22231 - DNA, 1864 bp, Oryza sativa
  ref <308>: DATABASE ACCESSION NUMBER: AK072426
  ref <309>: DATABASE ENTRY DATE: 2001-12-06
tggattctgaattttcccaggaatctgagcggccgcaaggcgtcacgcgaaacccgtccaacccaactccactccatcctctgcagccgcagttgtgacggagactccaaggccatcaccatccacccgctctcctcctcctcctcctccgcttgatccctccatctcctcgatcgatctccacactccactgcgcactgcaccagcaacgcccccccctgatccctctccacggctgcaccggagatggcttccgcccccttcgccgtctcctcctcaccggcggcttccgccgtggccgcgcgctccaaggtgttgcgaggagggaggagcgaggcgaggactggatgccgcctggggatcacgaggaagaattttggacgtgtcatgatggcccttgcagtagatgtctctcgttttgaaggagtgccgatggcccctccagacccaattctcggggtttcagaagcatttaaggcagatcaaaatgatctgaagctcaaccttggtgttggtgcctatagaacagaagagttacagccttatgtcctcaatgtggtcaagaaggctgaaactcttatgttggagaaaggagaaaacaaggagtatctgccaattgaaggcttagctgcatttaacaaagcaactgcagaactattgtttggagctgataatccagtactcaagcaaggacgtgttgctactcttcagtctctctcaggaaccgggtcgctgcgccttgctgcagcatttatacaaagatatttccctgaagcaaaagtactgatcatctcccacttggggcaatcacaagaacattttcaatgatgcaaaggtaccttggtcagagtaccgttattacgaccccaagactgttggcttggattttgagggaatgatagctgacatacaggctgccccagatggatcttttgttctgctgcatggttgcgctcacaacccaactggaatagacccaactccggaacaatgggagaaaattgcagatgtcattcaagagaagaaacacatgcctttctttgatgttgcatatcagggttttgccagtggaagccttgatgaagatgcatcttctgtcaggctttttgttcaacggggactggaagtgtttgttgcgcagtcttatagcaaaaaccttggtttatatgcagaaagaattggagcaataaatgttgtctgctcaacacctgaagtcgcaaacagggtgaagagccagctgaaacgattggcacggcccatgtattcgaatccccctattcatggtgctaggatagttgccaacgttgttggggatccaaccatgtttggtgaatggaaacaggagatggaagaaatggcagggcgtatcaagaatgtaagacagaagctttatgatagtttgtctgcaaaggacgacagtggcaaggactggtctttcattctgaggcagataggcatgttctcctacacgggcttgaacaaaactcagagtgataatatgaccgacaaatggcacatatacatgacaaaggatgggagaatttcgttggctggattgtccctggctaaatgcgagtacctagctgacgccatcatcgactccttccataacgttagctagacgaggattcaggtcactgctattgtggttaatccttcaatatgctgggatttttggttccttccagcttgagttcttagccaggattgtatatccggcgctacgtaatttggagataataatgaattttgtctgtgcaacaaactttgcatatgctttgtcgaatgtacactggcactatgttagaagcttgaaatatcgaattgaataataatgagactagcaataagccaaactaattcc

SEQ ID NO: 22232 - DNA, 2428 bp, Oryza sativa
  ref <308>: DATABASE ACCESSION NUMBER: AK072427
  ref <309>: DATABASE ENTRY DATE: 2001-12-06
gttgctaatgaaaaccccaaaaaaccatcactaaaaccacgcgagggaggagagtaggagacgactccaaaatccaaatccagtggtcgccgtcgccgtggtcggtgggtgccgcgcggaaaccctagcttcccccgcgggtggaggaggaggaggaggagaggggggagatgtcgtcgtggctgaggagcgcggtgagccgggcggggcggagcggcgtggcccgcgccgtcagggggtacgccgacgccgtcgcgcaccacgccggccaggccgtcgccgacatcctccaggaccgcacggactacaaaagttttaagaaaacagtagcacgcttggaagaggcagcagtttcatgccgtggaggcgaaagagttgaactgttaagacgttggttgggagcgttacaagacatagaggctgaacttagcggatcagatttgaaggatccagaagatcgtgatccttctagtgaaacagatatttcaaaagcaccattggctttgttttatgatgctgacattgaaggagggcctatgaacttccgtgatgtattcctatacagtcaagcactggaggggattacactgtccatggttcttgaagctccttctgaggaagaagtttctcttcttttggaaatttttgggctgtgtcttactggagggaaagaagtcaacaagaaaatcatggacactgtacaagacttggccaaggcgctttcaaattacaaagatgaagtcctggtgaagcgtgaagagctacttgaatatactcagagtgtcatttcagggctaaagaggaatgctgacattatgaggatagatgctgaaaccctcgagttgtggaaaaagctagatgagaaggagaaatcacgagcccagataactgaagatcaagataaatcgtcagggaatatttctgttgaaaacattgagggtttaaaagaagcacttattgaagtccgtttgtgctctagagtggaagaacttgtactgaagaagaagtcaatatcacctggagactctctggagatccattctcagaagattgataaattaaagatcttggcagattcccttgcgaattcatcctccaaggcagagcagcgtattttggagaacaggcgccagaaagaagatgctctgaacttccgtgttaagaaggagaatgaagtgagcacagttgagaaggaggtgcttgatgagattgctgaattggagaagcagagagatgaacttgaggctcagctgaaaaaggtcaatatatcactaaatgctgctgctggacgcctcaagaaaaccagggaagagagggaccaatttgatgaagcaaacaatcaaattatatttaaattaaaaacaaaggaggacgacctctcaaaatctatcgcgtcatgtaatgtggaagccaatgtagtcaagacctggatcaatttcctcgaggatacctggcagctccagtcaacatataatgaacagaaggaaaagaaaacatgtgatgagttggagagatgtgtgagtagttttctgaagttgaccaaacatcacctttcagtcttcaaggaggtcctaagcccgtcaattgagagtatccgaacatatgtggataacttggtggtcttgaactcaagggaagagacaaaacaagatgaagatgatgaagcatccgagaagacaaacccacgaataagccttgaagaggaatatttggaaactgaaaagaagatcataattgctttaagcattgctgatcacataaagaagttattttactctgagcaatgggctaattctaggagagatgatccagaggtcaagaacctaattgccgagatcgagaaattgaggggagaatttgaatctatagaaaggccaatgctaagcatagaagctaataaatcaaagccactacctgaggagagatctgaattgagcccttcaccaatccgggcacccgctacgcctaaggctgcacacgtcgactctccaaaatctcccatgaagcccgagcagcatctgaatcctgacaatgagctcgcaaacctgggagcagaacttggatcggaggacagagatttttcaggtgaggagattaacgggtgggagttcgatgagctcgaagaggacctgaaaaactgacatagctgggatcaaagcaacaaaaatagcaacatgttcatgtacgccccccagttctgtttgatgtacatatgacaacttcgttcatttgtattgtcgatatttcaggacatgcagattgaactttctaagtcttttaaccttggcaaggcatttgctatttgtttgtcttgccatgagatgttgcatcattacatgtacacttgaatacagattttactgaatactgttgtaacatttgcaaagacagacaataaatgttttcaccgacggtcgatcagtttgct

SEQ ID NO: 22233 - DNA, 632 bp, Oryza sativa
  ref <308>: DATABASE ACCESSION NUMBER: AK072428
  ref <309>: DATABASE ENTRY DATE: 2001-12-06
ggccgagcagagcagcgaagagggcagcgaagtcgccgacgaggaggaggagaaggagccatggccgccaggagcttccaggcccggtcccccaaggaggagtccgacgccgccgtccatgaggcagtcacgctgggattgaagaacgcagccatatctggtaccgtggttgcggtccccacgttggttggttgccgtgtccttccttgggctaaggctaatctcaactacaccgcacaagcactcatcatatcagcagcatgcatcgctggcttcttcatcactgctgataaggccattctacggaacgcaagacagaacaccattgggaagattgacaggtcaacctgatgcgcaactgtacatatgagaacgttgtactgattatccatttcttcgatagcaggcgaggttgatgggagcaataggaatccatctctattattccgttcatccatggatgattggacgtgtactgcaatgaatcagcaatttttatgttttaatcttaattccttatatgaaaacctaacctcgcattgtaaagactagggctgttgccttttagaccagtgaatccagtttggttccaatttgaagttgaataaaagatggaaatgtaatgctctttt

SEQ ID NO: 22234 - DNA, 2380 bp, Oryza sativa
  ref <308>: DATABASE ACCESSION NUMBER: AK072429
  ref <309>: DATABASE ENTRY DATE: 2001-12-06
tactcctctccttgtttgcctcctttcttcttcttcttcttctccctcatttgagctgagaagttaagttggaaccaagaactatactagttatattatgtagaggaaacatcacaaaagaatatcagaaaataaaaagaaaccgttccatgccaccctgagattctcctacaagctagcccaaccaaggaaacagcaatttttaagctgtttctcttgatactcgatctacatcttttcccttagtttaacactctttttcagtgggtttactactcttgtgtggtggtggtagtggtagatcaagagccaagaagtccgggaaaaaaattctacttgtttcgtccatttggtttagtctgccaaagcagaagtcagtggcgagatcttgtttctactccattcgcatcattctgctgccaatttgccctcagagaagagggagattcggcagcggaagagagcggagtatctccggcgatggcggcggcgctggagtgctggtcgggccggccgagcaccgacgaggagatggtggagcaggtgctcatgaagccccacgtccgctcggacgattccctccccacctgcgccgacgcggccttcgccgccggcgagccgacgacggcgcaggcggcgccgaagaagtggcagcggctggggcgcaacttcgccggcgccatcgcggcgttcaagagctcgctgaacctggacaacggcagcctccctcgcgacccctcgccgcgcgccgtcggcgagaggccgccgctcctcgtccgcggcttccagcagctctactcccgcggcggcgccacccagcagctgccggagaagctcgtcgctgacctccgccgccacttcgacgctcttcccaacagctatgcacaggctggatttgacatgaaagatgtgctcttgcatgcccgtcttgtagagcaggcagctggtgaggatcagcctgcagtgagtattgaggaagttcctggaagcaatggcagaggaggtgccaatgaaggaactgtttttcagctcacttttgcctgcagtgcaccactttcatggcagtcaatgtcaggctcacttgatagtccttcattttgctgcaagaggatccagatcttcgagaagagaggattgacgcttggtgttgtaatgatactcgtgcagcctgggaatgaggtgttcttcaagaaccgggtcgacgcagcactgaaatcagcaataaagaagcagcggaagaacagcggcggtgttaagctcccatttgggctctgtggttgtcaagaagaaggttcaagaaactttgatgaggaatctatgtttgatccagatgatggtcaggttcttgacaatgagccaacttgcaagccacagctgcctaccccactaccacaatcatcagtttttgtttctatagactagtggcaaaccattcgatctggtggcgaggagcttggccgctggatgctgagctctgaggaaatcgagtttattgattgggttggtccaaattcattcaagggtgtttttagaggaaggaaggtttgggtcaacaaaatgaggggctgtgacatgggaagtgcttatgatgttgaaatccgtcaggacttgttgcagctgatgagctgtggccagaggaacatcctccaattccatgggatttgcttcaatgagaaccatgggctctgcataataacaaggatgatggaaggaggatcggttcatgatatcatcatgcagagaagcaagagattgtcactccgagacattcttaagatcgctattgatgttgctgagggtttggccttcatgaacagctacgcaattacctatcgtgatcttaacgctcggaggatcctgctcgacaggcaaggaaatgcgtgcctcggggatatgggcattgttaccccttgtaataatgctggtgaggtcaccgagtacgagacttctggctatcgatggctagctcctgagatcattgccggagatcccgagagcgtgtcggagacctggatgagcaacgtctacagctacgggatggtgctgtgggagatggtcacaggtgaggaggcatactccacatactccccggtgcaggcagcggtggggatcgccgcatgcgggctgaggccagagataccaagagactgccctcatttcctcaggtcactgatgaccaggtgctgggacaacaaccctctgaagcgcccccagttttcagagatcatctccatgctgcaaaggcagaatgtcagatagtttttctccttcttcttcttcttcttttcctatgctgcatatctgcttttgtctggctgtttgccccaatcatgcagggaactgcatatgagagaatataatatatgtgcaaaggcttgtt

SEQ ID NO: 22235 - DNA, 2157 bp, Oryza sativa
  ref <308>: DATABASE ACCESSION NUMBER: AK072430
  ref <309>: DATABASE ENTRY DATE: 2001-12-06
gcttttgctcgtcgtccgtggtggaggcgcggtggggtggggaaggagtgtgtttcgtgtgctgtgctgggctcgcgcggctctcgtcccgggctcccggcagcctggggtttctctccccgtttctgtttctcggtgaggacaatttatgtttcattcctgcgtgaccaatctaatctgaacctacgttgggtgcgcaaaagcccttgaatgcaatggaagggggtgcaactctagctgataaggctgaatttaaggaatgtctgcggctgacctggagccagccttacattcttcagcttgttttctctgccggcatcggtggtcttcttttcggatatgatacaggtgtcatatctggagcacttctgtatattcgagatgattttactgcggtcgaaaagagcactgtacttagggaaacgatagtgagtatggctgtagctggagccatagttggagcaggatttggtggctggatgaacgacaagtttggaaggaagccttccatcttgatcgccgattccctgttcctcgcaggtgccttgatcatggcccttgccccaacaccgtttgtcatcattattgggaggatctttgttggtcttggggttggaatggcttccatgacagcacctttgtacatttctgaagcctctccagctagaatcagaggtgcacttgtgagcacaaatggacttcttattaccggagggcagttcatggcatacctcattaatctggccttcactaaggtaaagggaacatggaggtggatgcttggcattgcaggtcttcctgcttttattcagttcatattgatgtgtatgctacctgaatcaccaaggtggctatacagacaggataggaaagaggaggctgaagccatattaaggaagatttaccccgcggctgaggttgaagaagagatcgattcgatgcgccgatcaattgaacatgagaaacaactggagggctccatcggcgagcagagtctggttggcaagctgacgaaggcactgagcagcaaggtcgtccgccgtgggctcatggccggcgtcatcgcgcaggtcgcccagcagttcgtcggcatcaacaccgtcatgtactacagcccgacgatcgtccagctggccggcttcgcgtcgaacaacacggccatggcgctgtccctcatcacctcggacctcaacgccatcgggtccatcgtcagcatgttcttcgtggacagggccggccgccgtcgcctgatgatcatcagcctcgtcggcatcgtcctgtggctcgccgtgctcggcggcacgttcctcggcgccgcgcaccacgcgccgccggtcagcgacctggagacgcgggtgttcgccaaccagacgtgcccggagtacagcccgagcgcccgctggaactgcatgaactgcctcaaggcccagtccacctgcggcttctgcgcccacggaggaaacaagctcctccccggcgcgtgcctggcggcgggcgaagcgtcgcggcggacgtgccacgcggggaaccgggagttctacacggaagggtgccccaacaacttcgggtggctggcgctggtggcgctcggcgcgtacatcgtctcctactccccgggcatgggcaccgtgccatggatcgtcaactcggagatctacccgctgcggttcaggggcgtctgcggcggcatcgcggcggtggccaactgggtgtccaacctcatcgtcacgcagacgttcctgagcctcaccaaggcgctgggcacgtcggccaccttcttcctcttctgcgccgtctccttcttcgcgctcgtcgtcgtcttcttcaccgtgccggagaccaagggactgcagttcgaggaggtggagaagatgctcggggagaaggactacaagccgtggaagagataccgtcccgacgtgtcgtccaaagggcgcgacatcggcctctctgttccatgaaaggaagaagaacagtgtttggtttcaagttatttgggttttaactagcaataatctgtactcagtttacatgtagagtggccgttgccaatagaaattaatcagttgtttcattgtgtgacacattttagagccttttcccctgtgcttagaacgtttgatgatttttatataagtaaattgcgtcttggtcacc

SEQ ID NO: 22236 - DNA, 1818 bp, Oryza sativa
  ref <308>: DATABASE ACCESSION NUMBER: AK072431
  ref <309>: DATABASE ENTRY DATE: 2001-12-06
ggtcccccctcctcctcgtcgtcgtcgtctcacccaacgaacttttccggcgaactccccgacgagatcgatggccgccggcgaacggcaatcgaacaaggagtactaggacgcccttctttgttgtttcttctcggcaagatcagttggttggcaccacctgccattcttggtttggaagtgtgggagggaggggttcggttggtcgatgccgttgcggttgccgtgcgcgatggagacgaggccaccgcgggcggcggcgccggcgccggcgagggtgtcgaggttccggaggctgcttgtgcgggtgtccgcggagccggagcgggcgggcggcggcggcggcggggaggtgagggagaaggaggagaaggcagcggagatggaagtggggtcggtggggttggaccggatggtgctcagcttcatggaggattccgccgccgccgccgtggagcggcccccgcgtggccgctgcggcagctgcttcaacggcggcggggacggcagcgacgacgaggagttcgacttcctcccctccgactcctccgccaccgccgccgcttcggccgccgccgccgccggcgacgccctggacgcgttaaagggcttggtgcagagcgcgagcatggcggagaggaacctcctcgccgacgcgtcgaggatcgccgagaggtgccgcaagggcggcaagaagaaggccgacgtccgctgcgccgtcgccgacggcctcgccgccctcggctacgacgccgccgtgtgcaagtcgcggtgggacaagaccccctcctaccccgcaggtaaactaaacctcgcccccaattcgatgctgctgaatcgccggcgctgaccggcggcgacggtgggcggcgcaaaccttgtgcaggcgagcacgagtacatcgacgcggtggtggcggcggagactcggctggtggtggaggtggacttccggtcggagttcgaggtggcgaggtcgaccaaggcgtaccgcgcggcgctgcaagctctcccgccgctgttcgtcgggacgccggaccggctcgggcagatcgtcgccgtcgtggcggaggccgcgcggcagagcctgaggaagaagggcctccacgtcccgccatggcggaagccggagtacatgcgcgccaagtggctctccccgcaagtcctccgctgctccgacaagccgccgccgccgccgccgtcgcccccgcccacgccggtatcgctctccagcttctccggcgagttcgagctacgcttcgacgccaagaccccaccaaacctcagcgccaccgccgccggcgacgacaacgacaacgacaacgacgacgaggtcgaggcgaagaagattacgatggtggtgtccccatcgccgtggcgcccggtggagccggaggcggcgagcaagaaaaggtcaccgccgccgccgccgcggcgccccgaggggaaggtggtgaccgggctcgccgccgtgctctaaccgcggcgaagaactcactttactacactagctaattaaccagctctcctccctcgccaattttctctgttttttttttcatttttccatcgccgctttgatccgtccgaggcttagctcatggtgttttctcagttttttttccgattttttggaaaaagacatttacagaaaacacctccatttttcttttttcttttttttattctagaacaaattttggtttccacaaaagggaagtgcaaggagcagtagctgtgacagcttctaggccccctattgttgagaagaggatgaaaaatgaaagtatgaactagagatatgcaacattatctggtt

SEQ ID NO: 22237 - DNA, 3872 bp, Oryza sativa
  ref <308>: DATABASE ACCESSION NUMBER: AK072432
  ref <309>: DATABASE ENTRY DATE: 2001-12-06
gctcccctcccatttcttccttccttgccccctcctcctcctcctcctctgcctctatctatcccctcctcgcctacgcctcgcatcgccctccggtgcctcaagttttttttttccgcgtcggtatcggcggcgaagcgggcgcctcctccacctccagatctagggttcccgccgcccagggctctctccccttccttctcgaggcttagccaaacccagcagcacgagtgaggctgcgccatgagggccaccggggagcacaccgcggccgtccccatccccgcgccgccgcagctgccggctccgggggccgtgacggaggacgccgctgagaaggagaggaggcggcggcgacgcgcgccgcggaggaccaagcaggccgcggcgcagcaggaggagccggcggcggcggcggggccgaggtcgtgcagatcgatgccgcccatgcacgtgagcgccccgttggatgccgaggcggtggaggaggaggaggccgcggggacgagccggtcatgccccttgctgcccacgccgagccccgtggaggcgctgcccgtggcgggaatgggacgaggagctgctgggaggcggttcttccagtcccactggcccgaacaggccgtggaggaggcgatcaagggagggaatgccttcgtggggaagttccgtgtgaatgcacacaaccgaaatgaggcgtactgtacgattgagggtataccagtggatgttctcattactggggtggcgcaaaaccgagcgattgaaggtgatcttgttgctatgacacttgaacctgttgcttactggactagaatgaaaggaccaaacattacgtgcaaccctgctataggagagggttctgctgttcgtgaagttggtgaaacaaatgggaatcatgatgggaagaaaggtcagacagatgccaactgcaggtttggaaattgcagcaatggccaacctgtttcggacaggacgcattaccgtcacaagaacagtggttttagtaaagctgttacgtgtgaaaatggtcatgctactgtcccagaaaattgtggaaaggacttaggtgaaggaaaatctgaggcttctagagcattgcataggatctgttctatggtatactctaacccaagcagacgtcccactggaaaggtattagctattattaagaagtctcctcgccgtgacactgttgtaggttttcttgctcctttcgcagtgtgtcctgatccagagcagcagaaaaatcagatgagtatgctttcaaagaggatgaaccatagagcatcatcctatttttcaggactgattcttctcttgccaactgattccaaattccctcatatggttgttaatgttagtactttgccagatagtgtcagaaaccatttggaagaaggtgatgcagctaaagaattagtcgctgcacgaatttctgattggaatgaggaaagtctctatccctgtgctcatgtcatacagtgttggggaagggtggacaagtcaaaacacacatggatgctatactttttgaaaatgcaatatctgatgctgaattctctcctgagtccatggaatgccttcctgatatttgctggaaaattcctcaggaagaacttgaagtaagaaaagatttgagaaatgtcttgacctttacaatagacccccctactgcaactgatcttgatgatgccatatctattgagatgctttcagggggaattgtgcgtattggggtgcatattgcagatgtttcttactttgttcatcccgagactgcactggatgctgaagctcagatccgatctactagtgtttacaccttacgacgcaaaatatcaatgttgcctttgagactttcagaagatctggtctcccttaatcctggggtagacaggcttaccttttcgatcatttgggacatagatcctcatgggaacataattaatcgttggattggacgtactgttatttcttcatgctgcaagctgtcatatgatcttgtgcaggatttgatttgtagcgatggaactaagtttaaatctgcttcttctcttcaagtacatggcatatttgaacaagatgatgttatcaagtcccttaggtgcttatatgagatctcaaagaatctgaaggagattagatttaagggtggagctttgtcccttgaaactgcaaagcttatgatccaatttgatgaaggtggagctccatgcgatagctttcgctatgagaggaatgatgcttgttttattgttgaggagttaatgttgctagcaaatatgtcagctgcagaagttatatccaatgcattcccaaattgtgcgttacttcgtaggcaccctgaaccgaatttacggaagtccagagagtttgaggcattttgtgctaggaatggttttgaattggatggttcatcatctggtcaacttcacctttcactttctagaatgaaggaaaagttaaaggatgatcctgttttgtttgatattctcatgttttatgcttcaaagcaaatgcagtcagcagaatacttttgcacagcagacctgataagcaagagggatgattgggctcactatgcgttatctgtccctctatatacacatttcacatcaccacttcgaagatatcctgatataattgttcacagaacactgaatgcagtaattgaggctgaaaagatgtatctgaaacacaggagatctctcacaggccaaaacggattcaacaccgcatcttgtgagatgatgcacggatgctttacaggtctccaatttagtaaggatgctgctgaatccaaagaagggagtgaagcattatctgctgctgctaagaagtttaaagtcccttcccctgataatcttggagaggttgctgaacactgcaacgaaagaaagtgggccagtcgtcgtgcagaagatgctggtcagaagctctacatgtgggccttgataaagaggaaagaggtcctggttgccaatgctagagttctggggcttggaccaaagttcatgtcagtttatgtgcccaaactagcgatggaacggaggatacattatgacgaagttgagggcctatctattgagtggttggaagccactggaacattggtgcttgattcatgcaggaacaggcctcctcaaaggaggggaaatcaggtgaagtatagagcatttgaggaagtcgccatgatggttaacccatctgaatcaatattctccgaagaagatgaggaatctggagcaacagaagctggttgtgacactgccaagtcagttttgctgagtgatgaagcagtgaaagcgcaagttgccccggccgtcctgcctctggtgatacaatacttgagcgaaattcctgtggttcttcatgcgattggtggtgaggactctgcgttggacattggagtaagactatacatgtcatcatatttcaagtgataggaaataagcattaagacagaaatctattttctttggtgaacaacagtaataaaaaaatgacagaagagtagcatttaaaagttcctttcagggttcagcaagcaaatatcaactagtgttgcagatgctccattcctgtgtagcttctttctccgttatcatatttacctccatttgacatccaaggttctcgcggtcaagtagccttccttttttacttcaggccacttgaccaagtcccagattcagctttgacagaagactctgtatcggtgatgtattcattagttgctccttagatgcttttgttcttgtgttgagccacctgcagttttttatactggtgaactcttacacatgtttgtcatcttgctttgttactttggaaaagaataaaaatactgaagctttattgaatatttc

SEQ ID NO: 22238 - DNA, 2503 bp, Oryza sativa
  ref <308>: DATABASE ACCESSION NUMBER: AK072433
  ref <309>: DATABASE ENTRY DATE: 2001-12-06
gactaccaccaccaccaccaccacctccacctcctcccccctcgctgccggacgacgagctcctcccccctccccctccgccgccgccgcgccggtagaagatggctgacgccgaggatatccagcccctcgtctgcgataatggaactggtatggtcaaggctgggttcgccggagatgatgcgcccagggctgtcttccccagcattgtcggccgccctcgccacaccggtgtcatggtcggaatgggccagaaggacgcctacgtcggcgacgaggcgcagtccaagaggggtatcttgaccctcaagtaccccatcgagcatggtatcgtcagcaactgggatgatatggagaagatctggcatcacaccttctacaacgagctccgtgtggccccggaggagcaccccgtcctcctcaccgaggctcctctcaaccccaaggccaatcgtgagaagatgacccagatcatgtttgagaccttcaacacccctgctatgtacgtcgccatccaggccgtcctctctctgtatgccagtggtcgtaccacaggtattgtgttggactctggtgatggtgtcagccacactgtccccatctatgaaggatatgctctcccccatgctatccttcgtctcgaccttgctgggcgtgatctcactgattacctcatgaagatcctgacggagcgtggttactcattcagactacaaaaaccagctgcatcacaggagagagcaggcagagaggcagctctccagctcgcgtttggggttgaccagttactccggcgaaccgacggcaagccggcgccggcggcgagggtcgtcgggagcggaagagagggagaaagaatggccaccaccgcctccgtccgacctcccctgctccgacaagcagcaggttcagaaaaagcctcactcctttgcaaaccaaagcagagagcttctgtcagaagaagaagcttcactgccagggccagctcgaatcctgtgagcatcccgaagcaatggtacaacctcgtcgccgacctgccggtgaagccaccgccgccgctgcacccgcagacgcacctgccactgaaccctagtgacctgtcccctctcttccccgacgagctgatcaggcaggaggtgaccgaggagcggttcatcgacatcccggaggaggtcgccgaggtttacaagctctggcgcccgacgccgctgatcagggcgaggaggctggagaagctgctgggcacgccggcgaagatctactacaagtacgaggggacgagcccggcggggtcgcacaagccgaacacggcggtgccgcaggcgtggtacaacgccgccgccggggtgaggagcgtggtgacggagaccggcgccgggcagtggggcagcgcgctgtcgttcgcgagcagcctgttcgggctcacctgcgaggtgtggcaggtgcgcgcgtcgtacgaccagaagccgtaccggcggctgatgatggagacgtggggcgccacggtgcacccgtcgccgtcggcggcgacggagtcggggaggaggatcctggaacgcgacccggcgagcccgggcagcctcgggatcgccatctcggaggcggtggaggtggcggcgagggacgccgacaccaagtactgcctcggcagcgtgctcaaccacgtgctgctccaccagacggtgattggggaggagtgcctggagcagctggcggccgccggcgacgtccccgacgtcgtcatcggctgcactggcggcgggtccaacttcggcgggctggtgttcccgttcatgcgcgagaagctcgccggcaggatgagcccggcgttcaaggccgtcgagccggcggcgtgcccgacgctcaccaagggcgtctacgcctacgacttcggcgacaccgccggcctcacgccgctcatgaagatgcacaccctcggccatggattcgtccccgaccccatccatgcaggagggcttcgctaccatggaatggcgccactaatctcccatgtgtatgagcttggattcatggaagccattgccatccaacaaactgaatgcttcgatgctgcgttgaaatttgcgcggacggaggggatcatcccggcgccggagccgacgcacgcgatcgcggcggcgatcagggaggcgatggagtgcaagaggacgggggagaagaaggtgatcctgatggccatgtgcgggcacggccacttcgacctggcgtcctacgagaagtacctgaggggcgacatggtcgacctctcccactccgacgagaagctgcaggaagccctcgccgccgtccccaaaatctgatcaatgcgatacaaaaataatcatcagtaaccaagaagaataatctctgttgttgtgttcttggcatgttgttgttttgccttggcgaccgtgttcatctgctgttgatttagggacgcatatggactgaataaatttgatcagtaaatgaagtagtttcccctaataggggaatgtttggc

SEQ ID NO: 22239 - DNA, 2402 bp, Oryza sativa
  ref <308>: DATABASE ACCESSION NUMBER: AK072434
  ref <309>: DATABASE ENTRY DATE: 2001-12-06
gcttttcctgctatcttgggctcttgcctccttggtggactcgccgccgactactctcggagaaggaaagagcgaagaatggccgcctcatcgtctctcagactaatcctcggctcctcgtcggcgtcgcgccgccagattctcgccgagatgggatacagcttcacgcttcttagtgcggatattgacgaaaaggagatcagaaaggagaagccggaggagcttgtggtcgcgctggctcatgcaaaagtaactcctttcctcctcctgttattcaagaacttggattctagttccttcgctaggaaggagaagtactgaagtactttcttaggaaggatagagaagagggggaggggagttggacctagcctgacaatttttggtttggttgtagactacttgtctattacaactattaaagagatagaaagagaatgtaacatgttacatgttcactctacagggctagaaattctgctttagttagaggaaaaaatgattttggtgggtttggattatgatagtgtagattggttgcatatacactagaattgttacatttggactattagtgtaattatacttttatcaataggtataaaaattgtatagcagatatattttcagagggatagtctattagtttcacttgtgtgggtcagcaggacgttcggctaggttttactatttactgcgagagaaacattttagggggacattttggaggtttgggcatgaaaaggtctgtccttttatcaacttccattaatttattgtatctgcttcaaaagttttatgttttcctggttctagatacaattttctttcagtgctgtagtgcagaactgcagactacagttcaactgtgcagcacattctgaattaggcattgactatgtactatgttactatggtttattaattttgcaggcagatgctataatggagaagctgagggataatgggatgatgaaggaaattcttgattctcaagagactacactgttgataactgcagaccaggtgtgtggcttacatctacttatgagataactgcttaatagtcagtaatgtgttgtggtgagatgattttaactagtttgtgtagatattgcagccaatttaaacaaacactagtctaggctgaattgttgttaaaagcgttcttgtggctgcatatttcaaaattgggttcagctgcttgtgttttttttctctgtttgattttaaacttatatgccgctcaaaagataatagtattgaccatcaaacatgcctattgattataagggcagtctcatagttattagggtatactaggatgggttctgaaggagtatgtgtaatattactgattgatccatctccagaggcataacctgtttgtttgcctgactcatattcatatgcttggcatcttgccattgttattttgatctgtagtctactcatgtttgatcagttatgcactgacttatagataatcataagcattcctatgtttgtgatttccctatgacttgtaacggaaaattggaaactgaaccttccatagccattgctaactaccttcatctgtttgtcatgactcatgaggcaaactagtttttgtagggcacattattatgacattagtgatttatggcttcatgggtaatcatgtttagcatatgcttggtctaaccgaaatacttagggatggttctgtagtaaaatgcatcattaatggcactcaactcacatgtatttagatgaacattttggttcttatttgttttttatccttctcatttttactttctgatggaggttgtggttcatgatggagtgattagagaaaaacctagcaccccagaagaggcacgaaagttcatcaaaggatactccgaaagccatgcagcgacaattggatctgttcttgttactaatgtgaaaagtggagccagaaaggaaggatgggacaaagctgaagtttatttccataagatacccgatgaagttgttgagagtttgattgaggagggcgatgtcttctatgttgccggtggcctgctggtagagcacccgctgacttcacctcttgtggaagctattgttggcaccatcgacagtgtaatgggactcccgaaatccctcacggagaagctgatcaaggagtcccttgaggagccatagctattttttttaccgggacaactgactgcccatgctgaagttcatatgctagaatttttcactcatctgctgcacaaccaactcgtcatccactctgcttggattggaggatggagatgcatcttaccgatgttgtcagcttgactatgctaagctacttgccgtgattggcattattgtagtaaaacctgagactttactatgtggattaatctgtttggatt

SEQ ID NO: 22240 - DNA, 1522 bp, Oryza sativa
  ref <308>: DATABASE ACCESSION NUMBER: AK072435
  ref <309>: DATABASE ENTRY DATE: 2001-12-06
gagcgcgcacatcgaatcgcatcgcacacacggcggaagcaacgccactagcctgacgtacgtacggcagcaatggccatcgccaccgagtcgcagcaggcgcaggtgcaagccgccgccaccgacgccgtcgcggcggcggcggtcgggcgcaaggtggtggacgaggtgtccggctggctgcgcgtgttcgacgacggcaccgtcgaccgcacgtggacgggtccccccgaggtgctcccgctgatgcagccggtgcccgcctacgccgagccgcgcgacggccacacgctgcacgacctccccggcgagcccaacctccgcgtgtacctccccgaggtcgccctcgccgagcggcgcctccccgtcgtcgtgcagctccacggtggcggcttctgcatctcccacccgtcctggctcatgtaccaccacttctacgcgcgcctcgcgtgcgcgctcccggccgtggtggtcgccgtcgagctgcccttggcgcccgagcgccgcctgccggcgcacatcgacaccggcgtcgacgggctccgccggctccgctccatcgcgctgtccgacgccgccgctctcggcgacccggcggcggagctcctccggacggccgccgacttctcgcgggtgttcctcatcggggacagctcgggcggcaacctcgtccaccacgtcggcgcgcgcgtcggcgaggacggggcggacagctgggcgcccctccgcgtcgccggaggcatcccgctccacccggggttcgtgcacgccacccggagcaagtcggagctggagccgaggcccgactcggtgttcttcaccctcgacatgctcgacaagttcctcgccatggcgctccccgagggcgccaccaaggaccacccgtacacgtgcccgatggggtcgaacgcgccgccgctggagtccgtcccgctgccgccgctgctggtcgccgtcgccgagcacgacctcatccgggacaccaacctcgagtactgcgacgcgctgcgcaccgccggcaaggacgtggaggtgctggtcaaccgcggcatgagccactccttctacctcaacaagtacgccgtcgacatggacccggccaccggcgagaggacccgggagctcgtcgacgccatcaagagcttcgtcgaccgccactagacgtggagatcagagaagcgcatcttctccaccgtacgtgtagcaccttccaggttgtgattgtttctcgtctcgtgtcatgactgtccgccatacgttggcctgagcttgaccttgtgtgtggcttgctgtccatgtcaagccgatatcatgtacgcatcagtgtttaggtacgcgtttgagtagttacaaataaataattggatcattcccgaacagtggactagttgaagacttgaagttgataggtcgagtgtgtggagtgtccaatgataaagggtggcattgcatatttgcatgtgcatttaaatctttaattactctatccgccatataatgtaaggtatttggtattttggcc

SEQ ID NO: 22241 - DNA, 1990 bp, Oryza sativa
  ref <308>: DATABASE ACCESSION NUMBER: AK072436
  ref <309>: DATABASE ENTRY DATE: 2001-12-06
ggatttctcctcccctcccctcccctccccttcccaccgcctccgcccttcgtcgtcgtcgtcgtcgcgcatggagtcacccgccgcgggcggcgcgtctccggcgccggaggctcctccgcccccgccgagggggtggatctccggcctcgtctccggagccggccggatcctcgcctccgtgctaggtcccgactcgcctgccgccgcctccggctccgccacgacgacctcagccacgtcgccgtccgcgtcctcctccccggcgtcgtccaggcatcccggttatattcgagatcatggtaattccccactattttttccgaaagctaataagttaaacaagagtgaaaatgaagcaattatgaaagattattctgaggcatcactagcaattatctcagagattgagccgaaggatgccataatgcagttacttaagcaggagacttattcaaggtctgaatgcaatgcactagtaaagataattcaagagcgggttgtggactcaaatttaaatggagttgatgctggtgggcttgctcttccaatcaattggaagactggcagacaagcaaatattggatattcttcattgagtccaaaaggattgttgcctgcaacttcaattcctccagtccaggaccatgtttttgataatagtgctggtgccggtgcatctacaacaatagctcatgataggggtcctttcgccacgctactgataagattcaatccgtactcaaaagaagttgctctgttgcaacggatacccctgaccctgaggactcccgaagagtcaggccaaaaattaatggaaattcattagaaatttcaaattttaagcaagtcgatgttattcgaactcattcaggagatgacaataaattatcagatgttcccctttttgggaccaacaatttaatatattctaatattgtttcaattgttgggagtgccgatgaaaaaataggcatacctaacaaaccttcagctggtgatggcaataaaaactatgattctgaatttttaaatccatgtaccaataaggatctgaagaacagctttccattgaaggtggaacctttggatgtttgtattcctttcgagcagcagatgatggatctctcacaccagaagcatgagcatgctgcatgtgatgattattgttctgtctcaaaattaatgtttaaggaggatattgagactgcactcagcatgccagtgggcgtgccgctagaaaatggttctaagaaccggagacgaagggcacccaacacgcagaggattaccccggcaaggtctcctgccaagggttcacgtcgcaagagtaatgatgtcacagtaaaatcagagaccgacttgctagagcaaagcaagggttcacatgatgtcacagtaaagtcagagatcgacttgctagagcaaagtaaattggcactgatggagcagtcaccagatttaggcgatattccggtgaagagaccagttgggaggccaaggaaggcaaaatgaatgctagacaaatttgatgtcctcaaatctgtccatggtcttatgtatatcatctctgaagaacctgaaaagtcacaatctctgaaggacattgcagccttcactcttgtacagatgtctgttccatctgacatgtgtatcaagtattagacagaaggaaagggaaacattgccatgtacccagtagtctaacttatgtctgttaattggtaaatgtagtaatgtactcaacatgtaggtgtagtgcatgtcacaaacttcatttgatgcatttctggctcttgcactcctgctgtctatgtgtaaagttctgatattcagggtacgtttgacaaagctccggatcttgtctggatcagaagtttgtaagttaaatcgaagtgatttaaaattgtacatttcatttagaataggaaccgaattattcattcaattgttactgacataatccctaattcaaatcatggatttctgg

SEQ ID NO: 22242 - DNA, 806 bp, Oryza sativa
  ref <308>: DATABASE ACCESSION NUMBER: AK072437
  ref <309>: DATABASE ENTRY DATE: 2001-12-06
gaatcccctcccctcccctcccctcccctctcattcaatccccactccaccactggcccctacagcgtcattgcaagaatggtgacggggtttgaggttgagctgcggcggcggacttgagaggcgcgagcggcaacggaggtgccgggcggtgagcgacgccaggcggcccgagcagtgacaacgacgctggtcggccctagcggcgacggcgccggctgcggatcggggacggcgcaggctgcggatcgaggacgccgccgccgctcctctctccccgtcggctgcctcgccgctctcccctctctccttctagatctggtatgcctctccctctccaccctcactccacggctaaaccctccctctccaccgtcctctgtaaaaaaaatcaaaaacgggccggcgacgacaacgatggaggggaggtcgctttggaggagaggtcgccgaactccggatgggggcgggagcgcggtcgttgtgatatggcgtgaggagagagacatgctatatttcccctttctctctccggttttggcgcatgcgctagttttgaatgactggatggcgcatctgctggagctggttttttcgctcctatgcgccaatttagggatggagaatcggatagaggagctgctgggatgctctaaaggtttcagtacgtgcgctataaattttgtttagaatatagcttgtgcaataaacatttttatttttttaatgtgattatttgtatcacatcctgtaatatatatgactgaaaatgacttgcccgattttattagtatagttattcgatt

SEQ ID NO: 22243 - DNA, 2393 bp, Oryza sativa
  ref <308>: DATABASE ACCESSION NUMBER: AK099276
  ref <309>: DATABASE ENTRY DATE: 2002-08-28
gatgggccacaaccgagaatagcatcaaccttgccaccgctgctgcttcgccggcgccaatgccgatgtgagcccggcccggccgccgcacccccctccccctacggcgacgacgtcacgcgcgcgcgagatgccattgttgcttctgtgaggggggctcaccggaacgcgtcggcattgacgacgacccggacgaacgcgcggcagcatgatgccgcgcgtcctcatggcgtctacggaggacacggccacggcccctgccggtgggccgccggagcccccgccgcagtcgtcgtcggcctcgccgtcgccttcccctcctcctcctccaccgacaccgtcctcgcctcagcggcctcccccgccgccgccgccggccactccgcccccgcctcctccggcatctccaggcaaaaaccagagtcccgcgtcgccgtcccaagattcacctccgccagtggcgtccccgtcagtatcctcacctcctccggcaccgacgacaccgccctctccgcccccaccaagcaagtcccctccaccgccgtctccgcctcctactacgtcgtcgacaccgccatcgcatcaatcacctccggaagaaggaacctcgccgccaccttcgccatcatcaggggctacaacaccttcacctcccccaaatgcgcagtcgtcgtcgtcgtcttccacacctcctgccggcgcaggaacctcgccacctgcaccgcgcgaaatgccatcgcccgggacgccaccatcgccgccgacgacgcttattacgacacaggcgccgccgatccagccaccaccaccaccgggcggtaacagcatgatcatgccgagctccctaactacagccggcacgtctcagagcccgcctgacgccaccaccgccggcgcaccaccacctccggctccatcggtgggagcatggggcggcaacgtgccgagcgggttgctcatcggtgtcgccttcgccggtttcctcctggcgttggcgtccatgttcttgttcttgtgcatcaagaaccggtggaagaggaggcggcggccggcacaggtgatgaacctggcgcgcaggagaaccctcgtcgtgccggagcgtgtggcgtcgccggaagtgtaccagccgtcgaacggtccgacggcgtcgccgagcgggacgagctcgtacgagttctccgggacgacgtcgtggttcacgtacgatgagctggcggcggtgaccggcgggttcgcggaggagaaagtgatcggcgagggcgggttcgggaaggtgtacatgggggcgctgggcgacgggcggtgcgtggcggtgaagcagctcaaggtggggagcgggcagggggagaaggagttccgcgccgaggtggacaccatcagccgcgtccaccaccgccacctcgtcaccctcgtcggctactccgtcaccgagcaccaccacctcctcgtctacgagttcgtctccaacaagacgctcgaccatcacctgcacggaggaggcctccccgtcatggattggcccaagcggatgaagattgccatcggatcagcccgtggtttgacctacctgcacgaagactgccatcctaggatcatacatagggacatcaagtcggccaacatcctcctggatgacgccttcgaagcaaaggtcgcggatttcggtcttgccaaattcaccaacgattcggtgactcatgtctcgacgcgcgtgatgggcacattcgggtacctggcgccggagtacgcatcaagcgggaagctgacggacagatcggacgtgttttcgttcggggtggtgctgttggagctcatcaccgggcggaagcccgtggactcgtctcagcccctcggagaagagagcttagttgaatgggctcggcctctcctggtggacgcgttggagacggacgacttcagggagctcgctgaccccgcgctggagcgccgctactccaagtcggagatgcggaggatggtggaggccgcggccgcttgcattcgctactccgtcaccaagagaccaaggatggtgcaggtgtggcgatcgctggacgtggaggggagctcgccggacctgaccaacggagtgaagcttgggcagagcatggcgtacgactccaaccagtactcggcggacatcgagctcttccggcggatggcgtttgccaacgacctctccaccgctgagctcggctactccggcaaggacgacgtacgccgtccgccacgctagcagcagctccaggaccaggcccagctgagcactaacggcacatgcgctgttgttaaatttgttgtcgtaactaacacgcatgcatgtatgtaagacggggtggcagaattggtgtatatataaaaaggctttgaatagcaatcctgttgatttgggg

SEQ ID NO: 22244 - DNA, 2621 bp, Oryza sativa
  ref <308>: DATABASE ACCESSION NUMBER: AK072438
  ref <309>: DATABASE ENTRY DATE: 2001-12-06
gtcgaaaccctagccactactgttcccccgtcccttctcttcatttcccttgcccttgcgccgccgccgctttgccttctcctcgccggcgacgacggcttgcccctcgagcttttttgccgtccatcacgcgagggtggacgggggagttaacttttggctgccctctactgccatccaaaaaccctagccgcaccgaagtcgccgcctcctcacaaactcctctgcgcgttctccttcgtccaggcgctgctgtggtcgttggtgaatcgtcgacgccgtggtgaacctgcggagggaccagaccacgtggggctcggggcgaggtttggccgtgacgcctgtcgtcgcttcgtcgccctccccctgcccaatctctccatctctcttcccagttaagcagggagagtggtcatgatgcagaacgagggcgagagggtcgatctgctggccctgccactcgatccggtgggtagacgccggcctccccctcctgcgcttctcctcgccgccgacgccctcccttcccccaacacacacacacaccataataatactactcctctctcttcccagttcaagtaggggtggtggtgatggagatcaaccagggctgctggtgatggagaacgacaacgaggtgatcgatctgctggcctatcgctagatccggtgggtacatgcactcaagctcgccatgaagccgatgcaatccttctccatctccacagtgggttggcgcccttctgctcaagtttgaagctccgctgccgtgcggcgccgacactgtttcgcaattgcagatctggccagcaacaggtaatctgggaaccatctgtcgtcgcctagccaagggccatttgcaattgccttgccattgttatttatggtgtaatttacttaggggcaatggatgtatgcaacttcatcattaattgagaatccatatgtataggtattttgggaaccttttttttttttgccttttcctacttccacttcaattttactaggtgatattttagttccacaatggttcaccttgaactctttttctaaatgacaatcatatttaacgaaaccttcactgcatgttctgatatgattgctcaccatcatctcagccactatctcaaattgcttattacagtggtcggaggtatgatattttgcatgcctcttacaagtaatgctatggcctatgtaaatgtctgcaagactacaaggaatctgtgaatctatcctgctctgctgagggattctttattttagtacagtagagaactgagatcagtgcaaatcgagaattcaggctctatttctgctccttaacatcagaattgaagttatgtggcagattgtgttagaacaaaaaccttcagagaagctcaacatttactaatagaagtacgtttttggacttgtgatgcttctggtgaggtttttggactagaccaaccaatagcatttaggttgttgggctcggtgagatcattacaagcacttgaaggtaactctgttcttcatttggcctttaggatttgagaggcaaaaatcattggctaaaattacaaactgtaggtctggctaagtaattggatgattcactgtggtgctgatgcaagtcagcattggtagtctttgaagatgcagaatgaactctactaatttagggctaagccatgctgatttaaactgatatatatttagtgctcctatagcaattggtgaagaaattgtgtggaagtttctgttacaatgatgaaattaagaacatgtttggtaatatataaatactataaattggatctgaaacgtgttgtggtgagctatggcacaaaatcctctttccatgaattgaacacataatggttagaggtcggagattaatgatatggcctatgcaaatatctaccaagattcctacacccatcatgctctgcttagggacactgcaatttgctccagtagaacttgaaatcagtacaaactgctaagtgggctaattgctatactctttcactttctacacaattttctttggtgattgacattacattttttatttgttcttcgaaagaaaaatgaacctttcagttcctttccatgctgaaatttcatacgttgagtgccagttacaccaaaagagctgaatgcgtggagccacaaggttgcaggcaggtcaatatactttggagctgtgatctgttgctctgtagatcctgtgcagtcagaggtttggtttgctttgtaaggacgaattgattttttgaaactagaaactcaagtgaatttggcacacaccattatattgttcttattttgcatctgattttgaggtgaagttcacttggtcagttaagttatagccaccaaaggttccatatcagattccacatatctaaatgctcatttatattacatgaaatacttcatgaaccatttgtgcattttgtaggttgtacaaatggaaccttccatcccataattatggatatgaattggtaaataactctgtaaattaaagaaaaaaattccttttaagcttttgtacataactctgtaaatattttcgtgtcaaaaattacagatggtgatagtaaaattatatacaattgcgg

SEQ ID NO: 22245 - DNA, 2721 bp, Oryza sativa
  ref <308>: DATABASE ACCESSION NUMBER: AK072439
  ref <309>: DATABASE ENTRY DATE: 2001-12-06
ggactgcgaccaaaaatcccccgctcgcttggccgctccggcgatcccctcccccggcagcggaggcgaagctcactgtcgcaatcggcgcagctgagcggagcccttgcccgccatgacggagtactgggtgagccaaggaaacaaatggtgtgacttctgtaagatttacatagctaataacccgctaagcatcagaacacatgaaatcggtaagcgccacaaggacaatgtcactaaaagattggcaaccatgcaaaaggagggtgctgccaaagaaaagggagcagcagcaagcagcccgggccctcaagcaaatagaagctgtaagtttgtaatgctgtttttttccccagtatgttggtatcctaatcacctaatgtacatattgttatgtcacaaactacagagcttgtgaagggtaaacacttctgcattgataaaaccatgtaggctttttctttttgaatttatcctttcccttattgctgtgttgtttcaatttatcttgcaattggttgatttatgaactaccatgccttgttatttgtaacttactgttcactgcagaaagctaaaaagagctaccaaaaagatttagagaacagtcaaaggaatgtggacggggacacttctgcgccccctggagatggtgtgtatggctcaccgttgtctatccatagtttttttccatgcctgatcccctgcatagcctgttttcttttgtgccattagttatctctgctttgtataaaaaaaaaataggcctccatatctgatgaagctatccctaagcgcttttatttgccaacccttttgtgtaatcctaaaatataaaatgagtcctttggatgaggtactttctttttttagtaaattagtatggagtatttctttctgcaattccaattatatcaatactttaatcctatttattactcctggaattttctatttatggggacagataatacctcaccctaggaagagccgttttgaaggatgactaatttttagaggatatatgcttgctatcttccttcccgtcctttgtttaggatagtgaaaaatattttttccttttattttaggaattttgggaacatcctacttctctgttatgcttttgtaggatttttttagttgatggttaggttaattcaccaatcttgagagggtttagttggtcatgatttctgttttctctttttgttcactattttgagcttgtattaacttgttgtattagtcttatcttcttaattttttctcctgctgattctagtttttgacatgcttgaaatatattccaacctagctcatgtaatacaataccttggttagcagaaatgtctaactactgtcaattttcaaagcctaaaattgttttatcttaaatccgtccttcaaacatatctttctcttggctcaaatgtatgggaaaatatgtaacctggaaactactataggatgtagaaatgaatgtttgagatttgtccatgtcatcatgagtaaaacttttactaccaaattgagccgtgagtaatacttgctctgctactatgttgacgataaattttgctaacaattgcattaatgttaatgaaatgatgttagattttcatgaactgtgccctagcagaattattctggttagtatgcttaatactcttaagtctttactgatgattatatgtcattaaagacaggagaacagatgaacagaccagttcctacctttaactggaacactgagtagcatgaaccatgatgcactgtttgcatatgtgcgctgatcattctgtccgccagcactactacaattttcgctatttaacaatatttgttcaatctgttagataacatcctgtttgtgcaggatgggaattcgactctacttcaggatactattatgacaaatctactggactctattttgactcaaattctggtttctactattctgacggtttaggtaaatgggtcactcaggaagaggcatacgcatgggcaaaaacctcccaagctaatgctgggcaatcctcaagttcacaaacaaaaccaactgcttcagttgcgactgtccccacaattaaagggggccaagctccaggtttggtcgtcaagaaaccactgaatccgatgagaactgtaaagggtgctccatccgccattgctgttaacaagagcaaaagagaggacggcaagcccaaagtgatctcaaaggaggaggaagccgcccttaaagcgcgtgaagcagcaagaaaaagaatggaggatagggagaagcccttaatgggactatacagatcgtactaaggggcctccccataagaaatgctaatggatggattgttctgtaaaagaagatttgcgagattattagcgttgggtgtcttcaagagcgtcttctgcatcagggaagcatgtctgtagtgtacaatatctctggtaccaacaatatcctgaattggataaattccctttcctgaaactgttatctgtgaaacatgaaaaagaatatctttaccatgcctcctatgtttgaagcctcgaaagctccgaagtggtaatcaagatgatcaccaatagcaactacccctagtactgcagatatcgagctatgattaactgctcttttatgtgatacaccctctgttccatgaaaaatcacatcgtaatattatgaatctggatataattctattcagattcgttgtc

SEQ ID NO: 22246 - DNA, 691 bp, Oryza sativa
  ref <308>: DATABASE ACCESSION NUMBER: AK072440
  ref <309>: DATABASE ENTRY DATE: 2001-12-06
aaaaaaaacctccaatttaggtcgattccattcgaacattcctcctccaagactccacaagtccagagggagaaagtgtgagaagaatgtggcggaaggggaacaagcggttcggcggcggcggcgagccggcggccaagcgccgtgccgccggggacgacgggccctccgagagcgccgacgacgatatcgtcgtcgcccagatatcgaagaacaggagggtggcggtgcggacctggaacggcaaggtcgtcgtcgacatccgcgagttctacgagaaggacggcaagaccctccccggccgcaaaggtatacagctcccgatggatcagtggaagatactgagggacaatatcaaagctatagatgaggccatcaaggagaatgcgtgatcggagcccattctcttgtgatgcaagtagactaagcctacgtctgtcttttatgactccgaggaatattgcacttttggtatggtaatcttcattaccctgtctagtaatatcaagtaatgttttagtttggtcatgcgcggaaaatgtggccttgtctggtattgtgccaaagaagcagctatgtgcctaatgtgctctcctcattttgtacgttgggtaaggaggtccatctgttaatggttggttggtttctgcgtgtacttatgttttactttaaatctctaatgccgctttgt

SEQ ID NO: 22247 - DNA, 2682 bp, Oryza sativa
  ref <308>: DATABASE ACCESSION NUMBER: AK072441
  ref <309>: DATABASE ENTRY DATE: 2001-12-06
ggcttccctctgcgccttgggtgataacaaggatctctttctattgccctgtgattctttctttcatcgtcgtttgatattccccacaccactcttttctctctgttcttttctgtttgggtttgatcgcttgctcgttgagaacctctgcacgattcccgtgtcacaagcagttgaatcatgactgctcagccaaagaagaggagtgtaatagaaagtggagatggaggtcttggtcttggccttgctttatttatctcaaatggtgaagatttgggccctatcattcggcatggatttgattctggtaaacctgaagctctcatgcaaaacctcaggagtattgtaaagaaaaaggaagttgagatcgaagagctttgtagacttcattacgaggatttcatcctggccgtcgatgaactacgtggtgtgttggttgatgctgatgagctaaagggcatgctaactggtgagaacatacacctgcaaaaggtttctagtgccacattgttgaatcttgatgagctttttgagttatattcgattaagaaaaacataggagaagccataacaacgttgaagatatgtgtgaaagtcatcagtttatgcatggcatgcaatggttatattgcagaagctaagtttcatcctgcgcttaagactctcgacacgatcgagaagggctacttgaaaaatattcctttgaaacttctgaagaaggtagttgcaaaacatataccattgataaagatgcacattgagaagaaagtttgcagtgagtttaatgattggcttgttcatatcagaaggatggctaagcagattggacaggtctcaataagtcaggcctctatggctcgacaaaaagatgaggaaatgcgtgcccggaagagagaggctgaagcacatagtgatgctagatctgatgagcatgtgtacaccttggatgtggagaatacagatgaggaatcaacactaaattttgatctcacgccagtgtaccgggcacatcacatgcacatatgccttggtattggggagaagtttcgagattattactacaagaataggctaatgcagctcaacttggacatgcaagtctccacctctcaacccttccttgagtcccatcaacccttacttgctcaggtagctggatttttcattgtagaacaacgtgtacttcgaagtgctgatggtttgttgtctgaaagccaagttgaatcaacatgggagactgctattgctaagatcacatctatactggaggatcaatttgctcgcatgagtatagccagccacctcctcctcgttaaagattatgtcactttgttaggcacaactgttagtaagtatggctatcaaatcgcacaattgattcaagtcattgcgaaatacaaagacaaataccaccagttgcttcttattgagagtcgaaagcagatagatgatatccttgctaatgactcatatgagcagatgattataaagaaggaatatgagtataacatgaatgtcacggcattccattttgaacctgatgatgtagtcccggagtttccatatgtggctccattttcctctggtgttccagatatttgtcgtatcgtccggtccttcattggggattctgtcagctatttttcttacagtgctcgcacaaacatctatgaaattgtgaagggttacctagacaggctattgattgaggtgttaaatgatagtcttctgaacatggtttatgctcgctcgttagccatgtcacagatgatgcaacttgcaggaaatatttctgttcttgagcaatcctgcgatatgttcctcttgtattctgctcaactgtgtggcattccaaagcgtattgcgcagagatctcattccggtttgactgcaaaagctgtcttaaaagcctcccagaatgcagcatataactctttgataaatttggccaatttcaagattgatgaatttatggtgctcttggacgatgtcaactggatagtggaggaagccccagataatccaaatgaatatatgaatgaggtccttatctatcttgaaacgctagtatcaacagcgcaggagattttaccgctagaagctctatacaagatggtttctggtgcaatgagccacatctcggactctatcatgacaacacttcttaacgaaggcgtgaaaaggttcactgtcaatgcagttatgggccttgacattgacttgaaattactggaggcattcgcggaagagaaattttataggaccggtttggtggatttgggtaaggaaacaacattcgccgattgtttggttgaaataaggcagctagtcaatctcctccttagcagccagccagagaatttcatgaatccagtgataagggggaggaactatgggtcattagactacaagaaggttgccatcgtttgtgacaagtacaaggattttgcagatgggttgtttggaagcctttcaaaccgcaacaagcaggatgctcgcaagaggtccatggatgttctgaagagaaggctgaaggattttagctgattaaggttgggaatgtttgcctttgtaaataaattgtcattgcgctgctgaaaatgtcctttggaaactgccagtgtcagaccttccacctcaatttctaaacagacatatgaataggtcaagtttttaatctcc

SEQ ID NO: 22248 - DNA, 2094 bp, Oryza sativa
  ref <308>: DATABASE ACCESSION NUMBER: AK072442
  ref <309>: DATABASE ENTRY DATE: 2001-12-06
ggcagttactcctcctccccatcctcttcttctcctccaagtcatcccctccgcttccggcctcctccccgcgatccgctcgcggctgatccctcgctccggtgcggtgcggtgcggtccccgctgctgctgatctccggcggggcggggcggggagcgatgtcgtcgtcggagggggagagcgcgaaccctagcccctgccccgcggggcctgcggcggcggcggcggtggctggggcggcgggggtgggggtgggggcggcggcgtggccgaggcggcggtgccgggacgtgttctggctggtggtgttcctgctccacctgctcgtcttcggcggggcgctcgcgctgacggggctcaaccgcttcggccaggcggaccgcttcaacatcgaccgcttcaccaacctcaccgccgcgcctcgcttcgccgggtcgccggagcccgctcgggaggcgcccccgccgccgtcgctcgaggccgaggaggtcacccccaagtccgagctcacggagtcgtactggccctactacggcgccgcgggggccgtggggaccgccctcgcgtgggcgtggctggcggcggccgcggggaagaaggacggggggagggtggtcatgagggccgccgtgcacagcctcaccgcctacctcgcggtggtcagcgtgctctgcttctgggggaagcacttcttctggggcgtggcgttcgccgtcggcggagcgctgcacttcctctacgtcatgtcagttcttgataggttccccttcacaatgcttgtattgcagaaggcagtaagaatggtatgggaacttcctgatgtgatgaggatagcatatgcatttgtgttagtcatgctttgttggatggcattatggtcctttggagtgtctggcattcttgcttttcacatacctaatggagggcaatggtgggctcttttgattttctcagtcagtttattttggactggagctgtccttagtaacacagtccatgtcatagtatcagggatggtttttcttgttctcattcatggtggtcaagctgctgcatcgatgcccccaaaaccacttctaaaatcacttcagtacgctgtaacaacttcatttgggagcatttgctatggatcactttttacggctgctattaggactttacgttgggagattcgaggaattcgttctaaaataggcaacaatgagtgtttgctgtgctgtgttgactttttgtttcatatcgtggaaactcttgttcgcttcttcaacaaatatgcatatgtacagatagctatcaatggccagagtttcaatcgctcagctagggatgcttgggagttgttccaatcaactggcgttgaagcacttgctgcttatgactgttcaggtgctgtccttctgatgagcaccattttaggtgggttaattacaggaacatgtacgggtgtttggacatattttaaacaaagtgataaagctattatggttggctcaacctctatgctgatgggcatgatactggttggggtaactgttgtagttgtcgaaagtgcagttacatcgatatacatatgctatgctgaggatccccgtttaattcagagatgggatcctgatttttttgatcaaatgtcagaagcactacaccagcgactgcaataccgaagtgcgcgagctcaccaaatactgaacagccggcttgatcagttgccaaatacctcgagtatttgaattgcatgttaaatatttgaccatttttgtcggtccatcgaaagtgctgctgcaatttccagaacaaaaaagttctggaacttcctgcggtctaaatattgatctacggaacctttcagcctctgaaatatagaagaatgaagtgccccagcaatcatggtggccttcaaaacaacacgatgttgccaatcaagcagccatatgttcatagttgggtagaactgcaatgctggcctttctttgatctgtatgtatgcagctttgtagggaaaacagtaaagaaaatcttagtccagttgttgacttaggtcttttgtaactgactgagcctgctgccagcctcgtgaatggaaacatttcttc

SEQ ID NO: 22249 - DNA, 2438 bp, Oryza sativa
  ref <308>: DATABASE ACCESSION NUMBER: AK072443
  ref <309>: DATABASE ENTRY DATE: 2001-12-06
gagacaaatccattgctgggaagtgaagaagatgaaggagagggagaaggtggtgcgactggccaagctcgccgagcaggcggagagatacgacgatatggtggaatttatgaagacacttgctaggatggatgtggatatgagtgctgaagagaggcttttattttcagttggttttaagaaaactattggtgccaggagagcatcatggagaatccttgaatcacttgagcagaaggtgacagctggtgaccaaccaggtgtaacaataaatggctacaaaaagaaagtagaggatgaactaagggcagtttgcaatgaagtattatcaattattgctattcattgccttccattggccaattcgggtgaaaatgtcgtgttcttttataagatgtatgtgcaggttcatcaagtcaattatttgcttctcaattgtgttttacttcatatcggtctatttcctaatggttacattcagaatttattcccaaacaaacatcttattattatccaggcatattttgatgatgcaatctttttctttgtagaagaatacacaactttgagctcatgtagtgttttgaatagcattgacataacacatccatatgagtttctgactttctgctaaattctcttcctaagaaatgcttgactgaacaccttggtccaaagaattgcagaaggtgacaaacatgttgactttgctctgctttaaactttgacatcaaccaggttttaccaaatgatgctaaggtttcatagaatcaaagatttaaacataccagccatgactcatgtgtcattcctccagggactaactatgctgaccttttttgctcacagtatccaaaaacttataggtaacctcatgacatatagttttgctcacatggtcctaaagtttcagaataaagactaaattatcataatttaaagggcagtatgatacatatatatactgataaataaagggaaggcttctaaataagcaaggagttgaagagctgatctgtgccagcacattagcttaacttgtttatttatctaattctgcacagaaatgcaagtactttttttttctttagtgcacgaccatttgtagtgttggggtattcttcagaaaaggaaagggaaacaagacctaaagatgagatgaacctcttgattccccaactgttttcttagtcttggtctttaattaaatcatgttacacctggattgttctacattttagcctatacctgagcatagtttcttatgaagctttgctaagttgtttttccataataataccttctggtgaaagtttccataataattaaagtttcaataattatttactaagcttttggattactcaattatcttttccatcattgtttttcaagtattaacaatgaaaaaaaaaactgaatagtgcctcactagttctgaagtttcccctcagtacctcttgtttcagatattttgagattttctgagatgagatgttataagattatactaggatcttatgtgttgccctggtaatctatttaacaatgggcaggttggttttctatcaattaaccgaggatcttccctctatagtatgtgcatgttcgcacgatactcatgtgtatatcttttttctttaatctgctttatacatcactcttaaaaaaattacaggaagggtgactactaccgttacttggctgaatttagcactggaactgaaaagaaggctgctactgatcagtcccttatggcctatcagcacgccatggttgttgcctccagtgagctttctcctgcccatcaattcaggcttggccttgcgctcaacttttcagtcttcttgagataatgaactctcctgagagagctagccaagtggcaaaacaagcacttgatgaggctactgctgagattaactctgctggtgtggagggttacaaggacagcatgcttatgatgcagctcctgaaggagaacctggcattgtggacatcagaactaactggaggtgaaacatctaaggacgatgatgttgttatggagggctaactgtctgaaatgttctaaaggccccagcatgtgagcaaaacaatcagtaacattgtaacaatactgctactgaacttgcgacatttatcatgggagccgtggaaatcacctttatttttccctttcttctgtagtttcttttttttggccctcgcttgggtcttggtgtgactcccaaagtattttcagagtttggatttgataaccatgcaccagctttggttatattttgagatcttggagtggtcaccaacccagctttaatattagtttgagagtactttttttttccaatgcttgttaagcatctttgtataccaacgggatgatgaactatatatctcttaatgatgacgaaataaacgtctcttttgttaagatg

SEQ ID NO: 22250 - DNA, 1903 bp, Oryza sativa
  ref <308>: DATABASE ACCESSION NUMBER: AK072444
  ref <309>: DATABASE ENTRY DATE: 2001-12-06
aaaaaaaaaaaaaaaaaaaacactattctaaccctacctcctcccattggatccattcccgactcccgagtagcgaccgaggaggcgaggagcgacgcgccggcgccgtcgtcggtcgccctgccccccgccgccgcccgccgcccgcccggcgcatcccccgcgtccggcgcactcacgcgctaaccgccagcggccagccgggcgccgccgcgccggcagcagccagcagcgcgcccggccgcggcctcccctccagcagagcagcacggcagggcagcaggctcccactccagtccacacctccacggctccaccggccgacgaaggtttgaaacatgaagaaaaaaagtgctcccacaccccttccgccggagaccgccaacacctcgcccgctcccatcggcgccaccgccggaatccgggttgagaactgctacgtcttcaagagccggctgcaagagtatgcgcagaaagccggcctccagactccagagtatcatacctccaaggagggaccttcccatgagcctgtcttcaagtccacagtggtgattaataacaccagctatggctccctgcccggattctccaacagaaaggctgcagaacagtctgctgctgaagttgccctcatggaaattgtcaagtccataccagccaacgcaaacatcccagctgttcaagagactgggctgtgcaagaatcttcttcaggagtatgcacagaagatgaattatgccattccatcttatatttgcaccaaaccagcctcaggcttggctcctttcttatgcactgtagagattggtggaatacaatatattggtgctgcagccagaacaaagaaagatgcagagataaaagctgcccgaactgctcttctggcaatccaaggtcaatcagagggttctgcaaatggtgcgacaaaatatatcgtagttcctggtaaaagggtaggtaaggaggtagaaaaaaggccaattgaaacccccaaaccacttaaagcaaagaaaggtggtttcaagaagaaatggaacaagaggaaattcatgaagaaggatggtcaagctgttgatgttgaaaaggatgaagctagagtggctggagatgctcatgattctgatgtcctaatgcagccaacggtaataacacaggaggcatcttgtggcactttgttcctgcaaccttgtgaggaagctaaaagagtagaagatgagccacctagagatattgaaatggtacaacctgataaggagaaccaacacagtgacgctgcattggtgcaacctgatgatgaagctagagtagaacaggagccatccagagatatttcagtggtgcaacctaatgaggaagctataagtgctaagcaggaaccatccatcgatgctgcaaccctgcaacctaaagaggaagctatgaaaactggctgtgtggcacttgtcttgtgtttaaacattagtgttgatccgccggatgtgatcaaaatctccccttgtgtaagaaaggagtgctggatagatccattttctatggcagctccaaaagcccttgaaactattgggaaaacattacactcacaatatgagcgctggcagccaaaggctcgttacaagcttcagctggatccgacattagaggaagtttagaagctgtgtaatacttgccgtaaatttgcttgaacagagagagtcctttttaattacaatggtcatggtgtaccaaagcctacagctaaaggggagatttgggtatttaacaaggtgaatgttgcaaagacactgcataagctgctgcattgtttatccttgtgtgtttttgacgaagtgccctttttactttttggtccagagtgatagtactagatagttgaagttgaaagtgataatgatgatttcct

SEQ ID NO: 22251 - DNA, 1149 bp, Oryza sativa
  ref <308>: DATABASE ACCESSION NUMBER: AK099277
  ref <309>: DATABASE ENTRY DATE: 2002-08-28
gggggaagagaaccgaagcacaaaccctagcggcggcgcagctcagccggggtttgcggaggaaggggaggggcaccgcccgcgatgctcgcggcgtcggctcggcgggtggcggccgccgccgccgcgtcgtcctcccattccaggctcgccaaccagctcgcccacgcgctgaatccgcagaggtggatccatgaccggaacaagaaggcgatggagttggtggccaaggggtggagcgccctgcaggaggttgatcgcgtcatcgactacgccgaccgcaacgacaagcgcctgatcccacttctcaggggtgcaaaggaaaattttgagctggctctggagatcgacaatatgaacactcatgcgagattatggcttgccaagatgcatttcaagtatcatgttcctggagcttgtaaggccattggtgctgctctgttggttgaagctgcaaacatgggtgatccagatgcacagtatgaacttggatgccatttgagaattgagaatgactacgttcactctgaccaacaggctttttattacattgagaaagctgttgaccagttgcaccctggtgctttgtatcttctaggtgctgtatatttaactggagactgtgttaagagggatatagcttcagcaatgtggtgtttccacagagcatcagaaaagggacactctggagctgcaattgcatatggatcacttctattaaaaggtgctgaagtgcctgaggttattaccaggttcaactcaggtaagagtccatcaactggaaagatgcgaaaaaggcccatacagcaggatccagtgaagctagcaaaggagcagtttcaaattgcagctgaagctggatgtgatctcggtttgcgatggctgaagaggcttggggattatgaaaagcagcaagaacaaccaaagcaaatccagcaatgaccaccttcgaaatgatttgcttcacttcggcattgctctatgttgacatgcgtttgtcatacacactatacaggtagaacgtcagattctcaactgtaatcatgtaattgaatccaagcactatgtaaattttgatatctggcccaactccttgaaaaggtagacttgagttgatcccctttctctacaaaggatttttatcgtacc

SEQ ID NO: 22252 - DNA, 2372 bp, Oryza sativa
  ref <308>: DATABASE ACCESSION NUMBER: AK072445
  ref <309>: DATABASE ENTRY DATE: 2001-12-06
ggtggctgtgcgcgtcgaggagagagagagagagaggaggaggaggaggagagcggcggcggcgatggcggggaaggggttgaacgcgacgggggagttcttccggcggcgggacgactggaggaggcacccgatggtggggaaccagctgcgccacgccacgccggggctcggcatcgccatcgtcgccttcgggatctacctcgtcggcgaggccgcctacaaccgcctctaccgcccctccggcgaccaccaccaccactagatcgcgtcggcggccacgcgcggagacccgcgccgcctccccgaggtgagcgcccccccggtgtaaaagctccccttgttctcttcctccggctgaaatgggttcgtttcgttagatttgggatcgatttggaggcgttagggttgttcggaagtgctcaccttgatctatctattggagattatgtagagctttttcatgtgaaacagattagtaatttgcatattgaaactgtggcgcggggttggactggctagttgttcgtttgcttcccatgacaattcatgtttgctttttttttttcaaaagattaggtgtctaattacatggtgaaatatttcatccataggaatactaagaatgtatttagcacgtacgatcggtggagaacaaaattcttgagaaatgtatatactaggtgccaatgaagtctgaacatcattggttctagtcttagcattcgttctgccgtataagtatatacctgccctaagaagaggcatgttgtgccaacgaaatgtatattgatttggtcatcaagtcaacacatgtggatagcacttggtaagataactgactggatggctggatgcctttcccctttagctgcatcttaagctgtgatacttgaaaattgcatctttaatctaggtagatatgttttactataaccctaactagactatcatgtgaagcatgtttctgtactatatgacatgttgccatctatgttggagcaaacattattcttttctcagtcctggttgaattcactttaagatgcaaataagcttgtttcacataatttagtatcaccttttttttcttcccttttctgcatgatcattgtcagaatcttatgtttttcaccttctaatgtgaacttaagaacttgtcagtgcaccactatttttttgcattgtgttagatacttgagttacatagttaggaggtgtcctttttctgtgcattgtggtgaaatgagagccaacatccttgccgaagttactctaactttagcattgtttgctgtcacacgccactgtcttcccagacttccataagtcgattatcctctggcagattcatttgatcatttcatacggattagtgttttaatttgaaaggggcaacttctaacaaaggcatagttacattttatgataagtagttagatgcccatgttgcaacgggatcgaaagatagaaatatgattcagtctctctatacccgtttttcacaaagagttgggttttgggtttgtttagagcagttttttatacctctccttaatggaaatcgtggaatctatagtttatatcaattaaggaagtcacttcaaaatctggttttctgaagatgtattcttttgtgattaagctttttatgtatttttttttatatgttttgcatgcatgattagttccctccaacattgctcaagcacatcggcggaggagctaaagcaaagttctgcgctgtttgttgtcctatgtctattgcactccctggtatttccgtgattaattgcctaacaggtgtattatgtgctgcaggtgaagtggttggagcaatctttaccaagcaccaatgttgttgatcttttccagtttgagttcataaggtctgccatgaggcccatgaccatcatgtaatttgcaaccagggagacatgaatcatgtacttttatatcaatgttctgtgcttataatccagcatttggaaattggaagtgacacttataattctgaagttatgtgaattcttccatgcccttgtttgaattatgacctgcactacctgatcagtgcaaccaagataactttcagataaaaactaccaaatccgcgatgcgcttgattgatcagccttgttggtttggccttttttatatggaagtcagcaaggcgatgatttctgcgttgcgtcgcataatctgaacaaaagcaagtggcgtgtgctgtacactgctattgaacagatgaatgggttgtactcctagaagttagtctgcacagggcgtgtgttatttgtttatcatcattgtaaaatactagtactacatttcatctttctatcagaagaagaaaaaaagaactacatttc

SEQ ID NO: 22253 - DNA, 2836 bp, Oryza sativa
  ref <308>: DATABASE ACCESSION NUMBER: AK072446
  ref <309>: DATABASE ENTRY DATE: 2001-12-06
gtgcggcgctttctctctctcccgcgagatggacgccgcggcggcgtcctcctcctcctcctcgtcggcgacgatggcggcggcggcggcgtcggccgcggaggcgtcgttgtccggctcgcctgcttcttcgaggaacgctcgccatcggcagcgtaagggggtccggctccggatgctgcgacggcgggggcggcagcctgtggaggccgagcgcgccccgggcgatgggggcggtggcgccgtgcaggaggatctcgcgctgcctctcggaatgtccttcgccgccgtcctcgcgcaggtgcgtcatggcgggtggatttccttataggcaaaccctgaagaaagtagtagtactagtacttttttcttccttggcgctgttcgtgatcctctctgcgatgttcgtgccatcaaatgtactagcatattgcgtgtagattctgttgctagcgtctcacgaacacggtaatctgagaggttgcgtgctctggatggtagcttagaatgggaaatggaacgttagacgcggcagcttggggccgaggaaattctttgtgctatacttccctcaatggaaatgtcattgagccaaaataaaaaaaagtcattttagttcacagctatatgctcagatttttcacaaataaggggaaaaactaggatgcaaaatgatgagaacaaggaatgattatgaataagacagcagagaaattgggcttgacaatgttgtggctttatgggttatgcaagccttgtacttttgtcaaataagtagtgtggcatttaccgtcttattgcaaaattcaacttcattgctactattattcttcatttccatacttatagtggacatgaaattaaatagtcatttcgataatactaccccgtcatcctgtcattggacattaaattagtcacagttcagcatctcttcatccgaaagcttgcactatagcagcattttgaacacagatgcatatgcatgtgcaaagtctatctaatattcacctgcgtacatctggacatttgcattagtaattataaataaacatgtttgtacaccggtttagccctatgcccttattgttcaggtaacaaggagctgctttagttgaccgcaggttataaatacaaagaatatttcaggacaaagattacatcctgatttcctctccaaggtacgtgctttctaatttgatttatgaactctgttatccataaacccacaaattgatggtctgaaattgggtttgagtgtagatctgtacatcagcagtcaaggaatctctgacaaatgtaagcccggctaccactattattcagttctcattgtctcttagtattcattgtaatatcctttaattatcgtttctgtagatatatggtgacagttccaacagtttcatcaaaaatttcgaaaaatctttcagcagcacttttaggacgcttcatcttgttaatgaaatacctgtgaatgagagaagtcatattcctgaatgttcttttaaacatgatgattctgtggctgtggacagcttgagctcatctgatttgcaaaatcagacaaacagaatagagcatgaccttgtgaacacagtggaaagtcaactagttctctttgccagtgacaatcagcagttaacgcatcttcggcatagcagatcctctcctgaagctgataatcgcattcttaatgccattgatcgctcgaacgaactcaaggaatttgaaatagggcttaccatgagaaagttgcaactcaaacagtcacagttagctcttagttcccattcacacatgttagagaagattaagctatctttcggatttcagaaagcttccttcaaaggagagaaattcaagactcgcatgcaggagacaagagacgcagaaatccttaggacgctaatagattttcttgttagtgctgtgatagttatgtcagcgtgctttggatatggaacttatatttattcgtatcaaaggataacggatgttacgtcagcttgttctgccacatcaaagggatctaagtcatggtggatgccaaattcagtgtcgaacttcagttctgggtttctttttctcaggtgtcatgtaattgccgtaacacgtatgtgctttggcatactaatgatcctggcaattgcttggttagcatttcagcgttcctcaactactgggtcaaatatgcctataacattcaatctcattttgctgggaattatctgcggctttgctggaaggttttgtaccaatacactaggtggcgatggaaacacttggctcatgtactgggaggttctttgttctatccacttacttggaaatctttttccatctcttttataccacgttctacatggacctatttcagtatctcacagagagcaagttgtctggttaccatactgggttcgccggtgcttgttttatgctgcggtggggcttattcttccagccttgactggcttgctcccgtttgcctctctttctgactggaaggatcattttgtggaagagataaaatccattgttatcggtgacaagattgaagcatgaaatttcttggatgtaaggtggcgcaatacttgtcctgttgtatcttttgaagaagtgaagtttgttcagtttgagattagcctcagagtttagcttggtattgtatgaactccaaaggagattatgctcaagttggttgcacgtagactgacctgttagctgccagcctgccactttgttgtagttggagtgttattttaaacttttttctagttttattcttactttgttgtaaatactcaatagcaagagatgctgtttatctttgttg

SEQ ID NO: 22254 - DNA, 3019 bp, Oryza sativa
  ref <308>: DATABASE ACCESSION NUMBER: AK072447
  ref <309>: DATABASE ENTRY DATE: 2001-12-06
ggctttccttgttgggaattccacgtacggaacggagcttggatttggagaggagaggagactgcctctgcctggctctccctcgccgccggcgcacgccattctgggcctctcctctttgccgattgataagaggagaagccgaggagcctccctgtttcaattcgttccggcgggtcgctgcaatccggcagcgaagttgaggtacaggtacgcgcgtgccgtgtagcagtcgattgattcatctcctctcctcgccggagatctctcgggcgcattgcccatttgccttgcctggcggcggtgggagggatggaagaggaggcgggggcggaggtgccgttgctcaagatcaagggggactaccaccaaggttgccctggctgtgcctatgaccgcaagaaggaggtctacaggggattgccttacaaggagttcctctatctctggatgatctgcctcaccgccgctttaccaatatcatcattgttccccttcttgtacttcatgataagagacttgcatgttgcaaaaaggacagaagatattgggttctatgccggctttgtgggtgcttcgtttatgttcggtcgatgtttgacttcaactatttggggaatagcagcagatcgtattgggaggaaaccagttgttgtgtttggcattttcgcggtggtcatatttaatacgctatttgggcttagtttcacctattggatggcaatagctacaagattccttcttggtgctttaaatggtttacttgggccaataaaggcctatgctattgaagtttgccgacctgaacatgaagctcttgcattgtcacttgttagtacggcatggggaataggtcttataattggtccagctattggaggctacctttcacagcctgcagagaaatttcccaatgtcttttcccctgactcactgtttgcaaggttcccatatttcttaccctgcttgtgcatatcagtctttgctgctgttgttctcataggctgcatatggatgccgctttggagagccatttgattgatccagaagaaaaggctgaccaaaatggtagtttggactgcaagaagagcttattgagcaattggcccttgatgtcctccataattctttattgtgtcttctcctttcatgatatggcttatacagaggtattgttcttgctattgtctacggatggtttgctactgctttgcatataaattgttagctcatgtggtttacactcagttaatcactagaaataatatgcatttcagcagacaacgtgtgatattcagcatgattttatattgaaatatatgccaaaatatacaagcttataatgataataataaagtgtatgatgattacacgggattaatatattatttagttacagatgatgcaatattaaagactggtgcaaaataatttgtacttcaaaatgcctttagcataaaaatattcaacttgtaccaatcactggtgaactaggattgggcattttctctaagacttgctacagttataagtagcttctacggttctattggttttagattcacttaatgcagatatctgctagatttttggaatttggattacttgtttaaaacacactttagcatgtgtttcttttagctgggctggctgaagataagccaaccatagcctgtgtttttagtactaatgctatttgggatcaacttcagatattctctctatgggcagaaagtgacaggaagtacggtgggctgagtttgtcatctgaggatgtgggtcaagtgcttgcaatcacaggtgccagtcttcttgtgtatcaactcttcatttatcctcgtatcaacaaggttataggccatattaaggcttctcgaattgcagctattctgtgcatacctattctctttgcatatccatatatgacatacctatcgggacctggattaacgatcatactgaacattgcgtcagttataaaaaataatcttggtgtgagtatatttccatgtcaaattttaggaatctatgtatgcaattttcagggccaatttgtgcaagaaaaaggtagcattgatatttaaggcctgcagtttgccaagttacagacattaactcagaaagttttatacgatattaggataagataaatatgatatacaattattattatccaatctgacctttttgtggtggaaatggagttgattatacaagacgagagcacatatagaattattttctcatcttatgtatttgcaactttaatgaaaatttatcactgttaatgtataaataggttcttgttacactctgttctaatttatgctatactatgttaggttaccatcattacaggctgtttcatcctacaaaataatgctgtgcctcaagaccaacgaggggctgctaatggcttggcaatgacaggaatgtccttttttaaggcagtggctccagcaggggcgggcattgtgttctcgtgggcacaaaaacgccagcaggcttccttccttccaggtgatcagatggtgttctttcttttgaatctcttcgagttgcttggacttatcctcactttcaaaccctttctggccgtgccacagcagcatgatacaaattagactgttcaggtatactacagatctagattcttcagaacttcagatgttggcaatttcatgagccctgcagccggctgtgaagcgaaggcatataacatgatgctcatctggatgtcccaggagcaatagatagaagtgagggttggtacctccttatgcttgtatagtaggtgccagatatgcaattgcagcatttcagcgaaaggaatatatatagttgggggtaaatggtggccaaattgatggctaggtttttcatggccagcctacatgtaataccgagtagcattctactagtataatgtatagagtactacattgtaactagtaaaactctgtaagtgacatcagcttgggaatgaaattattgccggaatcgagatcagtatattgct

SEQ ID NO: 22255 - DNA, 2490 bp, Oryza sativa
  ref <308>: DATABASE ACCESSION NUMBER: AK072448
  ref <309>: DATABASE ENTRY DATE: 2001-12-06
gatgtcaatacacaattaaaagccagtatagtgaacccgatgctaacagaagttgcaaataggcgtgaagatgattctgatcaacaggaggttagatctcatgaaaggggcattggaataggaaaaacaggaatcatgtctgaaaatattttgggctctggatcttctgaggtcataggggcagctccaagtgcacctaaggagtttcctgaggcaccgtttgatccaaaacctgaaacattgtcatctcatatttccaatcaggtgcaagatttgaaaatatcttcagaaaatatcctcggtggtagtgaaccaactgtggcaactgaagttaaagcctctgatacacaggacacaaaaaaatcagaaaagaaaaagaagcagaagaagaaacaggcaggtgcggatgtggccaaaggagctacaaagacggttacttctcaacagccaaggcaggaaactctagttggttcagatcagggtggagctaagcatgacttgcaagatgatgcagaggagctattttggggttcccccatccaagtggaaagttcttctaaatctgctgacccaccgctaggattggaatcatctctggttctacctgcgaaaagtttttccgaggattatgatactaacaaaggtgaatgggaacctaatgctgccgcagtaaaccagcgtgggtggaaacctactcagggacctagacctaaatcacttctggaaattcaagctgaggaacagcttagagcacagaggggattagcaatggagaatgctaagccagctgtttctgcagcttcagtgccatcaattccttggaatggcatgctgaccacttcggaccagcagttgatggctgtaagtaaatcagtggatggtctgggaagtgttggcgactcaaggaataggagaagccagttgcatgatttattagcagaagaagttttagcaaggtccagtaacacagataatgaggacatgggcaatactaatgatatggcttttccacctctctcttctgctgttgttcagcctgatgctcctgcttttgatgatactgacttcattgaggccaaggactctaagaagagcaagaaaaaggcgacaaaagcaaaaggatctgcagtcaaagccccagcacctgttgtttcctttgattcatcgactgtatctgtacctactgaaaagggaaagccttcaaagcaatcacatcaagagaaagaaatactaccggctccaccaattggtccgtcttttggagattttgttccctggaagagtgatcaggcaagtgcagtacctgctccagcatggtctagtgagtcagcaaaggtgcaaaggcctctgtctttgagagatatccaaagagagcaagaaagaagatctgctgttgcccagcagcaaccaccctcgccaaccccagcaaaggtatctatcaaccaaaggaatcatgcaaatgttccttcctggcaagcttctggctgatctccatcaaaggctgttgctcctgtccagatgagctctaatgcttccagtcgttccaaatccaatgctgaagatgatttgttttggggcccttctgagcatgctaaacaagataagaaacagtcagaattcccaactctttcaagtcagactagaagctccagtattaaagaccagtccccaatgaaccgtcaaaaatcccaggccagcagactgcccctttctactgctcctactgccaaccacgctggtaaagggaaagcagaggcagcaaacaggcaaacagaggcaatggacttcagggattggtgcgagagtgagtgggccagactcactggaacaaatgatacaagcttcctcgagttttgcatcaagcaaccaactgttgaggcagaaatgctcctccgggagaaccttggctcttttgaccgcaatggcgagttcatcgataagttcctcaactacaaggccttcctgtcaactgatgtgatcgagatggccttccagctacctgcccgtgctgtccgtggggacggtgcagggcgtgcaaaccatgcctctgcagccaaaggagcctccagcaccgagacggagctggacggaggaaagaagaaagggaagaaggggaagaaggtgagtgcagcagttttaggattcaatgtagtcagcaaccgtataatgatgggtgagatccagaacgtggaagattaggaacagcgtatgacggcaccgttgtacatacttttgttgctcacaaagagctgtcgtcttagatttgttgcaatggcaaccgagcttaattatgccgctcatgagtagtttttggttcatcccttttttttgacgatgcgctcatgaggtgattttggttcctgtaacttacagtagattttcttctcatagaaatttcagtaggggttgatctgatcaattttcgtttgttgtttatgtgaattatgccatgatacatgatgctaatatagaatttcctgctgcaagatc

SEQ ID NO: 22256 - DNA, 2845 bp, Oryza sativa
  ref <308>: DATABASE ACCESSION NUMBER: AK072449
  ref <309>: DATABASE ENTRY DATE: 2001-12-06
gacctcgcggccccctcggttttattttttcttcttctcttcggcgtggtcgcgtcgtcgcgtttgcgtcttcccgttcccgatcccttcctccctctgcctctcgattcgattcgagtttcttcgtttttttcccctcttaataatcttcgtgttgatttggattgtcgtcgtgttcttcgccttttctgtccgcagatctccgtgcgacgctgcccgggagcctcctctatctggattcgttcgacttgattgattgattgttcggtttgcttgcgacgtgtttgatttttttcctccccggtgattcgattcgatccgatcctatccgaccccttctctggtctcgatttctgttttgtgttgttccccgtgttcgtcctctcggcgtgttcggttgttgcaggagcggatttgatccgggattttggaggttcccgtggcgtcgtgtggcgaagggggaagtcgaggtttcgaggaagaggtcagtttcccgtctacggtcgtttgatttagtcacttgggttcggtgattgatttcagatttgagtggttgattacccttcatcgatggatggatgatcatcgggttcttatctgtccttacccgaggctgattcgagacccctgggttgatagttatttgtaaccgctgatctggcttgtggtatgtgtttgtgctgctctagatgatgcaggagggagggaggctgttgagatgaaccgaattggtggaggtttgattattatggtccaggttcatggttgctttgattattatgatgaatcggggaggtggaggtttgattgttatggttcatggctttttgattagttcatggtggttctgaaattattctgacacgaaagtttgtggtgtcgtgacaacgttcactggatttcctttggtcagatcctcaagatgtgcagatttctaagtgatttggagatagatttacgggagattgtcagatggaatagcaatgcttcgtttggattctgaaccccccttgatttgatttagttgttgtcagcataatttgattaatgccttgaaaagtctgatttgggccgttggttgttcttcagaattattgggagttgcatctcacggcgagtcctatttgctgcatgaattggaatcaccatacatacaggccgctggcagttctttttctgtgatcgacaatcttccccttaatcaaattttccatgttcttcatcagtaattcttagttcttgcagatagcacacaactaagatggaatttgcaatccaaacctgcctcggtctgcgagctcaagacaggctttatacctatgccactcagtctttagtgcatgttttctatgcttaagctgctttcctccaaaataatactcttgctcactgtaggtctctaaataagagtaattgttatggctcgtctcagtgaagctcactaccctttttctcttcaattcatcgttagaagttaaaaatttacaaagttgaatttcttcccaaataaatgttctcttgcttgctgcaggcctatctcataattttgcaaggccaaccttcaccgagtgaaatctttaaatcaccacccttctcttcaattcatcattagaagttatatacctcacaaagatatatttaagtccaatctattgctcactgcaggtttctgcataatttctatggccaatctgcaggtttctacataatttctatggccaatctgagtgaatcctttaaatcatcacccctttctcttcaatttaccatcagaagttaattgcttgcaaagttgaatttcttctcgaataagtggtctcttgctcactgcaggtcctagttcataattttgcatggccagccttcactgagtgaaatctttaaatccccttattcaattcatcattagaagtactcaccaagggtagaatttaagtgcttggatttatctgcagaaatggaattgcgtaggaattttggagcttcaagatagatgtgactactggagaattctacaaccaaaacatacttttcctagtttgcctaatacttaacttcctgtttagtttctatttcggtcatcagaattgcttcatacatgtagcttagattttggtgtgcctttgtctttctttgttggtcgcagattccttaattttctcccaagttgacaaggttattgattggaggctgttggcttgttcggtttgtgttttatcaccttcaattgttacctatgtttatccgatagtctctgggttggtctgggggttggagctctgaatgcacacaaggtctgattgatttcgcagattattgttacctggattatttcagcatatggatcgtttggcttggcgtttctgtgtggggtcttccctgatggccagccatcagttgcagtatctcgtaattttagtggattctagacttgagacctgagttagttttttttttgtggtttgtgtgtttgtccttgttttagatgatgcagaagggtggctatcgggagattaaatccaagagtagaggatggatcttttgatattacggtggactggagcaactatcatataactggaaaaagatcattaagccaaattcacccactcattattttagtacttaccatccggtttagcatcttctcagcgatgcttatgtggattttcgttttttctccagcaattggaagtactagctttgttggagttgctattttggagctaatcagggcactggtttcttctgtgattaacaatctttctacttctttagttattactcttcagacatggtttttatgtgcctgccatcaattcaaatgcagacatacagattcagc

SEQ ID NO: 22257 - DNA, 2364 bp, Oryza sativa
  ref <308>: DATABASE ACCESSION NUMBER: AK072450
  ref <309>: DATABASE ENTRY DATE: 2001-12-06
ggtgtgcgccgtgcgcgtgtcctctgccccttcccttctccccatctcgcctcgctcccttcccttctcttgcccaccgccaccgccccgcacccacccacctctgcctagatccgtctccaccatcgatctccctcccatccccggatgcgcaaggtggaaggcaagatcgaaccctaaccggcgacggaggaggagcggctccaccaccaccacctcgaaggagttgacaggcgggggatggattctgcagcgtgatttcatttgtgctccatttcctgctggttcgatgcaactgctttgtaactgttgattgatgtggtgatacatttcaaaaccagggattagattctgtttatgcctatgcttcataaatcataacgatggccagttcaagcaaaaacttccagtcatcaagcaaaccaggcagtgacaggaagtaccagggtgcattggttgcttctccagcaaaagccatttcacccaagacagtcaagcagatcgtgccaggaaaacatttaatcttgagcggggagtctacaagtcatctggcatcttttttggtaaaggttattgccttggaagtagtaagaagattttcaaaagcaagatgcccttttatatggaattctattcaagcattgcaagttcttgggtaccctccatttaggtggattcaacagtgggcgccactcaaatttattgtgcaaggcattcagaaattatcgacaccactgttgtttctttctgtcacaacgacattatgtgaccggtcctctaagcgcaatgatgaattgggtagcaatacagaagctcctgatgtaccttctgaatcagatgaaacagcatcaacttctggtataagggatgttgctgatggcacaaaggataccgagccagataactggctcatatcactgttcaaggaacttgagaaacaaggcatcactttgcctgaaaggttcaatgaggatgaactacgcagattttacattgcagccaatggtgacttttcaagtttgctctcttcagttaagaagacaattcgttggagggaaaccttccatatacttacattgcacgaactcgagaagtggtcccatttagttttttggcatggattcgatactatgcttcggccctgtttaatagtccgtcttggtcttgcatgctctagtctagccccttctgatagacctcggtttgggcaagcagtagtttctcaaatcgacaatggtattgtatacttgaccaacaaagaagatccgagaataactgttttgctggattgtcatgggatttctccattcagatttccaatgcaaatgatgaggtcgtttatcactatagttcaagaaaactatccaaatcgtcttggggtactatttattgtgcgtcttcctcctgttgtcagagtaattgcgcagactcttattcaggttctgaaaccatccacaaagcagaagttgcgttttgagggagaatcatataagaagacattagccgagttcttgcagattgtgccaacttttcttggtggcaaatgcagctgcccgcaatgtgagaagccgcgtaatatttcagtaatacaggcaggggaaggcagcaagagccaacctcgccagataaccattgatgatggatcacctgtcgcaagcatgaactttgatgaggcggagcttccatctccttatagctgcgagaatgccataagggctgccatcattggtgttctaatgctgtgggtcttcattgcatttctcgctgggatgaacgacccagagtccatctcgtcccatgccccctaaagggccttgcatttttttgccatgtcaaccaggatccacagaaccacctgagctgtcagttgtcttccatttgcatctgtggttgctagaggcgtttttcatagcagattttcgtggtctgtactatgtgcgccacatgctaaagcatcaaaagagtatcttcgagtcgctcactgggaggtcatatgaggtgtgcgattcagcattaccttgaaatagtcagttagaacaagacaattccttgttttgttttggtgccatcttagtatatatagtagtattagtttgtctgtaagtttgccgacttgtcagtttatcgtgggtggctatatagtatctagaagatggttcttacacttaatacttcctggaaaattctacgaacgctacttgaaaactggaatttctcatctgagaagccagatccctgtgctatgtatgggtgaacggagaatccagtctggtgctgaactactaatgaatgaatgcacgtgcttgtcgaactcctaaataatatcttttttaaataaaatctttctacatatgattttcttgt

SEQ ID NO: 22258 - DNA, 2829 bp, Oryza sativa
  ref <308>: DATABASE ACCESSION NUMBER: AK072451
  ref <309>: DATABASE ENTRY DATE: 2001-12-06
gaatctagcccgtgacctcctcgccggggctacttctccatcgccatcgacctcgacctcgccgcctcctcctcctcctcctccccgtgcgaactccgggctcgtgccgagggggtggacgcgccggtggtgagagcggacgcggtgcggtgggccatggcggtggggtggcggccggcgatgctggtggtggtggtggcggtggcggcgtggcgcggggaggcgctgtcggtgacggtgaccgacacggagtgcatccacgagttcgtgccctacgagggggacaccgtgtcggggaacttcgtcgtcgtcgaccacgacatcttctggagctccgaccaccccggcatcgacctcacggtgcccgcccccgatcctcctcgtcttcgttgtgcttttgattttcgatgcaaggatctataactagatgggtttatgggtttgttttttcgtgatctggggcacgctggattggggatcaggtggaatcgtggtcctctttttgcgatctgcgatttcgcggtgcaaaagtttggggaaatttggtgatatgaagatatttcatgaataggtttcgatttgattttagtttatgaactaaattaacttggcgcggtggctgttcttagtcaattcgttggagcgtggtgcaaacttacgaacttttcgatgatgtttcgatggattggcatgctggtctgtagattttgctgcgtgacagggtcataggttcaactacgtgatagtgtgtttggtggctttccactgatctgcttataaaagtcactacttttagtttgggtggttagttttggccagtggcaaggtgttccagatgattttaccttgtcctgtagaaaatttaagcaaggttcttctctattttcttgatcgggtgtagagtcctgtctcttatgttttggtgatcttgttttaaagttcacactttaggcgttttggggaggctgaacatttttcacctccattgatgccagaatcgaattgttcgctgtgaatgcccctttagtttcttattaataccctgatatagaaaggtagatgaacttgatatttcttcccaataactgtagtttaattgaattatggctatctataaatcctcatcagaattcatttataagcaaactttggagaatacttgtgatgcagtgtttcttggagccacttcatttgaaagaaaagataatgtgccaatttttgcaaatgtgttcaaagcgcattctgcactggagtgtgttctgatcatcacacataactaagtatcattgtgttgcactatagcgttattccactaataaccttgtctcacttcctttcgtgatattttgtgctctcgtggaatgtaggtaacttcaccaggtggcaacactgtgtatacattgaaggggaagtctggtgacaaatttgaatttaaagctccaaggggtggaatgtacaagttctgcttccataatccatatggagcacctgaaaccgtttctttctacattcatgttgggcacatacccaacgagcacaatctggcaaaagatgagcacttggaccctatcaatgtgaaaatagcggagctgaaggaagcattagaatctgtcactgctgagcagaaataccttaaagcccgtgaagctcgtcaccgacacagtaagcttaacaatccttttgcaaatggtcactgaagctttggcagtttcctataatcctgcgtgtgatatgagaatgcataaatttgtatgaattttctgttggtccactcaccaccctttccacatgaagcaagaaaaaactgatccgttattacattttaaacactacaacattatcaccatcagaaagaagagcaaatagggatagaatggctaatatatgtgactggaaattggatattatttaatttggtttgtgtttaacgactttagcctgtccctttcttagagcacaataaagccacagtttgagtgagacaaatttctgtctggtctcccacttttgggctgttcttccattctgtctttgttcatctctgagctacctaactttcctcctttgttcttccatactactttctcaaattctgatcatcaattctttgctatacattttttagggcaaatcttgatattggtaagtgttaagttagaacctagtcaggtgggtcgatgtgttctcagtcaggaaaaggaacttgtcacctgttgctccaaaaagggagaatatcctctttaactaatatatgttcacatttatggtaattgatgtttcacttagcttctttgtaggggaatatatctaaagttgttttctctttggcttaacatatattcccctttatggtaattgatgtgctatatatagctttttcttgctcttgtagcatgacgtttttatgtattctatttttcttatcattatgtgatcgtggagagcttattttgtgttaataaatccagcaaatgagagcacaagaaggcgtgtcatgttctacacaatagcggagtacctagctttcatgggtgcaagcgctttgcaagttgtttacatccgtcgcctattcagcaaaaacgtggcatacaacagggtgtagaacagagtctacttcaaggcagcagaaaatggttggagcaggaaaaaaatatttccaacatattgtgttagcttttgcagccatttttttgggtttagtctaaaacgtggcacttttaaatttattgccttgtactttagaacttcagtgagatatgaagcacatttgttgctgaacaagtgaacacagatccgtaactaatcttcaaagggttgatgtctcaaagc

SEQ ID NO: 22259 - DNA, 2554 bp, Oryza sativa
  ref <308>: DATABASE ACCESSION NUMBER: AK072452
  ref <309>: DATABASE ENTRY DATE: 2001-12-06
gctaggtggtgtttgcttagctagctagctagctccatcactagctctcgcatcgcatgccacggtgagccggtgtcgccggcgtcgtacggacgtagcaagcgagagagggagagatgaagaagcagggaggaggaggaggagtagcggcggcggcggtggcggcggcggggatggtgaaggcggagctggaggacgtggggatcaaggcggcgggaggggcggtggcggcgctgagcccgctgagcgagacgctgtggcgggagaaggcggcggcggagttcctcggcgacgtgtcggcgcgcctggcgtggcgcgacctcaccgtcaccgtcgtgctcggcggcggcggcggcggcggcggaggagggacgacgcaggacgtgctccaggggctcacggggcacgccgagccgggcaccatcacggcgctcatgggcccctccggctccggcaagtccaccctgctcgacgccctcgccggccgcctcgccgccaacgccttcctcgacggcaccgtcctcctcaacggccgcaaggccaacctctccttcggcgccgcggcctatgtgacccaagatgacaacttgatcggcacattgacggtgagggagaccatctcatactcggcgcggcttcgccttcccgacaagatgcccatggaagagaagcgcgcccttgtcgagggcacaatcgtcgagatggggctgcaggactgcgccgacacggtggtcggcaattggcacctgaggggaatcagtggtggtgagaagaggagggtcagcattgcccttgagatactgatgaggcccaggctgctcttcctggatgaaccaaccagtggccttgacagtgcttcagcgttcttcgtgacacagacactgcgtgggctagcgagggatggcaggacagtgatagcatcgatccatcagccgagcagcgaggttttcgagcttttcgaccgcttgtatctcctttcaggaggcaaaactgtttactttgggctggcctctgaagcttgtcagttctttgcccaagccggcttcccttgcccaccgctgcgcaatccatcggatcatttcctcagatgcataaacgcagacttcgacaaggtgaaggccactctgaaaggatcaatgaagagaagatttgaaagatccgatgacccacttgatcggattatgacttcggaggccatcagaaggctgatcacctactacaagaactcacagtactactttgctgcgcagcagaaagtcaatgagatggcacgggttaaagggacagtgctggatgcaggagggagccaggctagcttttggatgcaggctttcacactcacgaagcgatcgttcatcaacatgtcgcgggacttcgggtactactggctgaggcttatcatctacattgttgtgacagtctgcatcgggacaatctacctcaatgttggcaccagatacagctcaattctggcaagaggtgcatgtgcttctttcgtcttcggctttgtcacgttcatgtcgattggaggattcccgtcttttgtggaagacatgaaggtgtttcagagagagaggctcaatgggcactatggcgtgctggcattcgtgataagcaacacgatctcggcaatgccattcttgatcttgatcaccttcatctccgggacaatgtgctacttcatggtgcgcctccacccgggcttcacgcactacctcttcttcgtcctctgcctctacgcaagcgtcaccgtcgtcgagagcttgatgatggccattgccagtgtcatccccaacttcctcatgggcatcatcatcggtgcaggaattcaggggatgttcatgctggtttcaggatacttcaggcttccccatgacatcccaaagccattctggaggtatcccatgtcatacatcagcttccactactgggcattgcagggtcagtaccagaacgacctgaagggcctggtgttcgacaaccaggacgacgagctccccaagatccccggcgagtacatcctggagaacgtgttccagatcgacgtgagccgatccaagtggctggacctcgccgtgctcttcagcatgatcttcatctaccgcctcctcttcttcgccatgatcaaggtcagcgaggacgtcaccccgtgggtgcgcggctacgtcgcgcggcgccgggtgcagggcaagggcgcccgcggccgcggggcggacctctccgccgcgcgctcgccgtcgctccgcgcctacgtcgtcgacgccgccgacgacctgccgccggcctgaccacccgtgagacagacacggcttctgaaaactctgaaactctgaactcctcaactgaacaagtggagacagaggaagaaaaagagagagagggagaggctaaaactgaactaaaaaaaaaagaacctgaatatctgatatgataattgtgtgttatagtagtagcaatgcttaattaatcgatcaagctgtgttgttgtattgtattgataattactaatatcaaggtgtatatcagcagctgaatgcaagtttagctagtgctt

SEQ ID NO: 22260 - DNA, 2293 bp, Oryza sativa
  ref <308>: DATABASE ACCESSION NUMBER: AK072453
  ref <309>: DATABASE ENTRY DATE: 2001-12-06
gagtctctcactctcgttctatctctcagtctttccccgtctctctccatccccttctctagttttgcccaccagatcaaccatggagccatcgtcgagttgccggggggcggtggatcgggtacttcgccatgtcccccgacgagatgacgcggcggctcgggttttgcgaggtggtcgtcttgttccggggcaccgtcacgccggcgagtagatggctaacctcatgagctcgctgtagtcggcatgcctcaactcgtgcgatctgcaccctaacgttaaggtggattcttggttcctcagcttgtacacctccgccgctagcgcctctcgcgcggatccgctgtcggcggcgacgggaggggtggatccggcgacctcttcccctcctgcatggatcccgtcgtctctccgctcccctcttgtgcggatctgccgtccgcggcgatgggtgggtcgatccggcgacctccgtcgtctctccaccctccgttcgtgctgatccgccgcgggtgatgatgggagggacggaggtggggtggcagactggcagatggggcgacgacctcagatggcgacacatgtggtttgggcgccatcgcaatcttttcgcccaggttagataacatgtcagttttgctagctattcggccagccagagaggagggttcaagcttgcggacgaaggtgcaccgaggagagcgcagtcgagtggtggtaccgagcgcccgagcggtggtactgaagatttcaggcggagccggaggcggcaaggtggggctgccggtgttggacggcgcactcgctttcccgcaggccacaacggcgtcccagttcctatctgccggtgattttgttcatttaaatgagccgtaggagggtgatttcatagtgatctactccgatatcaagtccaacaaatatgtaatgttcccacaaaaaaaaacaaaaaaaatgtaatgttcatcctgctgtcccctattcctgtttgttgttcttgcatgctctgaactaaactcagttagctgtgattttgagtgtcaccacacaatcatggttaaaatcccagcacaactttatcttgatctggatgcagcaaggtaagtcatcatgataaataagttgtatttcttgccatattttatatttgtttaggtgtgttgccaggttttcaaggagacagaagatgagatttgttgactttgatgggttggagttatggaatcgagatggttgccaaaaaaatattcaggtgaatttttttttgttcaaaataagtttggttgcatggctaaattggaacctactgtatttgctatgccccctttaatgctttggaatttttaagagctctatattattgtctgttgattctgcatggaccataggtgtttatttcacttgtgttctattgctgcattaagtaatacttttgcgcaccgagttcagagaaagataggggaaatagaaataataaactctgaaaccggtttcctttaaagtagcatatttagtcaatattattgttttgatttttttaaaccatgttggcatatgaatgtgatgaataaccacctacagtagcatatgcagaacaagctactgtaactcaaggcattaagggtattaagtattgccagtggttgaataagaccattagattgaatatatttatgtctctactgaaggatattgtgtgaagtttatgcatgctttcagtttttaaatattgtcagtggttgattaagactgttagattggatatatttatgtctctatcacactattatgtcatggattttttttaaaaaatattcaggtaattactgccaatatcatcttgttaatataatgatttaattatgcatgataaataagttgtatttcttctcctggtacatgcatttaatatgacagaatttacaaaaattacaagctattcatatcctgattataattgcttctaaagttatgcaaaaaaaaatctaattgttaagggttaaagaatcacgtccaacagcaaattgctctttttttaaaaaaaaaattgagcgcatatgagtagcgtcaatcaagagattgctcaatatccacaccaaatatcgggtgtatatatatgagtcttgtttgtgttttcaatttctttatataggttgagaagatgtttgtatcataccttccatgtaatttttattcttggattctgaatgtaattcctgggttgtaattcttgagccatgtaattttatacgattctatttgggatatccttcaaaaaaaaataacaggtagg

SEQ ID NO: 22261 - DNA, 2626 bp, Oryza sativa
  ref <308>: DATABASE ACCESSION NUMBER: AK072454
  ref <309>: DATABASE ENTRY DATE: 2001-12-06
gagtctcagagtcagaggcaagagaaccgcaaaacacaggacgcgctccgctcctctgccgccgccgccggagctctcacctccaggggctctcgccacgagccgccggagctcaacccgtgccgccgcacgggcgccggcggacggctggaggccgctgctgcatccttctaccgcccgcattgcttttgctccctcctcctcggctcctccctgtccaaacaccggcagtgtttcctcagttttactgggatctcccctgacgtgacaacattagggaatatcattgccatgttctggatcttctcaacactaggatacgaagaaggtcgtcaaggcaacttcgacgaacatagcagttcaatgtgcaggagcaccatgatctgtttgaaccacgatctttgcagcaagtgcagccattgtcaaagacaggcagcacgtagttgaagcttgcaggagttttgctctatccaagatgtcacaaacacagcctgagttcttacggcgctggatgacagtgacgttctgaagatggtttgcagatcggatttatagcaagaagattatcggatggatttggtgacgagggcctgcgcgagattccaactaacccaggattttctctgttttttttttctttcgtttttgtttaataataatccgtttaattgatgtgttagtcctccccgcatacgtcgcacgcgctgctgattggataagagaatcgaacgaacgtgacaactggtttagtggttttttttttctctgcttcttctcttctctccgctcttctgcgtctctgaggatccgaggaagtggcggtcggaggaggaggagccatggcgatgccctgccgcctccacggcgacatcctgctgctcctgctcggcgccgtcgccgtcgcggtggctcacccggcggcgaacgagttctgcgcggccgtcggtggaggaagcggtggctgcggcgtcggcggcggcggcggaggggacgggaggaggatcctgatcaggggcgggacggtggtgaacgcgcaccgggtggaggaggccgacgtgtacgtggaggacggcgtgatcgtcgccgtgcggcccaacatcccggttggtgatgatcatgtaaaagtgattgatgcaactggaaaatatgtcatgccaggtggaattgaccctcacactcacctggagatggaattcatgggaactgtaaccattgatgatttctttagtggtcatgctgcagcattggctggtgggacaacaatgcacattgacttcgtcattccagtgaatggcaatttaactgcaggtttggaatcctacaaacagaaggcagaaaaatctgccatggattatggatttcatatggccattacaaagtggaatgatgatgtttcgagggaaatggaaacgatggttaaggaacatgggatcaattctttcaagttcttcatggcgtataaaggttcattgatggtcacggatgacctactcctgcaaggcttacagaaatgcaaatctcttggtgccttggctatggttcatgcagagaatggggatgctgttgctgagggacagcaacgaatgatcgatcttgggataactggcccagaaggacatgctctctcaagacctccagttttggaaggggaagcaactgctcgggcaattcgattagccaagtttgtcaatacaccattgtatgttgttcatgtgatgagcattgatgcaatggatgagattgccaaggctaaaagagaagggcagagagtcattggtgaacctgtggtttctgggctagtacttgatgattcttggctttgggatccggacttcatgatagcttcaaagtatgtaatgagtcctcctatccgagaagcaggacataataaagcacttcaagttgctctttcatcaggaattttacagcttgtaggaactgatcattgcaccttcaactccacacagaaagctttcggctctgatgatttcagaaagattcctaatggtgttaatggtatcgaggaaaggatgcatattatttgggacagtatggtggagactggccgaatttctgtcagtgattatgtgagagtgacaagcacagaatgtgccaagattttcaacatataccctcggaaaggagcaattctggaaggatctgatgcagatattatcatcctgaatcccgagaggagctttgtcatgggtgcccacacacaccattcaaggtccaacacaaatgtgtacgagggcaggaaaggaaagggaatggtagaagtcacgatctcaagagggcgagttgtgtgggaggatggcattctgaacgttgttcccggttcaggaagatacgtcagaacaccgccttacagctacctgtttgatggcattgaaaagtcagacgctgcctacagagcctcccttcgtgcccctgtgaaacgtggcaaggctgctgcttaacgatgcccgctgctgatgaactacagaactagtttctccaaggtgaacgacgtctgctccatgcgtaacttccttgtgtttgtgtatacagatctcattattcatatcattttctgataggtaagaatgtaaaattacctgatactacctccgttttttaatagatg

SEQ ID NO: 22262 - DNA, 2870 bp, Oryza sativa
  ref <308>: DATABASE ACCESSION NUMBER: AK072455
  ref <309>: DATABASE ENTRY DATE: 2001-12-06
ggagagagagagaggcagagatagctatagagaaatccatctcctctcctctcttcccgtcaccttggtttgccgtcgtcggcgtcggccgctgcctcgcgcgcgcgtgggcagggggtggtgcgcggcgttgctcctccctccccgctgaaaccctagcaagcaagccgtagatctcgcgcggcggggcggggcggggcgggggcggccggatccagggggtggcaggggggggacgcgcggggggtgccgcgcgcgcgggaatggcggagctcggggagctcgaggggaagctgagggacgtcggggagaagctccagtctccccccgacgacgtcgatgccttgctcaagctcatccacgaggccgaaatatatatattgaaagtggaacaagcaccttctgaaagcatgattagtgctataactccagcaatgaaagctttgatcaagaaagagctgttggataattctagctatgaggtgaaactttctgtggtgtcctgtatttctgagataactaggatcactgcacctgacactccatatgacgatgatgtcatgaaggacgtgttttccataatggtggggtcttttgagaaattggatgatatggagaaccccttgtttcgaaggatagttgcaatccttgaaactgtggcaaaggtccggctatgcgtggtgatgttggatcttgagtgtgaagatctgatactgcaaatgtttcacaacttcttcacaactgtgaaaccaaatcacccagaaaatgttacaaactgtatgactacaataatgattttggtaattgaagaggatgatgaagttgagatacccattgcagaatgtctgctcaagcatgctaagtccgaactgaaggaaacttctgctgcatcttttgaacttgcagagaaggtgataggtgcatgctctgaaaaactgaaaccggtctttctgcagttacttaaaggcacttccttgaatgaatatgacaatattatcgcaacaatttgtgaagacagttcagatgtcaaggaagacatggatgctgatccttctggaaaagatgtggtggatgatggcaaactttctgaaaggactatttctgatgagctacctcaggaacctgcaaagttggagcaagatgttactcagactactgctattggcagtggtgcaactccagttgataatggcacagaatctgcagctgctaatcccaaggaattatccaatcccgattcagagaaaaaggatggtgttaagcagtcagcaaaggttgccaatggagcttctgctgaaacatcagaacgtgttgatggctcaccagctatggtcaaatcaaaaagaggtcgacctcctggactaaagtcattggagaagaaggctgctggaaagaaagttctaggtctgaaaaaggttgaggagactactgattcaacaggggagttatcgaagcagtcatctaaggatgattccaagtcatctacaagaaaggcaagtggagcagggtcatcaaaaaagcaacaaaagatcagtttgaaacagaaggatgaaactgactccaaggaagatactgctaaggatctgagcctaaaggaaatggtctctccaaagtccgtgtccaaggggtcagctaagaccaagggcagccaaggccaggacaataatggctccaagaggaaaaggtcacaagaggatgaacaagagactcctcgttctaggaagaataaaggccttgatgctagccttgttggtgcaaggatccaagtatggtggcctgacgacaagaagttttacaagggcattgttgactcatttgatacagcttcaaaaaggcacaagattgcatatgatgatggagatgtagaggtgcttctccttagggatgaaaagtgggaattcgtcagtgaggaacaagacaaaacccctgatgtggcttccgagatttccccgaagccacggggtaggggcagaaaaggaagagggagctcagtgcaattgaaggaaggaaatgcagaaacacctaaaagtggtggaggcgatcttcccaaaaaaaggggtcgtccgaaaggttccagcaatggtacacccaaaagtaacatctcggcaacttcaagcaaatcaaaggggaaagctgcaaggaaggatgaaaatgagacacctaaggttggcagtgaccttaagaaggaagctgaagaaggatccgaagacaaagccactaagtcaactgagaagacaaaggatgatttgcctgaggatggtagcaacaagagtgccagtaaaccaaaggaggctagcagcggaggcaaggatttgaagggtgagagcaaaccaagtgaaggaagagccaagccaggtcgaaagccaaaggttgccggtgctgcggtggctggtgaggaatctaaggccaatgtctcagctgagaaagagaagcagaaggaagcagaaggcgaggcagcagctgaagtggagcaggggggatctgctggtggcgcttctactggaggaaagaagcgcagaaggaaggcttgaagttagggatccgctggtggcgcttctactggagaaaagaagcgcagaaggaaggcttgaagttacccgctaatttctcttgcacatggattcgctctctagactcaaaaggttcgcttagtctcaaaaggtgttaaaacattgcaccctgtgtggttgtaactcttcggtcgggtgacctattggaatgccaactgattgggcatgtagcggttttaactaggggttgtagacaagataaaaatgctgtagttgtgatgttaggcgcaagtgcgcaacttttaatggttggttgaaccccatgcttgccaagaggccaatgacatcatagttgtgtcg

SEQ ID NO: 22263 - DNA, 2125 bp, Oryza sativa
  ref <308>: DATABASE ACCESSION NUMBER: AK072456
  ref <309>: DATABASE ENTRY DATE: 2001-12-06
gcacacacctgctgcgcgtttcgatgactcgatccatggccagctcatcgtcacccgccatctcagggtcgtcgccgaagatgcccaacacgacacaccaatccatcgcggcgcgccggaggccggagcgctgcggtcggcgctgctgaaccccgtcccggcggtgctgcgcctctcgcccttgctacgaggctccgacgacttcaacggcgtatggtacgtcgtccatgcgatcgcaaccccttatccaatttatgacacaaaaagaaaaagatcatatgaataatttaactctcccgtcgcaaagaagctccatttttttttctatatattttgtttttaagaagcgttcatgttgggagatgggtcaatacttcctttccacccgcgtttccgttgaagggccttttgttctgtcaattttgcacgatcaacaccagtaattccttcttatcttcatggttaataattctccaaggtaagaccaaccccagagattcaatccaaaagtttcttgtaattctcctctgcactaattttctcaaggtaatgcacctttttttctttgtaatatttgttacttctctcacagattatttaagattgaggattttggcttctaggtacatattcttctttgtactattttgatttctacataaccatgagcatccaggtgtgcctttgttctttagttactcctaccaaatcttatactattaattattcgtgcgaaaatgctgtctttagctaatgtcatacactaacatgatctacagctcttttttccttttagctaagctagtgtgttatattttcctcagaaaattttaattaaggaactataatattcccatgattagcatatgcagttcaagtttcatgaagcaatactttttccactagaataaaaccattattagtgcatacatacattcaaatacagagcctcgaattttatctcgcctaggccccgtatgttcaggaccggccttgctgccatggatatgtgatatatactcccatcatatatacagaagaaccagtcttattgtcatggataagtgatatatatgcagtggaggaaacaggagtagggtagtcctgctcctgactcctgagcctatatatccattacaaattacattttaaaacctcagaatatgtaagataaagattagtttagctctaagcttaagaaattctggctacacacccctctatatatgggtgtatcatttttccgatcttacgttttcaattgtctctttttttagataatggaaatgggttacatctccgacctctgtttataggcacgcagctaaaaagtccggaccaagctatgctagctttcaatttcctctcgaataacctacgctagctgcaggctctgcgtcgtcatcagcttcttcgtctccttcgggaaccagaccaagctgaacgaagcaggggccgggcatcatcatcctcgtccgcatctcgtccacaggcacgcgcagcagcgacggccacatccagcggcaataaagcgctagacatcgaggcagccgcagctggtgatcaccaggtggcgcgcgacgacgacgacgccgacgccgacgcgaagcgcgtttccaagagcgtgcagacggtgtccctcttcgcggcgtcggcgtcgcttttgctcttcgccaacctcacggcggcgggcaaagcaccgacgacgacaccgccgccgccgcgattgcccgccggcggcgcactttatagtgtaaacctggcattgatttgcctcggcctgctcacgagcctcgctctctccatcttctccatcctggcaccggccgcccgtaaactcgccgtaaccaaggtgcagaagaggggaatggtgatggccgtggcgttcgttctcgtctcctttctgctccgtatttcgatgatgcttcctgctgcatcgttggaatgggttttcctcttgatcttcctggtatttgcctgtgccgaggcggcctacctgtcgctggtatatatgagacatgttgtggatgaaccaaaggcccatgtacgtgtgtgagagccgggggtgagcaaattgatttgtttaattattctttttttataggatttaattattctttttact

SEQ ID NO: 22264 - DNA, 1349 bp, Oryza sativa
  ref <308>: DATABASE ACCESSION NUMBER: AK072457
  ref <309>: DATABASE ENTRY DATE: 2001-12-06
gttaagcagccacagtcgtcagtgcctgccctgttacctgttcgatcctcctctcgattcccttgagagaagccaaggaggagcaggagagcggccggccatggagggagaggggattgggaggagaggccttccttcactgctcggttcctcttccagcgaaagcggcggaatcgggcaagaacacattgcctctgacatcacgcagctcataggatggacgccactggtcgagctgaagcgaatcgccagcaaggacggaatagatgcccggatcgtcggcaaggtcgaggcctatcagcccctctgctccgtcaaggatcgcagcgctttgagaatgatcgaggatgcagaagagaaagggctgattactcctggtgtcacaactctagtcgagccgacgagtggcaatctgggtttaggattggtgcttgttgctcttcgcaaaggttacaggttcgttgcagttatgccgggccagtattcgtttgataagcagatcttgctgaaatacatgggagctgaattgtttctatcagatccaacactcgggtttcaaggcttagtcgacaaggtcgaacagctcaagaaagaattacccaatgtgcacgttcttaatcaattctcaaatccagcaaatcaggaggcacacatgagattgactggacctgagatttggaaggatactgctggcaaggtagacatatttgttaccggttcgggctcaggaggtacggtatctggcgttggaaagtatctcaagctgcaaaatccagcggtgaagatcatttgtgtggagcctgcagagagcccagtcatttcaggtggggagccaggtaaacataaaattcagggaatagggccaggactcatacctgatatgttggacacctcggtcatcgatgaagtcgtcacggtaaacactgatgaagcaatggtgaatgcaaggaggctggcaatggaagagggcctccttatgggcatttcttctggggcaaacctggcagcttgcttgaaggtcgcgtcgagagaggaaaacaaggggaagatgattgtcaccatgttcccaagcgggggtgagaggtacatgaactctgacctctttgcagctgtgagagaggaatgcaatgccatgacattttaatctcactggttgttcagaagaatcaagaacagttatgtgtaaaactataggagggtaacttgtaccacaatgtacacatagcacgatcttgcaaagggatttatcggcaaggagccaaagaatttgtacgaattgtatatttgtactagtcattagtcaataaataaatgaaataatttgctcacttcgtgtgagtaaatttcgg

SEQ ID NO: 22265 - DNA, 4525 bp, Oryza sativa
  ref <308>: DATABASE ACCESSION NUMBER: AK072458
  ref <309>: DATABASE ENTRY DATE: 2001-12-06
gtgttgctgctattcttcttcccactccccacccctcccaactccaacaagccgattcgtcccgcctctctctctctctctctctctctctctctctcttcctcctcctcgcgctggtccacgagacgcctgcgcctgcgcgtagcgcgacgagagagagaggtaggagtagtaggagaggaggttctagcttgttcttggatggatgtgaccactgctgctgcgtcgtgctattgctactccatctctgaagcctaggatcataggccggtgcagcctttttttctctctttgccagcgtaagcagagctctgcttcgtcagggcggagagggagggggctcaagctcaacaaggaatccaacttttcctcctcgccgcccacgggaaggagaagtgagcgcagatttcgcggattctcctccaagagactgagtaatgcgctgtaagcctttaaggagttacagcaatggcgtcgttggtacctggtgtccttgtcaagctcctccagcatatgaacaccgatgttaaagtcgcaggcgagcatcggtcatcccttctgcaggttgtcagcattgttccggcacttgcggggagtgatctcttcactaaccaagggttctacctcaaggtgtccgattcgtcccatgccacttatgtttcccttccggaggatcagcatgatctcatcttgagcgacaagattcagttagggcagttcatccatgtagaccgcctagaggcagccactccagtacccatcctacggggagttcggccagttcctggccgccatgcttgtgttggcaatcctgaggaccttgtggtaactagctcctcaaattttctaggcaacaagaaggcacaaccaaccaatggattgaaaacgacaaatggattgaagacaacaaatgggttgaaagataccagcagcttgtcactagaaaaggaaaagggcaagttagggaaaataaatgcttcccataaaactatcggggcagaaaataagaaaccgatgctcaccaaatcaaattcatcgctgtcaaaacaagctttgaatggtcttggtgataagaaggaagcaattaagtcaaaggcgaaacctgctggcactagatcaacaccttcatctccaacaagcgtctattctctgcctgcatcatttgatagattctctaatgatctaaaacagagaaacaaagtaaaaggagctgagaaagcgtcgtcttctaggctttccttgttagaaaaggcagcttccgttttgaaggttacaacggcagggaggaagtcctctgcaggtataagtagctccatattgagtatcggatcaggtccgaaggcattgagaagaagctgggaaggaaaggtggatacaaaagggaaaaccaattcagattcaaagatgaccaaacttgaaaaaaagcctgagaacaggggcacaatggcaacgattcctagacgaaagcctcctgtggatgagaaggtgcaacataaagatgatagtaagcttcagaaccctgctaagaagaccactgcaaatgctccttcagatgacgccgacaaagcaatgaagaagcatcctcctactgtaaagcgaacatctgggataagcaacccaaatgttacaaatttagtagaggttccccccaacagcaaaaaactgacagatgctagtaattcatggacaacacttcctccatcactcgccaaattaggaaaggagctcctgaaatatagggagtcagcacaaatggctgctgttgaagccattcaggaagcttctgctgcagagagcttgctcagatgtttgaggtaccttttctccatagtcgctggctgtgtgatcaattcatcatagaagttagtatgttatgtttgggttgttttctgaatttctaccaagagtattttcttattggcccacaaccatatatgatatgttaataatttggtaaaggtacaatcagtttctagataatgatgaacacatgtttgatactcagactgaatcccattatgcgtcctaaattatatcgtagacgataatctttagcacaggtgccaaactatgacctggagatttttgcatgaactcgtgttctgccataatttgctagtggtatcctatgttgaatttgtgcttaagtgctctctacctacaccatttttagtttaaatactgttacttcattttcaatggtacatatagttgagtcaactatgcattcaaagacttataagatgtactatctggtaagctttacaaaaccttcagggtttcacatggctcctggtcgtagacagccttgattgcctgttcccaggctgacaaacatgctaaatactacagggcatggtgattcagcaccaggacaggtggcatcaggttaacagtgttttcttaagcctttctgttcatgtcacatggttccatatcagtagagcaagatcattaataacacaccggcatcacactccaaatgtcccagttctagctgtcttcaatgtcgcaataatgctatcagccagctcggttcatcccttttagacccatgatccatccatgcccaaccttttaccccatgatggcctgatctgagtacacatggtacttaactacatattttcactaataaagattaactcgtaatggtcaaaactaacttcaactataattctgagtgtcttatggtccatggcaagtcaagtacatatgttagctcaaggtacaagcatacggtcccaaaaacaaggatcacagctactgtagctccatttttatacagttagagatcttgaaattgacctatgtgtttgtctgatttttggcatctgcatggtacacaacatggataaacagtttctgaactgttgtacttcccctatggcctacttttcttgttgcattgtgtagcaatgctcgccaatgttagacattggtcagacaaggactgcactggcgactgtttattgttttctttcactagcatcgcctgttcatttacctgggcaactctagtgccatctactgccgatgccatcaattctagtggcaaatttacgtatactggattcctgatcccaaattaactgtaaaatgtgtattcattcagctagatggtagaaattgctgcattttggcactgatttgtacaatgccattttaacaatcattttccctttttttttaatcttgtacagtatgtgatagtgatttgatcaatgtagtaaccttcttacttgcttgtgttggtcggagcagctcgtacgcggaggtgagctcgacggcggaggagcagaacccgcagccggcggtcgagcggttcctcgccctccacaccgcgctgtcccgcgccgcggtgatcaccgacaccctcgcgaggtcgtccgccgcatcggtatcctcgccggatcgctcggcggccagcgacgccgggacggtggtgtcggtcaccgacgaggagacggccgccgtcgcggccgagcgccgccgccgggctacgtcctgggtgagcgccgcgcttgccacggacctctccgccttcggcctctacaaccttaagccggtcccggcgacgatctcgtcaccgctggccgtgctcgtcgttgacgagtcggcgaagccggccgcatcggcggcggccaacgctgtgaagtcgtcgccggcgaagtcgcggatgtcccccgcgaaggggaaggcgaggacggggccagcggctacggcggcggcaaccgcggcgcctcccccgctgccggagtgggagaagggagtaggcgcggaggagagggtcgagctggcgaggcggctcggcgacgagtcgaggggctggttcctcgggttcgtggagcgcttcctcgacgccgacgtggcggcggcggcggcgccgtgggaccgcgagcgcgcggccaggatgctcccgcagctgaagcgagtcaacgactggctcggcgagatcgggaagcgcggcgaggcgactcccccgccgccgcctgaagcggacggagaagctgccgcggccaccattgccgctgctccggcgaacggtggcagtgccgtacccgaggagacgatcgagcggctaaggaagaagatctacgagtacctcctcaccaacgtcgactcggccgccgcagttctcggcggcggggcttccgcgccggcgccggcggcgccggcgaacgcgaagaaggggtgacgctgatgttgacgcgggcgatttggtgggcctaattgggccggaaatagcgtgtgggatttgattgggccagcaaacgggcttggccacctagctaatttagtttttttggggcttatacctctctctattttccctttttcttttgtgggattacttctatttctttttcttttgttacagaagaggaaaaagaaaggtgatgacgaactgacctgtatttattactgacgtcgattgggtaactctggattgtgagttccaccactcgatgggatggatgtgttctccgaattttagaggttggaaagtggtttgtgcttaaag

SEQ ID NO: 22266 - DNA, 2438 bp, Oryza sativa
  ref <308>: DATABASE ACCESSION NUMBER: AK072459
  ref <309>: DATABASE ENTRY DATE: 2001-12-06
ggcgtcctctcttcttccgccgtggactcatcgtctccaacgccacacgacacgacgcgacgcgacgcgacgcgagaaaaagtcaaaagcagcagcagcggcggagcaaccaagcctacctccaccaaaatcttctccccccctctcctctcctctccacccgccggtgacccgagcccccccaccgcctcacgccgccgccgccgccgccgcggggagttccattccaccgggtcgccttccggccgtctcctgcagagaggttcatgaggggctcgaggatgaatccaggtgaccgtagaacgcggagcacgatgtccatcgtaattgtgatgagtttgtgctgcttcttttatatactaggagcttggcagaaaagtgggaccggaaggggggatagtattgcattgagggtgacaaaagagaccgactgtacaatcttgccaaacttgcactttgagacccatcatagcttaggtggtgttaatcctttggtcatgaccgataaagtctttgagccatgccatattcgatacagtgactatactccttgtcaggatcagaaccgagcaatgaactttcctagagaaaatatgaactaccgagagaggcattgtcctacagagactaagaaactgcgctgtctaatcccagcacccaaaggctatgtcaccccttttccttggcccaagagccgtgactatgttccatatgcaaatgcaccatataagaatttgacagttgagaaggctgttcagaactgggtccagtttgagggagatgtgtttagatttccaggaggggggacaatgtttcccaatggagcaaatgcctacattgatgagcttgcatccgtcattccatttactgatggcaccattaggactgcacttgatactggatgcggggttgccagctggggtgcttacctaatggacagaaatgtattaaccatgtcatttgcacctcgagactcacatgaagctcaggttcaatttgcattggagcgaggtgttcctgcagtaattggagtgcttggaactataaaactaccatacccctctggatcttttgatatggcccattgctcacgctgcttaatctcctggaagtcaaatgatgcgatgtacatgtttgaagtagatcgggttctgaggcctggtggctattggatattgtctggtcctcccatcaattggaagacaaatcaccaagcatggaaaagatccaaggaagacttagaggcagaacaaaatgtaatcgaaaaaattgctgaaatgttgtgctggggtaagattcatgagaagggagatactgttatttggcgcaaaaaggcagattcaaatgaatgtcataataaggatgaccatcctagcaagatgtgcaaaattcaagatgcagatgatgtctggtataagaaaatggaaggttgtataacacctttcccggaagaagcacagctacggaaattcccagagagactatttgctgcccctcccagaattctacagggtcgcaccccaggtgttacagaagaaatttttgaggaggataataagttgtggaagaagtatgtcagtacttacaagaggataaacaagctgataggttctttgaggtataggaatattatggacatgaacgcagggcttggaagttttgcggcaattattgattctccaatatcttgggtaatgaatgttgtgcccacaatatctgagaagaacactcttggtatcatttacgagcgaggtcttattggcatataccatgattggtgtgaagccttctctacatatcctaggacatacgacttgatacatgccaatggtctcttcagcttataccagaataagtgcaacatggaagacattcttctggagatggataggattttacgtcctgagggcgcagtcatactgcgggacaatgttgaggtgctgaacaaggttaggaggacagtgatggggatgcggtggaaatccaagttgcttgatcatgaagatgggcctcatatacctgagaagattttggtttcagtgaaaaagtattgggttggcaatgaagaagaaaacagttcatagataccctttttttatgttgtacctgttcatagatccggttcatacttcataggtacaggcctcaccattcccaatcaagatgacatacaggtagagtattttttatgtcctgcatattggttgtgcatatacagaagcagggcattaagggcaaacgttggtgatttgccaacacattttgtaggtaaagaggaagatagtttgtgctgagatgaacgtacccattgtattacagatccacacaggaacattttccgagtgaacaagtgttgccccatgtattttgtttgtgctgcttgtacaacatggaacattagcagtacatgtacaagtaacaaggagacaaggagttgt

SEQ ID NO: 22267 - DNA, 1808 bp, Oryza sativa
  ref <308>: DATABASE ACCESSION NUMBER: AK072460
  ref <309>: DATABASE ENTRY DATE: 2001-12-06
gacatctcgcactcgcatcgcagctcccaactccaactcaagtgggctccttcttcccccacaactccacggaaaaaacctcgcagtacacggccacccaccacctaactcccttccttcctctccctagaaatattcccgcatccgcatcccgcatcccgcctggtttgtgattcgccgaacagctttgccgggagaaagcgaggaaggaaggaaggagaggagggagccatggagaaggcgatcaacaggcagagggtgcttctcgcccacctggagcccgccgcgagtcccgccgccgccgcgccggccatcaccgcgagcgcgtgcgccgcgggggacagcgccgcgtaccaccgcggggcgtgcttcgcagacgacgtcgtcatcgtcgctgcctataggacagcaatttgcaagtccaagagaggtggtttcaaggatactcccgcagaggacctcttggttccagtattcaaggctttgatagataaaacgaagttgaacccaagtgaagttggtgatattgttgttggtactgttttagctcctgggtcccaaagggcaattgaatgcagaatggctgcattttatgctggattccctgataccgttcctcttatgactgtaaacaggcaatgttcgtctgggcttcaagcagttgcaaatgttgcttctaacattaaagcaggactttatgacattggtattgctgctggcctagagtccatgacagtgaaccaagttcgccttgatgggcaagtgaaccccaaagttgagctgttttctcaagcacgcgattgccttctcccaatgggcctcacgtccgagaatgttgcaaaacgatttggcataacacgaatggagcaagaccaggctgctgttgagtcccacaggaaggctgcggctgcagctgcttctggtaaattcaaggaagaaattgttccagttcacacgaagattgtggatccaaaaactggtgaggaaaaggagatagtggtctcggcagatgatggaatccgaccaggcacttcattggcagtcctgtcaaaactcaaaccagcattctctaaagatggcaccactactgctggaaacgctagccaagtaagcgatggtgctggagcagtcttactaatgagacgtgacattgctatgcaaaagggtcttccaatagttggcgtcttcaggagctttgcagcagttggagttgatccagctataatgggtgttggtcctgctgttgccatccctgcggcagtgaaagctgctggtcttcaaatagatgatgttgaccttttcgagattaatgaggcctttgcatcacagtacgtatactgctgcaagaagttgggacttgatcctgcaaaagttaacgttaacggaggtgcaatggctcttgggcatccattgggtgctacaggtgcacggtctgtcagtacccttctcaacgaaatgaagcgacggggcaaagactgtcgatttggtgtgatttccatgtgcataggttctggcatgggggctgctgctgtctttgagcgtggggatgcagtggatgagctcactaatgctcggtgcatcccgacccataaccggctttcgaaggacgccatgtaactagaactatatatatatgtcataaaaattgtgcaactgccactattttgaaatatcaacacaagagtagggaataaaacgcttgtgtatctgtaatctcatccagctctgaacttggctagttggagaatccttgttaattaggaaattcatgcataataactcaaaagttgtcccttgtcagcctgttc

SEQ ID NO: 22268 - DNA, 2813 bp, Oryza sativa
  ref <308>: DATABASE ACCESSION NUMBER: AK072461
  ref <309>: DATABASE ENTRY DATE: 2001-12-06
ggtatacggaggagagcttttacaagaaggcagaaggccaccacgcggagctctctgctcttccattgctagttttgcttcatttccctgcctgtgagtggtgcaaggcaactacgatgctaccgagttccatatgctccatgggccaaatcccaagaacttcaccccattactatgggatgctgccaaagcagatgagcaaaggacatcctcctatggtcactagagcggtaggaggtgttgagaagggggaagtcggaggaaatgtacggagcctgcaagtcatgcacagcaaggaactccaagctaagataagaagacagttgcagagagttgaattatcaccatcgttatatgacacagcttgggtggctatggtgccggagcgtagttcttctcaagctccatgttatccgcagtgcattgagtggattctgcagaaccaacatgacgatggatcttggggtataaactcatcaagtttatcagtcaacaaagatattctcttgtctacattggcatgcgttgtcgcactcaagaagtggaatgcaggctcatatcacatcaagagaggtctaaattttggtgggaagaaatttctccgttgcgatggatgtccaaaatatagctcctgtgggttttaacgcttacattctctggtttaataacccttgcctctgggatgggtttgcaattacctgtttggcaaacagatattgatgaaatttttcacctccggaagatcgaattggaaagggattccggtggaacaatttcagcaaggaaagccttcatggcatatgtggcagaagggttcgggagccttcaagattgggatcaggtaatggcataccaaaggaagaatggatcattgttcaactcgccttcaacaacggcagctgcagcaatccatactttcaatgacaggacactcaattatttagattcacttacgaacaagtttggcggcccagtcccagcaatgtatccgcaaaacatatactcccagctttgtactgtggatgctcttgaaaggacagggatctctcagaaatttgcacgtgagataagagacatattggacacgacatacaggagctggctgcacaatgaggaggaggtgatgctggacataccaacatgtgcaatggcatttcgcctccttcgtactcatggctatgacatcacctcagatgaaatggctcatttttctgaacaatccagctttgatgattcaattcatggatatctcaatgatactaagactttgttggagttgttcaaaacttcacaaatccgtttctcatgtgaggatttggtcctcgaaaatattggtacttggtcagctaaactattgaagcaacaattattgtccaacaagttatcaacatcagcacagtcagaggtggaatatgtgcttaaatttcccctccattccaccttggaccgattagagcacaggagaaatatcgaacaattcaaggtcgagggttccaaggttctgaaatctggatactgtggctcccactcaaacgaagaaattctagctttggctgttgactacttccattccagccagtctgtttaccagcaagaactcaagtattttgagagttgggtgaaacagtgcaggctagacgagctgaagttcgcaagagtgatgccattgatcgtccatttcagctctgctgccaccatcttcgctcctgagcttgctgatgcccgaatggtacttagccagacctgcatgctgataactgtgtatgatgacttcttcgactgtcctgaaatatcgagagaagagaaggagaactacatcgcgctgattgagaagtgggataaccacgctgagattgggttttgctccaagaatgtagagattgttttctatgcggtttacaacacgtacaagcagattggggaaaaggccgcattgaaacaaaatcgcagcataatggatcagctagtggaggatttggtgagctcagcgaaggccatgatggtcgaggcagattggacagcaaccaagtacatcccggcgacaatggaggagtacatgtcaaacgcagaggtgtctggagcgtttgcctccttcgtctgtccaccgttatactttctcgggctgaaactgtctgaggaggatgtcaagagtcatgaatacactcaactgctcaagttgaccaacgtcatcggccgcctccagaatgactcccagacatacaggaaggagatcctggcggggaaggtgaacagcgtcttgctgcgtgctctcactgacagcggcaatacctcgccagagtccattgaggcagccaaggaaatagtaaatagagatgccgagtcatccatggtggagatgcggagtttggtgtttagcgagggtggccctattcctcgtccatgcaaggatcgcttctgggagatgtgtaagattgtgttctacttctacagtgaagatgacgcctaccgcacacctaaggagacgatgagctcggcaagggcagtgattctcgatccattgaggttgatacctcctccatcttgcccagaaacgttgtcctcatgaacaaccaccttgattggtttgtgtacaagaggttatttgaatttttagtatgcctaagtcctcaatatctttagacgtgttctagactctgtgtatggacgtgagtgcatgtgagagtccatcttgtacttaaaaaaaataattgcatgcacttatgatgtcttaaaccttggaaattgaggagaaagtttgatggaaaaaaatatgataagaacttatgagatatggcttttgctacaaccatatg

SEQ ID NO: 22269 - DNA, 2435 bp, Oryza sativa
  ref <308>: DATABASE ACCESSION NUMBER: AK072462
  ref <309>: DATABASE ENTRY DATE: 2001-12-06
gatattctcatctgattactccgcggcggcggcggcggcgggagcggcatctcctacgagattcctctcttgatggtatcgttgaacaagccaactaagcacaaggagttgtctcgggtgatgagataatttggttaaggaaggtaggaaacagtaaattcaatgggcaatccttctattctcacggaggatttaggcgatacgtctgactttgaggttgatggcgtcgagaacctcacggagaatgatgtcagtgatgaggagattgatgccgaggagctggcccgacggatgtggaaagacaagatcaagctgaagaggatcaaggagaggcagcagaagcttgctctgcagcaggcagcactagaggagtccaaaacaaagaagatgtctgagcaggctctccgcaagaagacggcgagagtccaggatgggatcttgaggtacatgctcaagctgatggaggtgtgcaatgctcgtgggtttgtttatgggatcattcctcataaagggaagcctgtcagtggtgcatcggataacattagagcttggtggaaggagaaggttcggttcgatgtgaatgggccggttgccattgcaaagtatgaggttaagaactcaatgctggttgatgctaagcgcagaggggtcttgaaccagcatagcttgatggatctccaggatgctaccctgggatcattgctctcatcgttgatgcagcattgcagcccgcagcagcgcaagtacccactggataagggtgtccctcccccatggtggccatcaggaaatgaggattggtggatttctttaggccttccaatgggaatatcaccaccatacagaaaaccgcatgatcttaagaaggtttggaaggttggcgtgctgacgggtgtgatcaaacacatggccccaaactttgataagatcaggaattgtgtaaggaaatcgaagtgcttgcaagacaaaatgactgctaaagagagcttgatttggctgggagttcttcgaagagaggaaatatattttcgcagttctgacaatgttggatcacagattacacaccgtagttctcgtgagggaaaaagtgatgatatatatagcagcagtgatgagtatgatgtcgaccatttggaggaacctcctcgctcttcatcatccaaagataatgtggggcgtcgtcagccaactgcgcagatcagagaggagcatacctctagtcgacacaacagaggacgccatgatcagcaacccaatcaagtacttcctagcaatgaagggaccaatgaatcaaggaagagaaagagacctagtggtcatttacttactgctgaatctgaggttgaggtaacacaaaaagatgacaatcaactagccattgtgagcaatgcattgcccaatatgagcagaataaaccaaacggagatgatgggcatggctaaccagatgacaagcctcagccatgtcaatacaactgaaactctacagcatcaatatgttcaagggaacttcgtatcttctcctgctgctgtggttaataactataacagcaaccagattacaaatgttaatccttcaaggatttatatgggatatcagcctttagcatgccaaaataatggtcacacaaatccatggtctgaagacacttttcaggttgatgttggtccaccacctattggttttactactaattcttcgtcaggtggtaatcattcttttcccatgaaacaatcactaccaaaatctatagatgatcatgtgcctattacggagacaggggtgttggctgatagcagttcatatggttatcatatcacagccacaggtagtaggaattcaacctctgttgctggccatggaaatcagctcatgggagatcctttcgacagtggtactgctgataagttcaatgggaattcgtttgatggattgccttttgacttcattggtagtagtccaatccctgacatcggtgtattgctagatgatgatgatataatgccatatctgggaacataacctaggcaactcttttgcaattgtaagaactgcgacatccagaaatgtaaatggtggcagaagttcctgtatcgttcattagctaatcgctgagaacttgagaagggcgcgctcatcatggcatgctggtgttccgcttaacctgctgcaaccagtgaaggatgcgtcgtgccaatgatctgtaatttgtacctatcgcttttaattagcctgttctggattatttagcctggctgtaaaaaagctcatagaaactcgcttagctggagaatttcctgcaatgctggatggttgtatacatttttacctgtgctaccatgttaattttgctcagttactcatagataaatcttgatgtatatgagacatgttcattgcagctagctcagacataataatacctgaattcttgc

SEQ ID NO: 22270 - DNA, 2571 bp, Oryza sativa
  ref <308>: DATABASE ACCESSION NUMBER: AK072463
  ref <309>: DATABASE ENTRY DATE: 2001-12-06
gaccgcgctctctccctcccctcccatggcgatggccaccaccgcgctctccgcctccctcccgcgcctactcccgcctcgccgccgccgcttcccgacgccctcctcctcctccccctccgccgcatccacctccacctcccgcgtcgtccgcctgcgggccgccgcggcctcggcgccatccgaggtcctcgactccaccaacggggccatcccctcggggaagggcggcggcgggcagcagtacgggagggagtatttccccttggccgctgtcgtcgggcaggatgcaattaaaactgctctgctgcttggggcaattgaccgtgaaattggaggcatcgccatctcagggaagcgtgggacagcaaagacagtgatggctcgtggcttgcacgctatgcttccacctattgaagtggttgtaggctcgattgcaaatgctgaccctaactacccagaagaatgggaggagggtttggctaaccaagttcaatatgatgctgatggtaacttgaagaccgagattatcaaaacaccttttgtgcagatcccgcttggtatcactgaggataggttaatcggatcagtcgatgttgaagcatctgtgaaatcaggaactactgtgtttcaacctggccttcttgctgaagctcacagaggcgttctttatgttgatgagataaatctattggatgagggcgtaagcaatctacttctgaatgtcttgactgagggagtcaatattgtggaaagagagggcattagctttcgtcatccatgcaaaccacttctaattgctacttacaacccagaggaaggatctgtacgtgaacacttacttgatcgtattgcaattaatttaagcgctgatctgccaatgagttttgatgatcgtgtggcagctgtggatattgcaacacaatttcaagagtccagcaaagaggtttttaaaatggtggaagaagaaactgaggttgcaaaaacccagataattttggcaagagaatatctgaaagatgttgcaatcagcacagagcagctcaaatatcttgtcatggaagctatacgcggtggctgtcaggggcaccgggctgagctgtatgctgctcgagtggcaaaatgtcttgctgctatggaagggcgtgaaaaagtatatgtggatgaccttaagaaagctgtagagctagttattctacctcgatcaatcctatctgataacccacaggagcagcaagaccaacaacctcctccacccccaccgccaccccctccacaagatcaagattctcaagaagatcaagatgaagacgaggaagaggaccaagaggacgatgatgaagaaaatgaacagcaggaccagcagatacctgaggagttcatttttgatgctgaaggtggtatagtagatgagaagctccttttctttgctcagcaagctcaaagacggcgagggaaagctggacgagcaaagaatctcatattctcatctgataggggacgatacataggttctatgcttcccaagggtccaataaggaggttagctgttgatgccacacttcgagcagctgcaccataccagaaactgaggagagagaaagatcgtgacaagacaagaaaggtttttgttgaaaaaactgacatgagagccaaaagaatggctcgaaaagcaggcgcactggtcatatttgttgtggatgctagcggtagcatggctctgaatcgcatgcagaatgcgaaaggtgcagcattaaagttgcttgcagaaagctacacaagcagagatcaggtttcaatcattccatttcgtggagattttgctgaggttcttcttccaccttcaagatccatagcaatggcccgcaatcgtcttgagaagttaccatgtggtggcggttctcctttagctcacggccttagcacagctgtcagagtgggtttgaatgctgaaaagagcggtgatgttggacgtatcatgattgttgcaatcaccgatggaagagctaatgtgtcactgaagaaatcgactgacccagaagccacttcagatgctccaagaccttcttctcaagaattaaaggatgagatacttgaggtggctggcaaaatatacaaggctggaatttcacttcttgttattgataccgagaacaagtttgtatccacaggatttgccaaggaaattgcaagggtcgcccaaggtaaatactattacctgccgaatgcttcagacgctgttatttccgccgccaccaagactgcactctcggacctgaagagttcgtgatcctggagagcgttttaccttcagataatgagtggtttttaccttttaccttgtttggtgcagcagtgtccatgtttcgtgtaactttgggacgtttcggctgtgataaccaattttggcataggatttttaccgtgagagttggaattcgggcgtagcaccgtgtaaagaatcatataatccctcttctgtctaaataattggccatgtaaatatggtgttattgcgtacagttctaagtaataataacattcataatttatgtgaagaaagaaattgcc

SEQ ID NO: 22271 - DNA, 919 bp, Oryza sativa
  ref <308>: DATABASE ACCESSION NUMBER: AK072464
  ref <309>: DATABASE ENTRY DATE: 2001-12-06
gggctatgtctttttcttctctcctctcctctttactcttcccagtcatcagtcaagcggcctcacccatctgcaccctcttctctcctcccgacggcagcggtgggcgtaggcgatggcggcggtggaggagcaggatccggcgggcggtggccaacccctgcacggatccggcggtggtgaccgtccctgcatggatccggcggccggccggccaccctccccccgcgggatccggctccctcccctcctcttcattctctccccagatccggcgaaggggaggggtgtcggcaacggtggcactcggcagcagcggcggcgtggcggcggtggaggcgtaggatccggcgggcggcggccaacccctgcacggatccggcagcggcggccgtccccgcacggatccggcggttggccatccccacacggatccgacgcccagctgccctctcccctgtgggatctgactcccctcccttcacctcccttccctccccagatcaggatgaggggaggggcgtcggcggcggtgcggccggagcccggaggggagcatggaggccggcgagagggcagatccagcggaggccggcacggaggccaccgctgccgccgacaagggcgggagcggtgtcctcggccgatgacgacgacgacgaggaggcagcagcgccgccgccggattctaggtttttcatttgttttgaaattttttttttccggatttttgtttttacgtacggatgatataagcatctgcacgcggaaatcgtgatttttgcatacccctgggtgcgtgcgggtcgctcacccgcacgcgaaaatctttctcgtagtagtggttctgatagcaaatagatatttttccttttgagttttgcccaacagatatttgaattgtggagtattatgtttg

SEQ ID NO: 22272 - DNA, 2743 bp, Oryza sativa
  ref <308>: DATABASE ACCESSION NUMBER: AK072465
  ref <309>: DATABASE ENTRY DATE: 2001-12-06
tatcttccccactcgtgcctggctctctctctctccctttctcctctcctccaaggtcatggcaaaggagaaataacagctagcgggcttggggaagggaaaacagcaagtgggagatcggcagggagaggtgaattactacttgagtagaagtggtacaagaagagtcgtcgtctacctgtgagcgaattatttcgaggttgtgcgttgcgatgatgggaggtggtctggtgatggaccagggcatgatgttccccggcgtgcacaacttcgtggatctcctgcagcagaacggcggcgacaagaacctcggcttcggcgcgctcgtgccgcagacgtcgtcgggggagcagtgcgtgatgggggagggcgacctcgtggacccgccgccggagagcttcccggacgccggtgaggacgacagcgacgacgacgtggaggacatcgaggagctggagcgccgcatgtggcgaccgcatgaagctgaagcggctcaaggagctgcagctgagccggggcaaggaccccgcgggcggcgtcgtgggcgacccgtccaagccgcggcagtcgcaggagcaggcgcggcggaagaagatgtcgcgcgcgcaggacggcatcctcaagtacatgctcaagatgatggaggtgtgccgcgcgcaggggttcgtgtacgggatcatcccggagaagggcaagccggtgagcggcgcctccgacaacctccgcggctggtggaaggagaaggtccgcttcgaccgcaacggccccgccgccatcgccaagtaccaggccgacaacgccgtcccgggcttcgagagcgagctcgcctccggcaccgggagcccgcactcgctgcaggagctgcaggacaccaccctcgggtcgctgctctcggcgctcatgcagcactgcgaccctccgcagcggcggtacccgctcgagaagggcgtccctccgccgtggtggcccaccggcgacgaggagtggtggccggagctcggcatccccaaggaccagggcccgcctccgtacaagaagccccatgacctcaagaaggcctggaaggtcagcgtgctcaccgctgtcatcaagcacatgtcgccggacatcgagaagatccgccggctggtccggcagtccaagtgcctccaggacaagatgaccgccaaggagatctccacctggctggccgtcgtcaagcaggaagaggagctgtacctgaagctgaaccccggtgcccgccctccggcacctaccggcggcatcaccagcgccatatcgttcaacgccagctcaagtgagtacgacgtcgacgtcgtcgacgactgcaagggcgacgaggccggcaaccagaaggctgttgttgtcgccgacccgaccgcgttcaacctcggcgcggctatgctgaacgacaagttcctcatgccggcgtccatgaaggaggaggccaccgatgtcgagttcatccagaagaggagcgcgtctggcgcggagcctgagctgatgctgaacaaccgtgtctacacctgccacaatgtccagtgcccgcatagcgactatggatacgggttccttgaccggaacgcgcgcaacagccaccaatacacttgcaagtacaatgatccactccagcagttcttcatccgcgacgatactccattcggtaaccagatgggcgacatcaatggcgcatcggagttcaggttcggctctggtttcaacatgtcaggtgccgtcgaataccccggcgcaatgcagggccagcagaagaatgacggctcgaattggtactactgagagtactgaagaataaacttgtagcgtttaaagaaagagcaccttaagcttttaaagttcaccatggtcatccctctgcttccatggtggaagcgtctcctgtgaacccggtaattctataggtctttctcatataggttttgcattagttgcaaaatggctggaacttggaactggtttatacatgtatgtccgtccagccagtaaacctcctatggaaacttaatgttatttctagtttaatttgttagttaaatgctgttcatatgtctggttgttaagtcacctgtgcttgtttgggtatgtggtttgtatctttatcatccggtgaatgtatgaagtgctctcttgagtaactctacggctctacttctacctggtaagccttctactgatgttcatgttttgcctatacatgtttcatgtttgattgctgcggtacatttggccgtcttcctctatagatgtcaatttccagttggggttaaatatcaacctaacctgtggaaaattttcctcccgctgtatctttcatgcctggaaattttgtcaagatggtaactagacaggtatacttttgtttctgccagttcatcagaagaaatgttcaatttacctggactccaattcacttcgatattgatgttgccactttgccagtggcactaacccaagatcccatctccattccctcattggtggtaaaaaagacgtatcctgttcgagttgcttctcttgtttcccgtcaatgatctcaatgtctttcacatcaaagatgcttggaaagctaggatttgatagtctcagcttttcgtaaagccgggtcaatgcaaagctgcaaccctaagaaaagttaggcagtccaaagctaagcttcccttgatggcttatcttaaaaagggaagaagatgaatttcggatggattgatggatggtcccttgtttg

SEQ ID NO: 22273 - DNA, 3720 bp, Oryza sativa
  ref <308>: DATABASE ACCESSION NUMBER: AK072466
  ref <309>: DATABASE ENTRY DATE: 2001-12-06
ggtattttattcgcaacgtgcggttcttccagtttctcggcgcctcggcggtgcccgcgcagcgatcgaggggaaattcctgagagttaaattcgttgaatcttaccatcttgtttgttatgattggatccatttgcccttgcatgcttgattttgcaggtgtgggcgaaggggaagcctcgaagtgcaaagccgcccctgcttgcacgcgatgtgttcggtgaaatgcctctgggacgcacaggtgtcatttcccgaggaagctctgttctcgtaacattttgagggagatgcacattgccagtggtgctactacagattactgaaccataggcgctctatgctgtgaaaagttatgccaacacggtgcacaacctacaaacagggcagctaaaatttcaatcaaatggatcaggagcaccttctgacattgaatgcttgcacgtcatggaatgtggttaatgtgatcaactgatcatccatgtgctgatgggatctttaagtagctgctttgtgtccatcaccctatctgtcaacatcgtagagttcttcaccatatcaactttgaggtgtttcagattctttttatttggttgctgtcatagttagtggagacaatggggatatccaggcaaggaatctgaagagtatgtaacttctactcacgcgcatcaaaatttcagtatctcatcttttactgcctgcttatctggtgagatattataagagggaggactcagtaaactcctctaaaaaatggttcgaagtaaaccatttcaattattcagctcagtacgcaaaacaatgaggctggctttagaaggggttgaccaggactgctctgtcaaagagcagaatgtccttaacatcagcactgcctgcttgcaaattatatgcttacatggtatgtctcttgctctcttcattagtcattacaaaacagtgttcgtagagatgcatacttagatccatgctattgttgcccaaatagaaaaaaaaaattatgattaacatcgtaacatgttctgtagaattaatgggtatggaagcattatcagtatataccattgatagactagctagctgattcgcccctccttccagaaaacagagaagtgattggttgaatgtactcatgaaagtcgcaaaccaaggaccactatggaggcttcaccttaagatatgcatatctaacactggaaactatgttcatgcattggctggcaatggcacatacatggttggttttgtcaaagtgcattgcatgacaagatctcatacgatttgatctctgggttctaggaatgcctaagatgcatgcaaagtttacttctagaaaaacccaaataaaaaaaagataatattagaagtatatacactatttccctttttttcttcattgtcctgaaaagattggtggcaatcattccaacagtagtgacagaactcataaaaatagccctgtacaatgtaaggtgtcccccttgtacattcagtcattcacttccccttatatataggggagagactagagagggaccctcaccctgagctcattgaggtggccaaataggttctgatcacacctttctcctcctccatgcttactacactggcactgtagtgcatgcaagaggagaggcaaaaagatgatgatgtccttagcagcttaggttgtggctacctagctcttcaactagcttcttcccagaatccacatagagaggcagagctatatagcagagtaggaagatacatacacacacatatgcatataattcctagctctagctggtgctagctccataggagatgtgtccattccattgcagtgccacgagctcgctagctagctgctagctcttcgtttccaagagtagtgtttgtttccaagaggccagagtgatcgatcgagcttagctcatcggttcttgggccatcgatcgatcgaccgatcatgcaggggcagcagaagcagaatgcaggtggtggtggtggtgacaatgcgagcccttgcattgtgctggatgggcccatcatcgtcggcgccgggccgtcggggctggccgtggcggcgacgctccggcagcacggagcgccgttcaccgtggtggagcggtccggtggcgtggccgacctgtggacgaaccgcacgtacgaccgcctccgcctccacctccccaaggtgttctgcgagctcccccacgtcgccttcccgccggacttccccacctaccccaccaagcacgacttcctccgctacctccactcctacgccgcccgcttcgccatcgccccgctcctccgccgcaccgtcacccgcgcctggtacgaccacccggcctccctgtggcgcgtgacgacgacgacaacgtcgtcgtcggcgacgtctgtgatcaccgagtacgcgtcgccgtggctggtggtggcgagcggggagaacgcggaggtggtggtgcccaaggtgaaggggagggagaggttcgccggcgaggcgctgcactcgagcgagtaccggagcggggagaggttcaggggcatgagggtgctggtcgtcggctgcggcaactctgggatggagatgtgcctggacctctgcgagcatggcgccatgccgttcatgtcggtcaggagtggtgtgcatgttctaccgagagagatgtttggggcctcgacatttggtatagcaatgaagctgttgagatggctgcccatcaagatggtggataggtttctactcctcgttgcaaggatggtgctgggagacaccgagaagtatggtctcaagaggcccaaactgggcccattggagatcaagaacatcaccggcaagagccctgttctcgacgtgggagcatggtccttgatcaaatcgggaaacatcaagatagtaccggaggtggagtcattcagcggcaacggggcgaggttcgtggacggcaacgagatggcgttcgatgccgtcatcttcgccaccggctacagaagcaatgtcccctcctggctccaggaggacggtgagttgttcacggaggagggcaagctgaggagcagcggcagcagcagtgagtggaggtggaggggtccaaacgggctctactgcgtgggattctccgggcggggcctgctcggcgctggagcagacgcgctgcgagctgccgccgacatcgccgggaggtggcaggagacgcagcaggcagcagccaacatctcctcggtgtagtcgtccacaggccggatcgaggacggacgggacggacggtgcatgctgcgctgtgcacacaggctcagctacctcagctgctgctgctgctgctgctgatggcctctcgctcgcatgcatggcaacatggcataggtagccatggccggagtcgcatgcattgcaaatattccacagctcgcgagctcacatctgttgctagctagcgagcagcagcggccggctggtgaccagcgatggcgctggtgaccagcagcagcgagcagatgcacagagatcatatgtagtcgatgcatgggagaggaggaggaggaggaggaggggtgtgtgtgtacgtgtatgtgcagtgcaggtgggttgtgacaaagttttgcataggatgttgcttgtctgatgcgccccatgcaatgcagatacggctgaaagagtgcagtcgttttttttgtttttataattttggtccagggctgcaggccgtgatgatgtctgcattacgt

SEQ ID NO: 22274 - DNA, 2681 bp, Oryza sativa
  ref <308>: DATABASE ACCESSION NUMBER: AK072467
  ref <309>: DATABASE ENTRY DATE: 2001-12-06
gtaagggcaccatccattgcctcttccctccaccatccccatgctcactgccaacctccccaagcaaaaagaagtaaagagccaccctaatcaactactagcaaatacctagccaaccaattggaagaagaaagctcctaaattcccatgctctctcatccttctcttccattcccagctccctccacagctttcttcacctgtgataccttcaagtagcacaaaacaacaaaaaggaagcagagctagcttaaattttccaaaatcactaggaaaagagcttctttggtccctaggttgctggcattttggtgcctacttttttgctcgctgttgccgccttctctaatcccaagaggggagaaatggagtagaaggctaaaataattcagatgcagctttgctcatggcttcctcaggcagttagggcctaggggtggagaagcctgaagctttgcctgattgcctccccaatcttcttgcctcctctcctttcacttcttctctcctctccgctgtggtttcttgctggttcttggaggcctccacttggttaaatgatgggtgtaggtggtggtcttggtatggaagctactaactgtggtgctttgctcagggagcttcagcaaatctgggcagaggtaggagaaagtgaaggtgagaagacaaggttctgtcagagatcgagagggaatgcttggaagtgtaccgcaggaaggtggacgatgccaatcggaccagggtccagctgcaccagtctgtggccaccaaagaagctgaagttgcatccttggttgccactctaggggagcataagctatatctgaagaaagacaagagtgttgttccactcaaagaacaacttgcggcagtcgttccagtacttgagaacttaaaaggcaagaaagaggagaggctcaagcagttttctgacattcaatctcagatcgagaaaatccgctcggagttaagtgaatatagcgatggcgatgataaagcaaatagtctcatcgtcgatgaaaatgatttatcaacaaggaagcttaacaattaccaagcacagcttcacgcccttcagaaagaaaagtctgatcgccttcacaaagttctggagtatgtgaatgaagtgcattgtttgtgtggagtccttggaattgattttgggaagactgtaaatgggattcatcccagtttacatcagaatggtcttgagcaatccacaaacatcagcaacagcacactggaaggccttgctaatacaatatcaaatctaaaagcagaacagagatctagaatcgataagatgagagagacaatggaatcattgtgtaaactctggaagttaatggactcccctcaagaagagagaagacaatttaacagagtacttagtgttctcatatcatcggaagaggaaatcttatcccccggggttctctcacaggaaacaattgaaaagatgggtgctgaggttgagaggttaacaaaacttaaagctagaagattgaaagaaattttcatgaagaaaaggtcagagttagaagagatatgcagatctgcacacatagaacctgatgccagtacagcccctgagcaaactaatgaaatgattgactctggcatgattgacccttctgagcttctggcaaagcttgaatcgcaaatattaaaagcaaaagaagaatcccttagcagaaaagatatcatggacaggataaataaatggatttctgcttgtgatgaagaagcttggctcgaagaatacaaccaggactcaaagaggtacagtgctggaaggggtgctcacataaaccttagaagggcagagaaggcacggattttagtcaccaaaatcccagctatggtagataacctgataaatcgaacatttgcttgggaaaatgcaagaaacaagcccttcctctatgatggggggcgtctaatatctgttctagaagaatacagactaaacagagagcagaaggaggaggaaaagaggcgataccgggaccagaagaagttggagagcatcctactcaaagagaaagaagctatttttggatctaaaggaagcccaaaaagggcagtcagcttaaatagaaggacaaatgggtaccgttcaagtggaactaccagtggactaatgactccaaatccccggagatcatctcttggtggtgctactcctgagcttttgacacccagatcgtgttctggtcactataatagatactttagtgattcaaggaggctatcagctactcaattgaacttcggtgacgactcgctatccactttcacatccattagtggttctgaaccagaatccccttctttgggataaattcagtaccttttctggtcaatttattggtcttattgccaagtaatcacctgttaatggagcactattctatgagtttctcgcatttgtatgtacattactgatgtattgtatttagcttgtctgctggtattgacttgtaagcactggaatggttgacttggtttgggtttggagttgatgttttgagttgagggctttgtagattgacggttaggtgaaagatacaggaagtggttttggttgggggtcagtcacctgtataatatatttatgtgattggcttgtctaattatatacttatgtgttgcaaccatgcacaactagcttgaaacct

SEQ ID NO: 22275 - DNA, 2483 bp, Oryza sativa
  ref <308>: DATABASE ACCESSION NUMBER: AK072468
  ref <309>: DATABASE ENTRY DATE: 2001-12-06
gagtggtactcggtgtgacctggtggaggccgtgctctccgccttttggctgcttgatgcgtcgcagccatccgatggcgcaattgctcgccgccgccaccaccaccaccacgccaccctgcggcggcctcctaaccgcgcgggcctccgcgtcctctcccggctgcttcctccgcgcgctgccgagatcccgcgccatggcctccgcctccggagccgacgctgccgctgcggcggttgctcccccgtcgctgctcgtcttctcaggaggaaccgcttttaatggtgttgtagaagagctgaagaaagtgacgactcgagttgcacatgttcttcctgtttccgatgatggtggaagcacagctgagattgtgcgagtgcttggtggacctgctgtgggtgacattagatcaagatgcttgagattgtctgatgaaagcacttcagaagccctttctgttcggacattgcttgggcaccgtttgcctcttgatccttcagaagcaaagcttgagtggtaccagattgtagaaggagagcacgctttgtgggatggtgtctcacagccatacagagaaacaatacgtgcctttttagtctacttccataatgagatacttcgacggtcagctgaaatgttttgcttcaccaatggcaggtgattcttttaagcattgggaatttcttttttgctggggcacgcatattcttccagtctctggatgctgcgattttcttgttctcacgtgtgtcacagatccctgctgaaagtcttgttcttccagtgatatccacaaatgacaggcttacactgggatgcgaactatgggatggaactatcatccgaggtcaaaatgaaatatcacatccaagcaatggacgtaaagaagttgttaacaaggattgtaattcatgtagtgcacttccttcaaggattaagcgtgtcttttacatgtcaagtgaaggcagcaacctgttgcatgaggtatttcctgaagctaaccgtacagttttggagcagttaagtaaggtggactgcattgtatatgctatgggatcactctttacatcagtctgtccatcattggtaaccatgctgctctattttttgtttgtacataattgtattgacttgatggtcttaagtcttaacatgatatcagatatgttcatttttatactacatgcagtactaagcaaacatgggtgccgtgcacatctgattactgatactgactttaagcttttttacctgtgcctgttttccacatcagcttgtcttcttctgaaatttaaggctgtgcaggtattgcgtggcattggtgaaactatagcatcaagatccattccgaaggtagtcatgttaaaaaaatattgtcttgttttcatatgctttaatacaatgttctgtatttgtgttgattcatttttttcttgattccatcatgtaaataaaagcattactaagacctgacattcttgttaaaccatattgacttgcttcatgctcttgatttcattatgctagaatgggtttaatagcgacctagaatagtggattcacctccatagtagtggactcatggggttatttgatgtgtgaagggagtttttcttcacataaaatgttgtttttcttggtttttagccccttggttgatcatgcttgtggctattggtgcttttgtctaaaattatttattctgaatctaggtacttcttttgaatgggtcgcatgacagagaaacaactgggttgcctgcttctggctttgtgactgccattactgattctctaaaccgtacatatggatatcctgacaaaagtctaaagaatcttgtaagttcggtgactgtgcctttgaacagattttcagctaatgattggaggaattatgcatcatatcatttactagctttagaggatgggaatatcccacagatcagcgtcccctggtccacatcttgaatgattcagttaaagatgtacatatgcccctgccccttaacattatctgtgtgaagattttccatctgacagcttctttttcattttgtgcagcccaaagactatgtgaatgctttattggtaccaaaaggaggccaaattcctttggatataaaaaacttgtcttctaaaggaatctttcatgtggttactgtggactctatacacgatggaaagacgggcattatttttgatccgcattcattgattcaagccctgaccagtctaatatcggataggcgtttcgtggaacctgatcttctaacagaaaatgtagagtctgtatgctgaaatctcagttctcaaatgttaggtatatatctcgctcctattttttccctgttcaatacattgtatggggaaactgtagcatcagttgcccacttgcacttcgtcagctagcttcattgcttcattcattgaaaacaaaatatacaaaaacaattgtgctcatagtttaatttcaccatcgaacc

SEQ ID NO: 22276 - DNA, 2605 bp, Oryza sativa
  ref <308>: DATABASE ACCESSION NUMBER: AK072469
  ref <309>: DATABASE ENTRY DATE: 2001-12-06
gacctaatactgccgacgccacgtattcctaccccctcccccttcccaatctgtttccaatcggatgagaccccgccggcgccgcctcctcccgctatccgccgcgccgctcttcgccggcgccctccgcctcatcgcgctttccttcacactgcgctacctcgaccagatcctcgccgtgtccctcgcctccgtacactaccctctcgacccccgccccggaaacctcagctccctcctcctccgacctccgctacgcgtccctccctcccacccacctcctccgccgccccgatcgctttctccgctgccgccttctcttccgcttgcctcgactacttctccttcgccttcgccgccacctcgctcattgctctcatggcggcggcgtgtcgtctccaaccgactccgcagcccgcgcgcggcgcgctgcacgcgcgggttacgccgccgacacgttcgtggcgtccgcattggccaagctgtagcctgtacgcttcatgctgtccagaggtgaccacgcacgcaaggtgttcgacactgtgcagtcgccggataccgttatgtggaacacgctgatggccggccgggcttcctggttcggaggccctggagtcgttcgtgaggatggcgagtgcagagtctgttcggtctgacacaaccacgctggcaacggtcttaccagcaacagatataacaatggggaattggggaggatgcctcttgcagagaagagagggttggcggagtatgagcatgttctgaagagagggttggcggagtatgagcatgttctgaccggttgatctcggtgtatacagcggggatgtggaattctgcatggcgtctctttgacttgatggagaatccagatttggttgcctacaatgcttaatctatgtttgctcggcgaattgcatggttggttcatcagttaatctgtttattgggttgatggccttggaattgaagccaaactcgagcactggcactgatcccgtatagtctgtttgggaatgaactgcttgatcaatgcttacatggtcctctcaagtctggatttactgcgaattctccagtgtcgacagcaattaccatattgtactgtaggttaaatgatatggagtctgcaaggaaggccttcaatgcgatgccatagaagaccacggaatcggaatcatggaaagcaataataccagggtatgcctagaatggctggacggagatggcaattgccctctttgagcaaatgctggtacttagcgtgtgaccaaatccaatcatcatttctagctctctttcagcgtgtgcacagcttggagctttgtccctgggaaagtggctgcataggattatcgctgaggaggacttggggcccaatgtttatgtcatgacagtgctcattgacatgtatgcatagtgtggaagcatttccgaagctcggagcatcttcacttcaacagtatggatagcaagaatgtggtctcatggaatgcaattagctggatatggccttcatgggccaaggtgctgaggctttgaagctctacaaggacatgctggatgcaaaccttattccaacaaacgctaccttcctgttggtactctatgcatgcagccacataaggttggctgaggaagggcgcaaagtcttccagtcaatgaccgatcattttgcaataattccaagtattgagcatgcacatgcatgatggacctccttggctgagctggccagctcaaggaggtttttaagctcatttctgaattccccaagaccgctgttggacctggcttaatattgcttggtgcttgcatggtccataaggatagcgatcttgcacaaattgcacccccagaaaacagcggctactatgttctgctctctaatttacttgtagtcaagaagcaaatctctgaagcagcggcaaaaggcaggaagctggttaaactaatcgagatagttgacaagccaaacttcctcatggccggcgactgtgcccatccacagtgtgaggccatacttggaaaatcttaacttcaaagacgatttgacgctaggtatcgacctgagacagagctagcattgtacgatgttgaggaggaagagaaggagcatatgtttgaaagtgcacagtgaaaagctggcaattgccttcggatttctcagcacagaaccgagatctgaaatcaggataatcaagaatcttagggtgtgcctggagtgccacaacgccacccaagttcatatccaaggtgacacagagactgattctggttagggaatagggatgcttcacggttttcatcatttcagagatgagtttgctcctctggagagattactggtgtgattcacctgaaatgcctcgggtgtctaagcatatggtgattcaggcctccactgccgcattgccgcgatggcttcgtcccccatctctccctagaaaactatttaaaaaaataaaaattgtagataattttagaaaatgtagaggaaaatcagaaaaatgtaaaagaatatgaatcatgtagaaagttttggcatgatatttgctatattatggacattgaacaaagtagaaatccatttccccctcaagcg

SEQ ID NO: 22277 - DNA, 3408 bp, Oryza sativa
  ref <308>: DATABASE ACCESSION NUMBER: AK072470
  ref <309>: DATABASE ENTRY DATE: 2001-12-06
gctgcgaaagaaaatgaatccatttcctcatgctgctgctgctctcgatccatcctcagttctcaacgcacaatacaaacacacacacacagagggagagggagacgcagggtcaccacctaatcaccaccaccacctccaccacctcctctcttctcgggattgttactgctccactcactgcttggcccttctctcaccttcttccaacttccccctctccttctactcccctccaggatcgaaccccgcgcgctgcaacaagcctggcattttgaacctcttctttgtgaaccagttgcaggcacaattacgaggtggaaaagtgactttggctgctcagcaggagggtttcagtgacaagatgaattctggtgctgaatatgaagatggcagtgaggaagaagaaccacatgaacgtgtgttttatgatgatgaagacgatggcaatgatgattcaatatgtggggatccctgtgatgattcagtaccaaaagaggaggtgcacaggaagcttatgcatgaagcagagccatatgatgatttggtggctggtgaggaggaatctgttgagaactctgctctgcaagctttcaagaaggaacgaaatgagcaagagctcaagcaggcccagaaaatgggttacagcattaagcaaaaggagataccagtggacatggaaatgggaatgaaaccgttcaaaaaacggcttgtcaagtttgctgatgatgtatcatgttacacatacagtaccgagagttttgctgctgcaaagttggagaaaaggaaagctcagtttgatgaccaggacaagcacctccataagaaacaggaacacactccaccttcgtttcctcaggatggtggcaagctgaaagaagtggacaacactaatctgtatgtgggcaacctacctgcttctgtaggttctcacaagctcatcgagctatttctacctttcggtcaaattgtcagatcaagagttgtggatgattgtttcactggtttgagccagggatatggctttgtgaagtattctgatcctcgctgtgcttctgaagctattaagcgcatgaatgggcgcttggttgaaggaagagctctagaggtcagagtagctggttttccatcatcagaggataatagccagcagccttcaaaggaaactgacatggctaaattgtatgtgtgcaacctttccttgtccatgaacacagacaggctgattcatctttttctgccttttggggaagtaactaatgcaaaggtggccaaagatcacacaacaggcttaagtaaaggatatggctttgtgcagtactctagtcctcaccatgcagctgaggctgtcatccatttgaatggacgtcttgtcgatggaagaaagatagaggttcgagtatctggcataccttcaacactgccaaattcagctgttgaatcacccagcaccaccagaaattcagctgttgaatcacccagcaccaccagaaccgtcaaggaaattgacatgtctaatctgtatgtctgtaacatgccatcgtcaattgacaccaagaagttggttgagcttttccttccatttggtaagatcacccatgcaagagtggtggcagatcctgacaccttttcagccaaaggatatggtttcatcaagtttactgattctgaatctgctaccaaagctattgcagcaatgaatggagcattggttggaggagaaatgataattgtcagagttgcaggcctttccccatcagcatccatctcagctgtacagaccactcaagacatcaacaagtctagactatacatcactaatcttccacggtcgatgactgccgataagatggttaatcttttcgcgccctttggtcagatcactaaagtcctgatgaatctggagtatagtctagtgtggtatgcagatgcaccctcagctaccaaagctgtccaacacatggatggatacatggttgaaggaaagaggttagtggtcaagagatcagagttatgtacaaccaacgcttcacaagcaggtggcaagccaatcaaggaaatcgacatggccaatctctatgttggcagggttccatcaagtttaactgaagatcaattcatcgatctcttccgcccatttggacgagttgttcaagctagaatgtttcgatttcagaggtatggcatggttaggtttgataatccttcatgtgctgctgcagcaattgatcatttggatggctaccagattggtggaagcatactggctgtgagagtcgcggggcttccagcagaatccaatgcagccaagggtgctctgacatcacagatgtcttctaatgagcagggacaaatcgacatgactaacctttatgtgagccatctcccgagctatgttaacaacgaaagacttatcgacctcttcctaccatgtggccaaatcactcaagcaaaagtagttgttgagagatacactggtgtgagcaaaggatttggatttgtcaagtttgctgatgcttactctgctgctgtggctctcactcacatgaatggttaccctctggatgggcatgtgttggaggttaggatagctggtgttcatccagatgctatgagcagttacatggcgcatttctactcccacttcacaatgcatgatcccgcaaaggcggctgtcggaatacctacgtcctattggccgcactattacgatgaatccgcatacaatacaacagctgagaacctgggccaagtcaccactacatctgcaaccgatgcttctgctgctcaaacatctcagaaggaaaggttgcctggatctaaatcagtcgatttggttgctgagaaagattgctcttctgcgtcgaacaaagttgccaattgttctgagtcacagccaacagcttgggctggtccacctggctttgagcctcatgccatctccaagaaatgtactgctgggtccaatgcttctcaagcttgttcaaaggatcattttgcacagtcaggaggtggccacaaaaggcgttcaatcgtctagcaccattcacttcaggccacttgtggcttgatctaacttgatggaagaatctacctaagtttcccatcacttaagaattattagtcgtcaacgttttcttttgtagggtgatttctctttaattgactggttttcccatttggagaaaagaccatgtcctaactttattgggtcagtacagtacttcttagaggtcaggttatctgagctagatggtagatgaaaacaatgtcagtgcaatgtaatggtaaaaacctctatgtggaaccattgcatgtttgtttatgaatcatgatgccaactgatgaccactctgatgagtgagagatgcttggttggagcttcatgctatctgaacttgttaaggt

SEQ ID NO: 22278 - DNA, 2959 bp, Oryza sativa
  ref <308>: DATABASE ACCESSION NUMBER: AK072471
  ref <309>: DATABASE ENTRY DATE: 2001-12-06
gattctaaatccatccagatccccaattccccaatccgccatttccaccacccaaaccctagcggcgcacacaacctctgtgtgtcgccatggcggccgccgccgcgaggctcccgctccagtcgagctccggccacaacgccgccgcgggtgggggcggcggcaagaccatcgaggagatgtaccagaagaagacgcagctggagcacatcctcctgcggccggacacctacatcggctcggtggagaagcacaccgcgcagctctgggtgtacgaggacggcgccatggtgagccgcagcgtcacctacgtccccggcctctacaagatcttcgacgagatactcgtcaacgccgccgacaacaagcagcgcgacccctccatggactccctccgcgtcgagatcgacgccgacgagggccgcatctccgtctacaacaacggcgacggcatccccgtcgagatccaccaggaggagggcgtttacgtgccggagatgatattcggccacctcctcaccagtagcaattacgacgacaacgtgaagaagaccaccggcggaaggaatggttatggcgccaagctcaccaacatcttctcgacggagttcgtgattgagaccgccgatggacgtcggcagaagaagtacaagcaggttttctctgaaaacatgggaaagaagtctgaaccccagattaccaagtgcaaacaaggagagaactggaccagagtcacgttcaagcctgaccttgccaaattcaacatgacccatcttgaaaatgatgttgtagccctcatgaggaagagagtggttgatatggcaggcactcttggcaaaactgtgaaggttgagttggatcatcaaaaggtgcctgtacatagcttctctgattatgtgaaactgtatatcaagtctgcttccaaggacagagacgatgtcaatgaactcccaagtatttcacagaaagtaaatgatcggtgggaggtgtgtgtgagtcttagcgaagggcagtttcagcaggttagctttgtaaatagaattgcaaccataaaaggcggcactcatgtggactatgtcactaaccaaattgccacccatgtgatgaacattgttaataagaggaacaagaatgctcacatgaaagcacataatgtcaagagccatttatgggtctttgttaatgcactcattgacaacccagcttttgattcacaaaccaaagagaccttgactactcgtcaggcaagctttggatcaaagtgtgaactttctgatgatttccttaagaaggttggtagctcagctattgtcctcaatctcctttcttgggctgagttcaaactaagcaaggagctacagaagactgatggaagcaagcgatcaagacttaccggcatccccaagcttgaggatgcaaacggtgctggtgggaaggattctaataactgcacattaatcctgactgaaggagattcggctaaggctctagctatggctggtatttctgtggtaggaagagattactatggtgtgtttcctctcaggggaaaattattaaatgtgagagaagcaagtcataagcagatcatggagaatgcagagatccagaatataaagcaaatccttgggttgcaacacgggaagcagtatgatagcacaaaaggcttgagatatggccatctcatgataatgacagatcaggaccatgatggttcccacatcaaaggcctgttgatcaacttcattcactccttctggccttctcttattaaaattccttctttcttggttgagtttattactcctattatcaaggccaccaacaaaagggacaaaaagattgtcctgccattttactcaatgcctgagtacgaacaatggaaagagagccttggaggaaatgcaagtggttggtctataaagtactacaagggacttggaacaagcacttcctctgagggtcggcagtacttccaggatattgccaagcacaagaaggattttgtctggaagaatgaccaagatgacaacgatattgaattggcattcagcaagaaaagaattactgataggaaagagtggcttactaactttcagtctggaacccatcttgataccgaaggtaagtacatcaagtacagtgacttcatcaacaaggaactgatacaattctcgatggcggatctgctgcgctcaataccttcaatggtcgatggccttaaaccaggccagaggaagattttgttttgctcgttcaagaggaacttagttaaggaaattaaggtggcacagttttccggttatgtatcagaacactctgcgtaccaccatggtgagcagagtttagctagtaccattactggaatggctcaagattttgttggcagcaataacataaacctcttgcagcccaatggtcaatttggcaccagagatcagggagggcaaagatgctgctagtgctaggtacatcttcaccctgttgtcgcctatcactcgttcaattttccctaaggatgacgatattcttcttaactacttggatgaagatggacagtcaattgaacccacctggtatgtgccaatcctgcccatggttttggtaaatggaagtgaaggcattggcactggatggagcacctttatcccaaactataatccaagagatattgttgctaatctaagacggttgctaaatgatgagcctgttgaaccaatggacccatggtatagggggttcaagggctctattcagaagacaggcacaaaagcgggtggtgtcagctatactgtcactggtattattgaggttgttgatgacactacgctgagaattactgagctaccaatccgtcgctggtctcaggattacaaagagtttttaatatctattggtggaaccgacaagagcaaggacaaagacaaggataagggcaagggcaagggtaaggtcaagg

SEQ ID NO: 22279 - DNA, 2731 bp, Oryza sativa
  ref <308>: DATABASE ACCESSION NUMBER: AK072472
  ref <309>: DATABASE ENTRY DATE: 2001-12-06
ggttgctatagctaggtcaaatcgatcgatctcgatcgatcgggtggtcgatccgatcagcagccatggagtaccaccaccggccgcattcgccgccgccgtcggacgacgacgtcgtcgtcatccagatgaacgccgccgccatcgccgccgtcgacgagtggagctccaccaacgaggtggacgacgccgccgccggcaagggcggcggcctcacccgccggaccttcagccaggcctacaagatgaagcaccggacgccactggagttcacgtggaggcaggtggcgttgctgagcttccagtcgctgggggtggtgtacggagacctggggacgtcgccgctgtacgtgttctcgtcgatctcgctggacgaccccggcgaggcggacttcgtcggaatcctcagcatcatcctctggaccttcaccatgatctgcctcgtcaagtacgtcttcatcgtcctcaaagctgacgaccatggagaaggtggcacttttgcgctgtactcgcttctgcgtcagcatgtgaatttcaagggaaacatgccagtgccagtcacacacttggcatctgacatcaacctcaagttccacagtaagaagaggattctgacgtccaagctcctcaagttcttggaacaaagcacaaaatggcaggcagtcattacctacatcgtgcttgctgggacttgcatggtgctaggagatggtgccctcactccagccatctcagttctgtcagctgttcaaggaatccaatcaagatcttcaagcataacacaagctcatgttgtgttgctatctgtgattatcttgttcatactattcttcttccaaaaacatggcacaagcaaagtcagcttcactttttctcccattatgatcttgtggtttacattcgttgcattcattggattgtacaatatcatcaagcactatccaccaattctgaaagctgtgtcgccccattacataatcatatacttcataaggaacaaaagagcggcctgggagacacttggagcaattgttctatgcataacaggtgctgaagctatgtttgctgacttgggtcatttcaacaaatcatcaatccagatggcattttcagtcatagtttatccatcaatgatccttgcgtatgccgggcaggcagcatttttggtcaagaacccttcaaagctcagcacgacgttctacagtagtactccagagccactattttggcccatgtttatcatagcaactttggctgctattgttgcgagccaagcattgatatcagccagcttctccatcattcgacaatcaattgctttgggttgttttccaagagttaccatgaagcatacctcaggcaaacatgaaggccaagtatactctccagagatcaattactttttgatggttgcgtgcatcttaattactgttgggtttaagggtggaccagagatagggcaagcctttggcgtggcagtgatatttgttatgctttttacaacaaacctgatgacagtggtcatgcttataatatgggaaagtaacattgcacttgccagtctattttttgtttttttcttttccatcgaaggcatttacatgacctcgttaatgaacaagattctacaaggtggctgggttccatttgccattactgcatttttcctgataattacactatcttggacttatggaagaagtaagaagggtgaatatgaacttgccaatgtgatggaaagggaggaatttattaagacagtaacaacgagaagccgagtacctggagtatgcatcttctgcacggatatgatgaatggcatcccgccgattgtgcgccattatgttcagcatgtggcttccctccgtgaactgatggtgtttgtcactatcagggttcttccggtgagaactgtccttcctgaagagcgcttcatcatagacaagctagagccagtgggtgtctacaggtgcatagtccaatatggctatatggacaaccacaatatggagggtgacgattacgttgcatcagttattgcatccctcaaggaaatagctgagaatgatgatgagattctggtgttggattcagctttgataaatggatcaacctttgttcttggcaggactatcataaagatgggaactaggcacaactgtttgaagcgcttttttattaataacctttacaggttcttgcaaaagaacttcagatccaacatgtccagtctaaagataaatcctggtaaaaccttgcaagttggaatgctatatgagatttgaagaaggtgaccaattgtggatgcataaatgtgaagtgttagctagaatgctagattgctgaaattggcagacagacaagtttttcttgattataaatgtcacagaattgtttggatgtgacccatattttcttagcatgcaaaccatctgcaataattgtcctgtgagtagatgaccaagttatatacacttttgggataattttattagtgggatgcaattctctttttttctcccctaatatttcacactctaaactgcaccaacttgtaggctggttagtgaatggtaaagaaaaaatgttgcacagtgtgcaatttatgtacacataccattctcatttattttccagttgtattttgataagatggttatctaaatcatattctttggtgaaagtgtaaacctccttgtaaaacaatatagatcttaatgttgcaatgctc

SEQ ID NO: 22280 - DNA, 2756 bp, Oryza sativa
  ref <308>: DATABASE ACCESSION NUMBER: AK072473
  ref <309>: DATABASE ENTRY DATE: 2001-12-06
gaccgcgcaccgccagggcgagagaaaacgtcgccgccgccgagccgcggaagcccgcggcgctgccccccaacacctcaaaaacctcccacacaagcctcctcccctcccccattaacctctcctcccgtcctcccccacctccatctcgcgatccctagctcgctcgctcgctctctcgctgggtgctgatccaaagccctcgatcccctcgactcaggctctagcttagccatggatgaagaggcgcgcgccgccggatgctccccagcgccgccccgcgcgccggctgcttcctgtggcgctgccgccgagctctgcctctgctcccctacagagggtatcgagcaggtgcctggatgtccgtgttttgaggacgccggcgctgtcgtggtgagtggagaggcgccggaaggaccgggggttttgtgctctgaggatggcgctgagctcaaattggctgagcagggtgccctggatgtgagattaggttctccggcagtcggaatccatgagcagcagctgttgcatcgtggtacttcaggttccgatgaagctggtgcaatcaatgagatttcacccgttgaggtgtcgccgtcagaggctagttcaaatttggatactgctggggctattggtggctcccctctcatgttggagtccctgccagagaccagtgatacccgaggatgtgaacaagaggttatgcccggtgttgttgtagggtcatctaatagggatgcaagttctgaggtcggtgtcgagtcggagcgtggctcggatgcggacggtcgaaatggccttggtgaaggggaattggtgtcgagcgttgatggaggcggcgccgagaagagctcaaaggtgactggcgtcttgtctgaagaaggtgtggacgggatggaaacagccctggagccgtgtgtggcgtctgttggctccatcacgcaggttgaggaaggtgtggacaggatggagacgagtttggatgactctgaggcttcagacggctcaaccacgcaggattttgatactgacgtggagacggagtcgagcggttcaagtatagaagaacaagacatgggatacggagtgcacatcccacacacggaacaagcgatctgtgaagtggccaggggaaacaagagttcagaggtgaagagctctgacaggatgtcttcagtaaccctaccaacacttatattggcttcaggtgcagcaatgctacctcatccttcaaaggtgctgacaggtggtgaagatgcttattttatagcttgtgacggttggtttggtgtagcagatggagtaggtcaatggtcatttgaaggaatcaatgcagggctgtatgccagagaattaatggatggttgtaagaaagctgttatggagaggcaaggagctccagagatgagaactgaggaagttcttgctaaggctgcagatgaagcacgatcccctggttcttccactgttttggttgctcactttgatggtcaagtacttcatgcatgtaatataggtgattctggattcttggtgataagaaacggagaaatatatcaaaaatcaaagccaatgacttacggcttcaattttcccttgcaaattgagaagggggatgatcctttcaaacttgtacagaaatacacaattgatctacaagaaggagatgccattgtgacagcaacagatggcctttttgacaatgtctatgaggaagaaatagcagctgtcatctccaaatcattggaagccggcctcaagccttcggagattgcggagttcctggttgctagggcgaaggaagtgggcagatcggcaacctgtagaagccccttctctgacgcggctcttgcagttgggtatctgggttactctgggggcaagctggatgatgtaacagttgttgtatccgttgttcggaggaatccaccacacggtaccctcctctctcctcctccgaccaccatggccatggccacgcaagcctccgccgccaagtgccacctcctcgccgcctgggcaccggcgaagccgcgctcatccaccctctccatgcccacctcgagggcacccacctccctcagagcggcggcggaggatcagcccgccgcggcggcgacggaggagaagaagccagcccccgcggggttcgtgccgccgcagctggaccccaacacgccgtccccgatcttcggcgggagcacggggggactcctccggaaggcgcaggtggaggagttctacgtcatcacatggacgtcgcccaaggagcaggtgttcgagatgcccacgggcggcgccgccatcatgcgcgagggccccaacctgctgaagctggccaggaaggagcagtgcctggccctgggcaccaggctccgctccaagtacaagatcaactaccagttctaccgcgtcttccccaatggcgaggtgcagtacctccaccccaaggacggcgtctacccggagaaggtcaacgccggcaggcagggcgtcggccagaacttccgcagcatcggcaagaacgtcagccccatcgaggtcaagttcaccggcaagaacgtcttcgacatctagacttcttcttcttcttcttcttctctcataatcgacctattaattacttgtgttttgggtggatggacatgtaattttaatcatctgtcaggctgctcttcagttattgatgatggtgtaatcgatcgatggtgggatataatctcttcttataatattgtagtatatgtttggcg

SEQ ID NO: 22281 - DNA, 2846 bp, Oryza sativa
  ref <308>: DATABASE ACCESSION NUMBER: AK072474
  ref <309>: DATABASE ENTRY DATE: 2001-12-06
gggctcgcgtcagacagactccctcctctcctcgagatgctgtacttgccatcggtccatcacccttccatcccgccacgttgcgatcccctcggccacttctattaaacgccaacgtactcctcatcacgcctccaaacccgccgctttgattgtacttgtgctttgctgttaaagagctcgccggcgtgagtggtggcgggtagaagttatatggagagaatgcggtgtgttggtggtggtgacaccccgttggggtttcggggcgtcgtggaggaggagctagaggaggaggtggcggcggtgtcagcgtcggggaggccaatgcagcggcaacggcggcggcggcggcggtggggagaggatgccgacgatggctactcggcgagctcgactggcggcggcgggagcagcggatgcggctccttcggctgtgactcgcctttggctgggttcgtgcgtgctgatggcgacccggacacagatctggagacagatggggtggccactccatcctccaatgcctctgcagcattcgccgagccacacgacgaggaggagggggacgaggtgttgtgtggggtggtggaaggggactgggcacagctgcaagaaccaaccaagagtccggcagaccgtaccaccggagaatgcctgtaccagcggcgccggtcagaagctgttcttttgcagggtaggaaggggttgaagcaacggccagcctctctggactttggcagcggcagccccgggttcaatggagcccctctttctccgggctttgtggttgggggtgtgggtttgatgaacaagggtcttgtgtcatcatcattcatcagatcagacgtttttcctagtcccaggacaccgaactatcggcggcatcgttcatcagtatttggttaccaaaaggggtggagctctgagagagtaccgcttgcttccaaaggtaacaggaggtacccaggcagcagcatggcatttcccttcagcaatgggaggacattgccctccaaatgggaggatgcagagagatggatcttcagtccgaattcgagtgacgtgctcgagaagacttcatttgctcctgctcggcgaccaaagtccaaaagtggtccattagggcctcctggaaaatttggtggacaatactcatctgtgtcattgcttgacaatgggagagttggacatttgacagcaaactcgcctttcttggctggagtactgataccagaacattattgtggagagaaagataacattgggaggtatatgagcagaacagctggtgaggaggccagcattggcattggaggcaagtcttgtctggcaaatggtgggtctcatgctactcaatataacagagatcgtcgacgactggatactgcgattgagtcatcaccttcattgcctagcacccaagcgtctgtacaagatgaacaggttggaatcacagaagagtcagcctccattatcacccctataattttgcggaaggatgcggcaactcaaacaagcccaaatctaagtcggtcatcttcgcccagtgtcagtactccatttatccatttgcttacgacacaccaagtcagagaaaaggagaattgtttctctgatgttatcagggatgtgcacatggacgatcgagtgactcttaccaggtggtccaagaaacatgttacacgagcatctagcaagaactcaacaaatgttatagatgtgaagaaaaagacagtggagtctaagtcttcttcctgggaattaacagaagcaaaatccatatcaaaggttgagcgagagcaagaaaaaattactgcttgggaacacctccaaaaagccaaggctgaggcagcaatccaaaagttagtgatgaaaatcgagaaaaagagatcatcttcactggacaagatttggaacaccctcaggtctgcacaaagaagagcacaggtaatgcgtgaaactgcagcagcaaaccaggatgagcaatcttccgggaaggctaaaaggacatcacaccttaataagaacggccagatcagctctctgagtggctgcttcacttgccatgccttctagtgtcatgtagtttaagaaggaacaggacttaaagtaattcttcgtgttatcaacacgctcgtgttgacttagtgaagttcagagatttacagaataaagatgatccagcagatggaaattatccccccttgaattttgacaagatgctgctgcaacaatgggggaccatgcattatcatgatatagatttctacagttctgctttgtgttagtttcgattctgccatggggggacaagagaaaatggtgccacgaaggaaaggtgaaattcttctgcatacatcccatgtgcctgattgatatcttagcacaatgataattgataaggtcctcctctatcattcattacccattaccaacattctagatgctatgagtttgtgtgcgatgaaaacaaagcagatatgtatcatttgcaccacaattccaacggatagataagaagggaatgtttcagtcagagggaatacagtgccttactgtgattcatgctggaaaactctactggattgtgaaagggaaccaggtggaatgcaatagatttagctagcgtatgctacatttgcatacacagttacaatagcatgtgttggagaaaaatataggaatacaggaaaatagagattctgtttgaatttcatggcaatttgacaagctcttcgcagaacaactctcccatttctgtaatgagctgtttcttgtaattcctattgcaacacataggcgttactgaatgttgataaatgatattgccatcgcaattttttttt

SEQ ID NO: 22282 - DNA, 924 bp, Oryza sativa
  ref <308>: DATABASE ACCESSION NUMBER: AK072475
  ref <309>: DATABASE ENTRY DATE: 2001-12-06
gagatccgacagagaacacctctgataggtattaaattttcatgccagtcacaaatgacttgagaaagagtaaatactcccctcctcccgagaccctcgtcctttccctctccaccatctcttccttcttcctctccaactctctcgtccttctacctctccaccacccctaccaacggctaagagctgctacctccatcccccaattgccgagcgctgccttcgactgtcgaccgccgctgcctccatccccaatcgccaggcgccggatccgtcctccacgaggtcaggggatacggatctgcttgccgagcaccgtatcctccgtccctatgcatcaccgccgccttcgaccaccaagagtcactgcctccatccctcgactgtcgggcactgaatccacatgccccaacctcgtccgccaagcgccaccgccccatcccctgtccgtcgggcatcggatccgtcctccacaaggttagggatgcagatctggccatcgggcgccgtctcatccatcccagtgctctggccgccacctccgatcgtcgggcgacgccacctccatcctacaaccgcgggacaccatctcctcaatccccgagcatcgtctgccacctccgaccaccgcctccatcctcgagcacccgccaccatggcctccaccaccgtggcctcctccaagctccttggaattgcaagtgttttatttgtttgtgttttatgatttgattttgtatatcgcaagtgttcgatgccatgtttctgattgaggtgcttatggttgagattggagtgattgaggtgtgttatgattgagatcggagaagtagatgactcattatagaagaagagttgggtcttttctttactcttgtttttcctctaggaagaatcttattctagatattgcttttcttcttc

SEQ ID NO: 22283 - DNA, 1418 bp, Oryza sativa
  ref <308>: DATABASE ACCESSION NUMBER: AK072476
  ref <309>: DATABASE ENTRY DATE: 2001-12-06
tgtggtaatattcaagctcaacagaccaaatcacaggtctttctctctggatctactcctcagggattgatttgtatgccgatttttccgctgaaccgagccatctgattttgctcttttttcttatctggtttaattgtttttctgttaaaaattgctatctttctcgattccttattggtttatattcgtgttctttgcactggaggagtctattgcgatgaggatattaagctccctcttctgaaggcattgaggacactcgctggcagaatcgaaccaattaacaaagccaccactgagtaacttgaaatcctccttcaatttgttctgctatgttttttctgttgtttttcttagatctgtttggattgtgaggaggtaattgatgcataatccaacacttgatcagaggacggcttctgtcgtccatgtgacgttacacatctttgcatctgaatccaatcacagaacagatcttatcgtttatggttttatgtggattttttacagtatcagaggatgaaaccttataacaatcttaggacaccttctgacacagtgctataacactgtgaatgagaaggcttttctttctgatgatgctttaaagatcatttttatattcttttctttaaatcttgcgtgttctataattttttctccttcctatatctacgattttaagcctatgatgattagcatattgttggaattaccgtcagattatcaaatgacgacatttgtctggcatcctgaggctttataatccagtaatattgtagtgtataaagatctagattttgttcatgtattatgagttgcaatctagtcccagtgaggattctatgaccataggaagtgccgtatgacactttaaacagcagctgcttttctcatttgcaagtgtccatccttcgaccataacctttgtggtttggtctgggatggagtacccatttgcaattggttaattcagctgtgtgtgtgattttaaacgggtctcttgagggattatgcgaagctgtctcataataatatagaatttgtatctgttattttgtgatagtttgggcctgatgccacgtcacctgtagctacggctttgaccggtgatgctttgattaggccaaaacagagttggtttcctacgtttcacatgttgataggaacctgggactgcatctccatcggtctacagagcccgtatctgtcattacatttgatttatttgaattaacaaccttttttgttttgcttttatttttttggtcccttgattatatggcaatgatgataaatttaaggcttgtttctcataacattcgcagttgccgcctaagagctttcgccctgccaggcttgagagctaatgctgttaattccttccttggatgtctgagccattttcttcatgc

SEQ ID NO: 22284 - DNA, 620 bp, Oryza sativa
  ref <308>: DATABASE ACCESSION NUMBER: AK072477
  ref <309>: DATABASE ENTRY DATE: 2001-12-06
ggttcatctctcccaatcttcaacttcaagaaccaaccaaggctcttgtcgccatcccccatccgcacctgtttcccgtctctcctcctctgctctctctccccgtatatggcggccactcagctctgggctctcgcgccattggcgctcctcctcgtcctgcagctcgccggcgcgtgtcacgccgtcccccagagcctcgaggccgagcaggcgtcggactcccactttcagccgcccatgatgaactggatcaacggaatggtcggattgtgcattgcctccgccgccgtcgccgtcgcggcggagttgtctcgggagcaggcgtgcctgggcctgcttctgtgcctcgccttccatgccggtatcgcgctcgtcatccgcgccgccgccgcccctgacgccggccggtcgctcgctcgcacgcagagtcgccggaatcggaatttactctatagttattacttgtagtactatatataaatatagatatggagtatataattatggggatgtgtgatgtgtgcttgtcttaactttatcttgttttgttcagctatatattcgcactgaaaagttgcttgaattatctaaaataaatattttgtttactgtttgct

SEQ ID NO: 22285 - DNA, 1507 bp, Oryza sativa
  ref <308>: DATABASE ACCESSION NUMBER: AK072478
  ref <309>: DATABASE ENTRY DATE: 2001-12-06
gataaatcctcaagtcaacaagaaattagcaagccgaagaagaagaagaaacagaagaagaggcagaggcgcaagatggacgaatccacagaaaatctatcatgccacagtggtagcccatcctcttctcatgatggaacaagcacatcaacaatagagggggagccaaaaccatcttctggggaccttgccaagatttcacgagaacacaaacaagaacaagaatcaatggaggatttagaagatctccttggcatggatgaggataccatctcaaacaaagtcagttactactttcatcagttatatgttcaggaccatcttgatgatgatgatgatgatgattggcttgaatgcgatgggccacagcagctcactgagttgcatgagcagctggccttctaccgcatcataggttatgagttatcaaatggtagaaagcttgacgaactggatattgcaaaactgaaagagaagtaccctccctccattctttatgagaaggggtactttcagtactatgaggatagtcttgaatggtactttgatcctgaacgattccagcctgctgcccttgataactaccagcgtctagtgctttgtgataatggtttgtacatggactgggatcaataccactcaaattatagtacctatgagagtgatctagcatatgtcaaattctgtgaagagctagcacataagactaagtggtttcaagattatttggtactcattgctgttgaggataagataaccatgggtcagtgggacaaagttaaaaatacagtttaccttcaagcaatgaagatcgcactacgcattcgtgttgtttctctaatgcaagttatgactgctttccaggaatatatatggagcatgcggtttgattgttgtaactacaaggattttgatggtgtgtattttgaggtttggaagcgggttgctaagcagaagatggaattcactgatgccctgtcagaacttcatagagaagatatgtttcccttgcgcaatgttgatattaaggatgagcttcgcagtactcgagggagattccgttcgatgaaggaaaattacgatctctacgtggcttgcattgatgaaacggtgccagaaaaggaagctcgtcaattgatcaaagatgccattatagaaatgattccaaaaccacagacttatttggattacgccagaaacaagataaaaatcgcagaagatatcggtttgattaccaaaagcagaggaccagagccaagaacctagaaggtcactgcacaacacagcccaggggagacaatagcgaggcaatgcatgccatggacaactaagcaaatggcggctgaaatctttttgagtatattattagtaataagaaaggatattggcgctacggtttattatcaaatttcttatttattatcttctgttgagatatgatacttttatcccgtgttacactgggcaaccctattacagtgtaatgttacggtcttattttttcgcc

SEQ ID NO: 22286 - DNA, 1353 bp, Oryza sativa
  ref <308>: DATABASE ACCESSION NUMBER: AK072479
  ref <309>: DATABASE ENTRY DATE: 2001-12-06
gaagcacaagaggcgaaagcgcggcgccgtcgcggagaggagaggagggcgacgagggggaggcgattcccaaaccctagctaccctcaccgccgccgccgccagcagcgatgatggcctacgcgctgcgcggtgccgccctcgtcggcgtcctcctcctcgtcgtggcctccccggcgctcgtcccggtggcctccgccgtgcccttcatcgtcctgcacgggatcggcgaccagtgcgagaacggtgggatggcgtccttcaccgaaatgcttggggaatggtccggctccaagggatactgcattgaaattggaagaggagcatgggactcttggctgatgccacttcaagagcaggcagacactgtttgcaagaaggtgaagaaaatgaaagaactccgtaaaggttacagcatagttggcctttctcaggggaacttaattggtcgggcagtaattgagtactgcgatggtggaccaccggtaaagaatttcatctcgattggtggtcctcatgctggtacggcatcagtaccactttgcggttctggcatcgtttgtgttcttattgatgctctgattaaattggagatatattcaaactatgtacaggcacaccttgctcctagtggttacctaaagatacccactgatatgacagattatttgaagggttgcaagtttcttccaaagcttaacaatgagataccaagtgaaagaaatgctacgtataaacaaagattcagcagcctggaaaatctagtattgattatgtttgaggacgacgcagtgttaataccccgggaaacggcatggttcgggtactatcccgatggcgccttcagtccagtgcagccacctcaaaagacaaagttgtacacggaggactggatcggcttgaaggctttggaggaggctgggcgtgttaagttcgtatcagtgccaggaggtcacctgagcatctccagaagtgacacgaagaagtacatagtgccatacttgaaaccggacggatcatccaggttcggcattcgtcgcatcttgtcggattgattcacgagaagaaggcgttccgagtgaccagttctaacgtcacatggacatggattgtatgtaagctctgaattgtggacttaattgttgatgccatgtaaataccttggtaaaggtaatggggtaatggaatacgtcgtgtactgtagggcaggtggttagcgtacctgaactgcagaactggcgatgctagaattgtgctgcctattagcaaaacgcaattgtgggcttttatgtagcagacctcactaggaaaaagtccaattcgacaatctcgtatatagttcggatttaattc

SEQ ID NO: 22287 - DNA, 3828 bp, Oryza sativa
  ref <308>: DATABASE ACCESSION NUMBER: AK072480
  ref <309>: DATABASE ENTRY DATE: 2001-12-06
gatgcgtaattgtgtatcctcatcatcaaccttcattccttcactaccatggctcttctctgcatcagcatggtgctcctcatcctattggcaccatgcgccacttcactcacccctccatacaacaacacagacctcgctgcactgctcgacttcaaggagcaagtcaaggaccctaatggcatccttgccagcaattggactgccagtgcacccttctgctcatggattggggtctcatgcgacagcagcgggaagtgggtcactgggcttgagtttgaagacatggcacttgaaggaaccatcagcccgcagattggcaatctctccttcctctccagccttgtactcagcaacaccaccctcatcggacctgtgccaaccgagctcgataggctgccccgactgcaaactcttgttctttcatacaacagcctgtcaggtaccatcccctccatccttggcaacctcacaaggctcgagtctctttatcttaatagcaacaaattctttggggggattccacaagagttggcaaatcttaacaatcttcagatattaagattgtcagataacgacttgagcggaccaataccacaaggcctgttcaataacacacccaacctgagtaggatacaactcgggtcaaataggctaacaggagcaattcctggtagcgttggatcattgtcgaagctggagatgctagtcctagaaaataatcttctctcaggctccatgcctgctgctatcttcaatatgtcctacctgcaagccatagcagtcacacggaacaatctcagaggtccgattcctggaaacgagagctttcacctccctatgttggaatttttctctctcggtgaaaattggttcgatggacctatcccatcgggcccttccaaatgtcaaaaccttgatttgttctccctagctgtaaataatttcacaggttctgtgccatcatggctggcgacaatgccaaacctctctgcaatttacttgtcaaccaacgagctcactggaaagatcccagttgaactgagcaatcatactgggctgcttgctttggaccttagcgagaacaatctagagggagaaataccaccagagtttggacagctgagaaacctcaggtatataagctttgcaaacaaccaaataacaggtaccattcccgaatctataggcaatctctgacctcaccacaatagatttgttcgtaaacggattaactggatcggtgccaatgtcatttgggaacttgtggaatcttcgtgacatctatgttgatgggaaccagctcagtgggaaccttgaattcctagctgcattatcaaattgcagtaatctgaacacaattggcatgtcatacaatagatttgaagggagtttactaccctgtgttggaaaccttagcacactgatcgaaatttttgtagcagacaacaataggatcactggaagcatccccagtacattggctaagcttaccaacctactgatgctatctctcagaggaaaccagctaagcgggatgatccccacgcagatcacatcaatgaacaacctccaagaactcaatctctccaacaacaccttgtctggcaccatcccagtagaaatcactggattaacaagtctagttaagctgaatcttgctaacaatcaacttgtcagtcctattccaagtaccatcggtagcctaaaccagttacaagttgtggtattgtcccaaaactcgttgtcttcaacaataccaattagtttgtggcatcttcagaaacttattgagcttgatttatcacagaactctttgagtggttctctacctgctgatgttggaaaactgacagcaattactaagatggatctatcaagaaaccagctatcaggtgatataccattttcttttggtgaactccagatgatgatctatatgaatctatccagtaatctactccaaggttcaataccagattcagttggcaagttactaagtattgaggagttagacctttcctccaatgtgctttcgggtgtcatcccaaagtccttggccaatctcacttatcttgccaatttgaacctatctttcaatagactggagggtcagataccagaaggaggtgtgttctcaaacatcactgtcaagtcattgatgggaaacaaggcactatgtggccttccgagccaaggaatagaatcatgccagagcaaaactcactcaaggtcaatacaacggctactaaaattcatattacctgcagttgtggcattttttattttagcattttgcttgtgtatgttggtaagaaggaaaatgaataagccaggaaagatgccactaccctcagatgcagacttgctgaattaccagttaatctcataccatgaacttgtccgtgcaacaagaaacttcagtgatgataacctgctagggagtggaagctttggtaaagtcttcaaaggccagctagatgatgagtccattgtcacaataaaggtcctaaacatgcaacaggaagtagcttccaaaagctttgacacagagtgccgcgtgttacgaatggctcatcaccgcaacttggtgaggattgttagcacttgctctaatcttgacttcaaagcactagttcttgagtatatgcccaatggaagtttggataattggttgtactcaaatgatgggctgcacctcagtttcatccaaaggctcagtgtcatgctggatgttgcgatggcaatggagtatctacaccaccatcactttgaggttgtcctgcattttgatttaaagccaagcaatattttgcttgacaatgatatggttgcacatgttgccgacttcggaatttccaagttgctgtttggagatgacaactctatcacattaacgagtatgccaggcactgtaggatacatggcaccagagttaggatcaacaggaaaagcatcacgcagaagtgacgtatacagctacggaattgtcctcctcgaagtcttcacaaggaaaaaaccaactgatccaatgttcgtcaatgagttgaccttcaggcaatggattagtcaagcattcccatatgagctctcaaatgtcgccgactgtagtctacaacaagatggtcatacgggtggtactgaggattcgagtaagctatctgaggattcaatcatcttgaatatctgtctagcatccataattgagttgggcttgctttgctcaagagatgcacctgatgacagagttccaatgaatgaagtagttatcaagttaaacaagatcaagtcaaattactactctctgtggaagcaatggagctcacctggtgaaatatcctgaaataccctctttagtgcatctggaaactaatcaaaatggttcagaagaaaagaactctgaggaattataataggtttttacaattgacaagtccatataaaaggctttatgtaagtagtatcagttgcaaattgcaaatctgagccacacgcttgtaatgaatcaaaagagaggaatagacatatcttttcattaaatgcaaatcactgcagaactatggatagtgcaggaggaggttgaggctctgttgaaggcttgagaagatggtttgcagcaaaaatgctctgatcaactaatcaactagcaaaaggtgacatataaatgctttcgcatacagggtcaggttatgccacagagcaaagctaggtagcttttgaattttggcttaggccctgttagttcccacacaaaaacttttcaccctgtcacatcgaatgtttggacacatacatggagtattaaatatagacaaaaaaactaattac

SEQ ID NO: 22288 - DNA, 2072 bp, Oryza sativa
  ref <308>: DATABASE ACCESSION NUMBER: AK072481
  ref <309>: DATABASE ENTRY DATE: 2001-12-06
gccacgatccggcaaaacgaaaacgatgcgcgcgagcggcgccgcgagcccaccaccatcctccgccaccaccaccaccaccaccaccacgctactagtaccctcctcctccgtcgccatgccgccccctcgcctcgcccacctccgccgccgcagcagcagcctcctcctcctccaccacaaccaccaccaccaccgcggcggcggcagcgcccctccccaccctctcctgcgcccgccgccgccgccgcagtcccaccccttccagctcctcaccccgcgcgccgccatggccagcgtcgcgcagccaggagtcgcggcggggtcggcggagtacgaggaggtgctggggtgcatctcgtcgctgatcacgcagaaggtgcgggcggacaccggcaaccgtgggaaccagtgggagctcatggccaagtacctgcagatactggagctggaggagccgatcgcgcggttgaaggtggttcatgtcgcagggacgaaagggaagggttcaacatgcacatttgccgagtcaattcttcgatcatgtggtttccgcactgggttgttcacctcaccacacttgatggatgttcgtgagagatttcggcttaacgggttggacatttcggaagaaaagtttataaggtatttctggtggtgctggaacaaactgaaagataagactggtggtgatattccaatgccagcctattttagattccttgcgctgctagcattcaagatattttctgatgagcaggtcaaagcacctgtagtttgtggaatatcttcccttggatatgatcacatggagattcttggaaatacgctaggagaaattgctggggagaaagccggaatattaaagaaaggagttccagcatatacagttccacaaccagaagaggcaatgtctgtactgaagcacagagcttctgaattgggtgttcctcttcaagtagtccagcctttggatccacaacaattggatgatcaacctcttgggctacatggtgaacaccaatacatgaatgctggccttgcagtcgcattggttaatacctggcttcaaaggcaagggcatttcaacatactacataagaagcattctgttaccttgccagatcaattcatcgaagggctgtcaagtgcttgtttgcaaggacgagcacagattgttccagatccggaagtgctgtccaaagacagcagttccttaattttctatttggatggagcacatagcccagaaagtatggaaatttgtgcgaagtggttttcctgtgttacaagaaaggatgaacaacaaccaggccctttggatcagctacatattggcaccgattctaggaagattctcctgttcaattgcatgtctgtaagagatcctcaaagactgcttccatgtcttctagctacatgtgcccagaatggactccagtttgatcatgccctatttgtgccaaatcaatctcaatacaacaagcttggttctcatgcatcaccaccttcagagcgtgtgcaaatcgatctgtcatggcaattatcacttcaaagagtgtgggaaggcctgcttcatagcaataaaggtctaaatggttcaaactccagtacagctagttctgtttttgaatctcttccattggcaatcaaatggctaagggaaactgctcaacaaaaccaatctacttcatatcaggtcttagttactggctccctgcatcttgttggtgatgtattgagattgctcaaggagtaacttcatccagagtgatgcatagttcagattgaaatggctgcttgcagtagcacaagctggccactacaacaatttatgattgggatacaaagcgaaaccacctgattggaacttggaagaattaaagaatgaaagtcgtcttgattcagatactaaccaactgaaaacttgtatttctccaattttcgtgtttctgcctttccaggcagtgtgtgccttgtagtctactgttgttcagaagagtgccacccaattgtggaatgtacaaacattgaataattatatgatgtcactgatgccattttttagactt

SEQ ID NO: 22289 - DNA, 3903 bp, Oryza sativa
  ref <308>: DATABASE ACCESSION NUMBER: AK072482
  ref <309>: DATABASE ENTRY DATE: 2001-12-06
gatgctatttatttattcagctcgccactgccacccgagtgcggctgccttggctttgtctcgtctgcctcctcctcttcttcccgcacagtccacagctccgccactactggggcagagctgagctgagccgagcaggagtggtatacagcagataagactcttgagtgattcaggtaatcaaggcagaagatgtcttcttcaagacctactcaatgttccagttcatccagcaggacccgccaaagctcccgggcaaggatattagcacaaacaactcttgatgctgaactcaatgctgaatatgaagaatatggcgactcctttgattactccaaattggttgaagcacagagaactactggacctgagcagcaagctcgttctgagaaggtcatagcttacttgcatcacattcagagagcaaagctaatccaaccatttggttgcttgttggcccttgatgagaagaccttcaatgttatagcgctcagcgagaatgcaccagagatgcttacaactgtcagccatgcagtgccaagtgttgatgatcccccaaagctacgcattggcaccaatgtatggtctcttttcactgacccaggtgccacagcactgcagaaggcactgggatttgctgatgtttccttgctgaaccctatcctagttcaatgcaagacctcaggcaagcctttctatgccattgttcatcgggcaactggttgtttggtggtagactttgagcctgtgaaacctacagaatttccagcaactgccgctggggctttgcaatcttacaaacttgctgccaaggcaatctctaagatccagtcactgccaggtggaagcatggaggtgctatgcaatacggtggtcaaggaactctttgacctcacaggatatgatagagttatggcttataagttccatgaagatgaccatggtgaagtctttgctgagatcacaaagcctggtcttgaaccttatcttggcctgcattatccagctactgatatccctcaggcagccaggtttcttttcatgaagaacaaagtccggatgatttgtgattgccgtgcaagatctatcaagattatcgaagatgagtcgctccacttggatattagcttatgtggttcaacactgagggcaccacacagttgtcatcttcagtatatggagaacatgaactcgattgcatcccttgtcatggctgttgtggttaatgagaatgaggatgatgatgaagttggggctgatcaacctgcacaacagcagaagaggaagaaactatggggactccttgtttgccaccatgagagccccagatatgttcctttcccattgcggtatgcctgtgagttcttagcacaagtgtttgctgtccatgttaacaaggagtttgaattagagaggcaagtacgcgagaaaagcatattgaggatgcaaacaatgctctctgacatgcttctcagggaatcctctcctctgagtatagtatcagggactcccaacatcatggaccttgtgaaatgtgatggtgctgctcttttgtatgggggaaaagtgtggcggctacagaatgctccaactgagtctcagatacgtgatattgccttctggctgtcagatgtccacagggattccactggcctgagtactgatagcctacatgatgctggatatccaggagctgctgctcttggtgatatgatttgtggaatggcagtagctaaaataaattccaaggatatcctgttctggttcaggtcacatacagctgctgaaatcagatggggaggtgcaaaacatgatccatcagacaaggatgacagcagaagaatgcaccctaggctgtccttcaaggcattccttgaggttgtcaagatgaagagcttgccttggaatgactatgagatggatgctattcactcattacaacttatacttagagggacactgaatgatgacatcaagccaacaagggccgctagtttagataatcaggttggtgatctcaagcttgatgggcttgctgaattgcaggcagttacaagtgaaatggttcgtctcatggaaacagcaactgtcccaatcttggctgtagatagcaatggattggtcaatggatggaatcagaaggttgctgagttgacagggttgagagtagatgaggctattggaagacacatacttaccgttgtagaggaatcttctgtaccagttgtccagaggatgctgtatttagctttgcaaggcaaagaagagaaggaagtgaaatttgaggtgaaaactcatggctccaagagagatgatggccctgttatcttggttgtgaatgcctgtgccagccgggaccttcacgaccatgttgttggtgtgtgctttgttgcacaagatatgactgttcataagttggtcatggacaaatttactcgggttgagggagactacaaagcaattattcacaatccaagcccgcttattcctcccatatttggtgctgacgaatttggatggtgctctgagtggaatgctgccatgacgaaattgaccgggtggcatagagatgaggtgatcaataagatgcttcttggtgaggtgtttgatagcaccaacgcctcctgtcttgtgaagaataaagatgcatttgtaagtctctgcattcttatcaacagtgcattagctggtgatgaaacagaaaaggctccattcagcttcttcgaccggaacgggaagtatatcgagtgccttctttctgttaacagaaaagtaaatgcagatggtgtcatcactggagtattttgtttcattcaagttcctagtcatgagctgcaacatgcactacatgtgcagcaagcctcacagcagaatgcactaacaaagttgaaagcttactcctacatgagacatgcaatcaacaaccctctctcaggtatgctttactctaggaaagcactgaagaacacaggtctgaatgaagagcagatgaaggaggtcaatgttgcagatagttgtcaccgccagctgaataaaatactttctgacttggatcaagatagcgtcatgaacaagtctagttgcttggatttggagatggttgagtttgtattgcaagatgtgtttgtggctgctgtaagtcaagtactcataacttgccagggaaaagggattagagtctcttgcaacctaccggagagatatatgaagcaaacagtctacggggatggtgttcgactacagcagattctctctgacttcctattcgtctcagtgaagttctctcctgttgggggttctgttgagatctcttgtagcctgaccaagaacagcattggggaaaaccttcatctcatagacctagaacttaggatcaagcaccagggcaaaggagtcccagcagatctgctgtcacaaatgtacgaggatgacaataaggagcagtcggatgaaggcatgagtcttgcggtttctagaaacctgctgaggctcatgaatggcgatgtccgacatatgagggaagctggcatgtcaaccttcatcctcagcgtcgaacttgcttctgctccagcaaaataatcatgaaatgttcgttcgtatagccacgacggtggcttgtgcttaggattggacgtacttgcagactgaagattcactggctgcagataaatggttgactttacagataaatggtcgtatggcacatttggttatgtactgtcgtcttcttcaccatgctaatgtcagtatgtgtaatcttctaagttgcaaatgcgtgctgttgctcgcctgaactcattaagataggaagtgaaaacaccaatctgtaatatgctgtatcttgatgctgagagcattcaagttactactacatgaataaaatatggtttgactttactcact

SEQ ID NO: 22290 - DNA, 2978 bp, Oryza sativa
  misc_feature (528)..(528): "n"=any one base of a, t, c, or g
  ref <308>: DATABASE ACCESSION NUMBER: AK072483
  ref <309>: DATABASE ENTRY DATE: 2001-12-06
tcctggttccataggctttttctggctacccagacgaggcgggcggcgccgcagccgtccacccccgcggaccccaagcccaggaaggaagcttctcgaatcttctcgaagctccctgatccttcctcctcccccaaaaccctagatccctaaccccattcggccaccaccaccgccaccatctcccccatggaccatccatggcggttccccgccggcgacgagctctgcccggtctgcgccgcgccgcacttccccttctgcccgcctccgccccaccccttccaccctcctcctcctcctcctcccccgccggagtatcacgtccccttccaccctccgccgccgatgtgggcccccccggggccgcacccctacgaggtcctcgacatggaggccccccacaagcggatgcgcgtgggcgatccgtacggcgacgggatgcctcccccgctgcccccgccgccgcagccggggatggttcccgtggagggcgaccggctgctcggcttgatccgggatcacggncgccctccgtttccgccgccgcctgggatgttgcacggcgaaccgtaccacctcctgatcggttcggttagggaggagggagaggttatcctcctcctcaaaataatgaaaatccctatgggaatgagggcagttttcccggattaagaagccggcggggaggttccaaccggggcttgaaaggttggcggcctaaggttaaattttggggccgggaggacctaaggggggtttttcaaacaaggatcacggttacaatggtttcaaaggctggaaatggctggtggggcggcggccccttcaacgggcttgatacctggaggggaaaaccggtaatgattccaagggtgggattccggagggggatgtccaccacacaacaacacggaagctccggtacgtttcctaaattacaagcaaaccactttgaggcggaaatatttgttctattatcggttctcagcgcactggggcccactagtctatatttgatcagctcacctgatgcctaatgcaaatcgttacaatggacctatccacaatgaggtaccaggtttggcatatcaaccacacttagagcaacatttaggaggtggaaggcaaacccaagctcagcattccatcaacaatgctaaaatcagtgtaattagtgcctgtgacttgttcaagcagccacttcgtgggtcacggcctgatcatattgttatcatcctccgggggctgccaggtagtggaaagagctatcttgcaaagggattgcgtgaccttgaagttgagaatggtggaaatgcacctagaattcattcgatggatgactatttcatgattgaggttgagaagaaagttgaagacaatgaagggtcaaaatcttctagtacatccaaaggaagaaagcagctgaccaagaaagtgatcgagtactgttatgagcctgagatggaggagacgtacagatcaagcatgttgaacgcatttaagaagacccttgatgaagggaattttacatttgtgattgtggatgaccgcaatctgcgggtagctgatttggctcaatttggggcaagtgcgaagaaatcaggctatgaagtgtacctgctggaggcaccatacaaggatccaacaggctgtgctgctaggaatgtgcatgggtttacagtagatgatgtgaacaagatggcagcagactgggaagaggctccaccactatatcttcgactagacatccattcattattcaacgatgaccatctacgcgagcattccattcaagaggtggatatggagacagaagacactgatggggcccctaacacagcaactagtactgaagctgaaaacacacagaaggctgtgtctgaatcactagataatggacatgatcaaggagcagggaagaagtgggactcgtcagaagaagacgacctggatggctacaaagagctaggacagagtaaatggtcaaaagattttgatgaggataccgagaagtctgaccatgcagaaggaagtacgcatgctctttctggattggctcaaacctacagcacgcatcgaaaaacagttacctggggagattgggctaaaaaagggtggtttttttattggtgcagctaaaagaagactcacttcttcattaatcataggagccggatcagggtaaaatttggtttccaacccccttgggctggaaaataatttccaagcagggcaaaggggggtaatcaacaccgatacaaaagaaaggattcagcgaacaacttcgtgacgaaggtgaatccttcaggggcagtttttcgataagaggaggcagggcgtcggagtttttggcaacggagatggcgagtgatcctcgacaagaagcctccaatggcctctctcgatggtcaggatactctaggcatggtttggccatcagttttgcttcggaatcagttttgcttcgttgcaattctgcggctcggaatgtactgctgctgcctggctcctttttcccaatttccccattcacacagttcacggagagcccttgttccggccttgtgccttgtccatgtgtacccctttggtcacaaacagaaggtaacggggaatgcagatttgtggcactgttgtatctgtaagctgtcccaatacccagaggctgctagttaaaaagcgcccccatagaatgtagcactatcagaaatgctcaattcttgttatttaatatagaggttttccagagtagtactatatttgtagtagtgttcttatcatgtagtctttacttattatgactgcagcctgatgtctataaatacaaggcacatggtaggaagagccatatatacctgtctgaaatttcagtactgttgattttcagtttgagtataaagtgtaccattcaatactctatatatgtgtgtctaaacatttgatgtgatgggtgaaaagttattgttttgggaacc

SEQ ID NO: 22291 - DNA, 2538 bp, Oryza sativa
  ref <308>: DATABASE ACCESSION NUMBER: AK072484
  ref <309>: DATABASE ENTRY DATE: 2001-12-06
gtgctcctcgctgcttctgcgtctcctccacgagaccacgaccgacgcccccacatgggtctcatggtggtgtgagctgagctgcttgctgctcaagtggtgagaaggtagagagagagagagagagagagagctgagctgcaagaaaggctcacccatcgaggacaccaaaacaagtcaagaacgaacgactcgtgatccgtccatgggttgctctcctgtcaggcgcatgagattctgaggcggaggaagaggagagaaaggaggaagaagagcaagatagcggcggcggcgatgagctggaggaaaggaggaggaggggatggaggggtgtcgaggagatgggccgtgctgctctgcctcgggagcttctgcctcggcctgctcttcaccaacagaatgtggacactgcctgaggcaaacgagattgctcgaccaaacggaaatggagacgaaggcaacacgctagttgccgcggagtgtggtcctaaaaaggtccaacatcccgattacaaagatatattgcgggttcaagatactcatcatggtgtacagtacgtacaggccttgtctttcttgagaatatttttgtttgcttgttgattttttttttttagttctgatcggtatttttggatgctttgaatgtagaacactagataagacaatagcaagcttagagacagaactctcagctgcaagatctctacaagagtccttgctcaatggttccccagttgcagaagagttcaaactttccgagtcaatcgggaggcggaagtaccttatggtgatcggcatcaatactgcatttagcagtcggaagagaagagattccatacgttacacctggatgcctcaaggttgttgacattaaaatctggaatatgtgtttcattaagaaaaatctgtttattccatcgcaaaaaagtgaaggacagtacttttgttcccctgctgaaaagaaaaggaacagtacttctatagttttattggcatgactcgataaactaacagacaaaaaacaggtgaaaaaaggaagaagcttgagaagagaaggggatcatcattcgtttcgtcattggccacagtgctatatcaggtggaattgttgatagagcaattgaagcagaggacagaaaacatggtgacttcatgagaattgtaagacaagcacttgcttaattgcttattggtttttcatggatcgtatttatcaagtgactgtttctcctagaatcactgggaatgctatttcgcccccttatttattgtggtctaactttattcaggatcatgttgaaggataccttgcactatctggcaaaaccaagacatactttgctacggctgtttcattgtgggatgcagacttttatgtgaaggttgatgatgacgtgcatgtaaacataggtaaatctccatatcttttatgcccttctattgttcttttttgaacattttatcgatcttaagatgagaggaaagtgatcatatctgtgtgccgccatcatgtctgtatttgaagcttctctttgactcattgatggtcatcttaagtgtccattttgtatgtgtagaaacattaaccagggtttcaaatatttcgcaagataacacgcagctagtctcatcaatgcatatttgattcattgcatgtagaaagggcatcactgctatagacaattgattctttatgacattggtgttttgcttttgcagcaacacttggacagattttatctaatcatgcattgaagcccagagtatatattggatgcatgaaatctggtcctgtcctaactgagaagtaagtgcatcacatggttttaactgttctttctgacaatgtctcctttccttttctcatgccctcaaaatttgctaagttttgttaacccttgtctccaggggtgtgagatactatgaacctgagcattggaaatttggcgaaccaggaaacaaatgttttcggcatgctactggtcaattgtatgctatttcaaaagatctagcaacctacatatctataaacaggtgagataacacctgttttcatatttacctgtgtgcacatgcacgccttgttctcattgttgcacaaactaatgctgattcctctaatccaattgctagacatgtcctccacaagtatataaatgaggatgtttcattaggaagttggtttattggattagatgtcgagcatatcgacgaccggagactttgttgtggtactccgcctggtaagctccctacctcctatcttgcatttattatctgaagcttctcttcatacctagcaataccaaccggacgaacaacgtaaacatttgaaccgagtcacattttcgtgtcgtcgatcacagattgcgagtggaaagctcaggcggggaacacctgcgccgcgtcattcgactggagatgcagcggcatatgcaactcggaggggaggatctgggaggtgcacaataagtgcgccgaaggggagaaggcgctttggaacgcaaccttctagcgtgaccgaaacaaccggtc

SEQ ID NO: 22292 - DNA, 1546 bp, Oryza sativa
  ref <308>: DATABASE ACCESSION NUMBER: AK099278
  ref <309>: DATABASE ENTRY DATE: 2002-08-28
ggctctgtgctcccttctcgggcctcggtttgctcagatccaccgcgtcgcgccgtcgatccgacgccgatgcggccgccggcgccggcgacgacggcaggcgcgggggggaaggtgacgccgaacctggcgatggacgcggaggggacgcggctgctcaacctcaccgtgctgcagcgcctcgaccccgccgtcgaggacatcctcatcaccgccgcccacgtcacgctctacgacttcaacatcgagctcaaccagtggagccggaaggacgtcgagggatcgctgttcgtggtgaagaggaacaagcagccgaggttccagttcatcgtcatgaacaggcgtaacaccgataatctcgtggaggatctattgagtgactttgaatttgaacttcagcctccgtatttgttataccgaaatgctgcacaagaagtaaacggtatttggttttataaccaacaagactgtgatgctgttgcaggtgtttttggaaggatattgaatgcttacgccaaagtgcctccaaagcccaaagtaccttccacaaaaagtgagtttgaggaattggaagctgttcctacatccgctgctatagatggcccccttgaaccttcttcgtcgtccactgttctagtttctaatgcccctgatgaatcattgactgattatttcagtggcgctgttaatgttgggaatgtatcaattacaccaatggttggaagaactcatcagcctatcgagtctgttgcatcctcacacgtaccattgatcatcccatctgctgctcctacacatcaaatgggtgttccttcaggggctgcgtcagctccaccactgcccgtcattgacactaacgttcattctagccactcaacaaatcttgtaactccagccttttttgcacctccctcatcgtcttctgcatcattggtggcaccagcttcatcctttatgcccacagcatcaccttttcatccaacttctgccgatgctcaccgtccagcatatggacatggtacaccccttcttcaaccccttccgccgccaacaccacctgcatcacttacccctgtacacaacgatgagcctgttatttcgagggataaagttaaagatgctctcctgaggcttgttcagaacgacgaattcatcaatttgctctatcaggagttacagaatgcacatgcgtagactgcttactcagcctttatggagtgtctggccttgacgagagttcacctgttctttcgtagttttgtgtgctttagttctcaaaactttatgtacagctttggcttctttttatatcggatgtccgcgaagagattgtgcagctttgtcttgatgcattattgatgtagagtttttatagcaatggctggtagtatttcttccaaatggttgtacttgtatagtatttttgtttcctgttggaaactcgaaatcggaagctggactatgtgtggcaacgttaaaatactgtccattttgtgtgatatactgcacagttgccatttagatatttgatatcacacattttttt

SEQ ID NO: 22293 - DNA, 830 bp, Oryza sativa
  ref <308>: DATABASE ACCESSION NUMBER: AK099279
  ref <309>: DATABASE ENTRY DATE: 2002-08-28
gaagctactactcgaagaagatgaagaccgccatgactacttccacccttctcttcctcctcctcgccggcctcaccgccgccgccctcggcacggcggacgacgacaccaccaccaacaccatacgcctcccgaccgacggaggatcagcacagcaggcgccgacgaagaagaagccgtggaagtgctgcgacaacatcgagcggctgccgacgaagaccaacccgccgcagtggcgctgcaacgacgagctggagcccagcaagtgcgtggcacagtgcgaggtgtgccaggaggcgccggggccattcccgggcccgctcatctgcagcgacgtctactggggcgccgacccgggtcccttctgcacgccgcggccgtggggagattgctgcaccaacaccacctgcaccaggtcgatcccgccgatctgccgctgcaacgacaaggtgaagaagtgcgccgccgcgtgcaaggattgcaagcgggtgaagtcgtcgaagcctcctcgctacgtctgccaggaccagttcaccggccagccagggcccaagtgcaaacactcgtgcgagaactagctgcagatcgatatgtatgatcgatcgatcgatctgtgtccgtcaataaaactcgccctagctagcagctagctgatcgttcgttcgatcattcagtgttgctagctagctccatattcagagctctgctatagcttgagagtgttttgctgcaactcgcttagcttaattacgtgtttaaattgtgtgttgtctcgtgtgaacgatggtctagccagtgaccaagagcaaaataaatgaataaatgttgcc

SEQ ID NO: 22294 - DNA, 2172 bp, Oryza sativa
  ref <308>: DATABASE ACCESSION NUMBER: AK072485
  ref <309>: DATABASE ENTRY DATE: 2001-12-06
gaattagcatcacctccctccttgcttatcaacacgtacgttgcgtttcttggcaatgcgtgctgcaccgacgacgatgtggcgttcgccggcggcgccggtgtgtctcctcgtcgccgccgttctcctgtcggcggtggcggcggcgacggcgggggaggagtacgtgaagtacaaggacccaaagaagccgatcggcgagcgcgtcgacgacctcctcagccggatgacgctcgcggagaagatcggccagatgtcgcagatcgagcgcgccaacgcgacctccgccgttatcgagaagtacttcgtcgggagcgtgctgagcggcggcgggagcgtgccgtcggagaaggcgacggcgaaggagtggcagcagatggtggccaagatgcagaaggcggcgctcaagacgcgcctcggcatcccgatcatctacggcatcgacgccgtgcacggccacaacaacgtccacaacgccaccatcttcccccacaacgtcggcctcggcgccacccgcgaccccaagctcgtcaagcggatcggccagtccaccgcccacgaggcccgcgccaccggcatcccctacaccttcgccccatgcgtcgccgtttgccgcgacccgagatggggacggtgctacgagagctacagcgaggacacgaagctggtgcagctgatgacgtcggcaatggtgcccgggctgcagggcgacgcgccggcgaggtaccccaaggggacgccgttcgtggcgggggggatgaacgtggccggctgcgccaagcacttcgtcggcgacggcgggacgcgggacggcatcaacgagaacaacacggtgctcagcttccacgacctgatgcgcatccacatgccgccctacgacgacgccgtcatcaagggcgtcgcctccgtcatgatctcctactccagctggaacggcgtcaagatgcatgagaaccgcttcctcatcaccgacatcctcaagaacaagttgaaattcaggggatttgtgatcacggactggcaagcggtggacaggatcacgacgccgccgcacaagcactactaccactcgatccaggagacgatccacgcgggcattgacatggtgatgatcccgtacgactacccggagttcgtcgccgacctgacgacgcaggtgtcgaacgggtcgatcaagctggacaggatcaacgacgccgtgagccgcatcctccgcgtcaagttcgccatgggcctcttcgagaacccgctcccggacccgcgcctcgccggcgagctcggcgacaaggagcaccggcagatcgcgcgcgaggccgtgcgcaggtcgctcgtcctgctcaagaacggcaagcacggggagaagcccgtgctgccgctgtccaagaaggccgacaagatcctcgtcgccggcagccacgcccacaacctcggcttccagtgcggcggctggaccgtgtcctggcaaggccagggcggcaacaacgtcaccgccgggacgacgatcctggaggcgatcaaggcggcggtggacgagagcacggtgatcgactacacggagcacccggacaagagctcgatcgccgagagcgccaaggagtacgactacgcggtggtggtggtgggggaggagccgtacgcggagacggagggggacaacctgaacctgaccatcccgtcgccggggccgaaggtgatcaaggacgtgtgcgggctcgtcaagtgcgtggtggtgctcgtctccgggcgtccgctcgtggtggagccgtacatcggcgccatggacgcgttcgtcgccgcctggctccccggcacggagggccacggcgtcgccgacgtgctgttcggggatcacggcttcaccggcaagctgccacgtacttggttcaaatcggtggaccagctgccgatgaatttcggcgacaagcattacaacccgctgttcccatttgggttcggactaaccaccaagccaagccatagccaaagttagaggtcaaaacattttatctcaatgtgtagccagagccggagttaggggttaaacattgcatctgatggactattatattgttcggttaaaagtaaaatgagtgtgagggtatggtattttaaaaataaatattagtaggattttattggtgagtgattctcgtaccattttttttctacact

SEQ ID NO: 22295 - DNA, 1191 bp, Oryza sativa
  ref <308>: DATABASE ACCESSION NUMBER: AK072486
  ref <309>: DATABASE ENTRY DATE: 2001-12-06
ttggcgaccgagttctaaaaaaaaaaaaaaactgcgagaccgcaaaggaagaacaaaacccatcaaaaccctcgttcgccgccgccgccgccgctcgccggcgaagaacccctgaaccctccggtaagccctggtagttagaaaccgagtacctaatctcatggcgctcttcctgcgccgaggcgcggcccttgctgcccgctccatccgcgcagccgccgcatcctccgcttccacctccgtccaccgcctaccgtccgtcggatccctcgccggcgcgagggagttggcccccacgaagctgttcctcctggaggcccggagaggcttcgcgaaggggaagaaatcgaaggatgatggtcgaggcgatacagttcaggatgctcctgacattggaccgactgtcaaatctgctgcaactcagcagatggaggcagccgttgttgcattgtcacgggagcttagtaaattgcgaacgggaagagcttctcctggtatgcttgatcacatcatggtggagactacaggtgttaaggttgcgttgaatcgcttggccgttgtttctgtccttgatgcacataccctatcagtgatgccttatgatccgagttcaatgaagtctattgagcatgcgatcatctcatctccattgggcatcaatccaacacctgatggcaacaggatcatagcaaacatcccaccgttgacaaaggagaatatacaggcactgtgtaaggttgtcactaaatctgccgaggatttcaaacaaagtattagacgagcgcgccaaaaggcacttgatacgataaagaaatctgcgtctggtatgccgaaggatgatgtaaaacgacttgagaaggaggttgaagaattgaccaagaagttcataaagtcagcagatgatatgtgcaaggctaaggagaaggaaatctctggaaactgaggacgttaatctggcagaagttttttcttttacttacacaactttgatgccaacgagttcacgggttgcaattctgcagcagccgggaagatatatcttttttgtttgtgcccgttctaactatgatgttagaaattcgaaacagtgtgataccaagggcggcctgcccagcttgtgacaaaacattgattcggttgcaaggcactcatgaattcacgaatcgagaatgagtttaccctaatgtgtgc

SEQ ID NO: 22296 - DNA, 1418 bp, Oryza sativa
  ref <308>: DATABASE ACCESSION NUMBER: AK072487
  ref <309>: DATABASE ENTRY DATE: 2001-12-06
gatttcacctccccggcccacgcccgccgcgcggcccacctccgcctttatgaccgattccccatcccctcctctctcctccaccaccaaaccctagctcccaccgccgccgacgatgtcgtcctcctcctccccgccgcccaacccggacgcgctctcctccccggacctccccccgctggccgcccccgcggcggcggccgcggcagccgccgccgcggtgtcatctggtggcgcggggggctccgggcggaggctgcccccgccgtgctggacgcacgaggagacgctggcgctcatcgaggcctaccgcgataggtgggaggggctccgcaaggggaacctcagagcctccgactgggacgacgtcgccggcgccgtcaccgcccgctgcgggaggttccccacggcgacgcacaagtccggcgtccagtgccgccacaagatcgagaagctccggaagcggtaccgcgccgagagggcgcgcgccgccggccgctccaagggccccaagtggcccttcttcccgctcctccacgacctcgccggcggcggggcgcccgaccctagccccaaccacatcatcaagatcaaatccaagggccccgccgccgcggccgcctccccctcaccggcgtccccttctcccgtctcctccccttcctccgaggaggatgaggaggaggaggcggcggcggacgcggggcggagcaggagccttcacggcctcatctccaacggcgggagcgggagcggcctgcgcttcaccatccccaaggcctcccgctccaagcctgtggcgcagcgagaacaacccaccgccatcaaggtggagaagagcgaggaggacgccgaggcggaggccatggccgaggtggcctcggcgctgcgcgccgtcggcgacaagttcctccgcatggaggagcggaggctggagatctctctccagatagagaaggagcggatggagtctgagatgaagcgcacccagacgctgctcgacgcccagcagctgttcgtcgaggccttcctcggcaagcagcagcaccaccaccaccaccacaagaaggccaaggtgatctccgccgccgctgccgcagcaacagccgccatggatgaggattgatctactccatgttgttggtatggcctactatgtgtttagtaatgtttacttctcattgttaactgctggtgttgacttgtgataattctactagctgttgtttgtgtttgggagggtgattaaagtagtcaggtgtaggatatggagtgggggagtgaggaggaggattaggagtgagtgctcagttaagctgcctgtaatcagttcagtgatcttgtgcttgagttgctgctgctgaagctgccttgtccaaatacttctgtagtagcatattattgtcaggtttttactc

SEQ ID NO: 22297 - DNA, 936 bp, Oryza sativa
  ref <308>: DATABASE ACCESSION NUMBER: AK072488
  ref <309>: DATABASE ENTRY DATE: 2001-12-06
ggctcgctccgccgccgccgccgccgcctcctcctcctcggcgcctctccgccgccgcctcagccatggtgaagtactcgagggaggcgaacaaccccaccaagtcctccaaggccatgggccgggacttgcgtgtgcacttcaagaacacccgtgagacagcttttgctatcaggaagttgcctctgggcaaggccaagaggtaccttgaggatgtgattgcccacaagcaagctatccccttccgtaggtactgcggtggtgttggccgcactgctcaagctaagtcacgccattcaaacggtcagggacgctggcctgccaagtctgctagattcattctggatcttcttaagaatgcagagagcaatgctgaggtgaaaggtctggatgttgatactctttatgtgtcccacattcaagttaaccaggcccagaagcagaggcgccgtacctaccgtgctcatggacgcatcaacccttacatgtcctccccgtgccacattgagcttatcctgtcagagaaggaagaaccagtgaagaaagagcctgagtctcagatcgcagccaggaaggcctagagaaggaagctttgccccccttctgcctgtttgttagatcagattattatatagcctgtggcttttggctgagtgaaaattttggctggttgtccgcttgtttggcctatcggaaattcggaatactactagctcatacttcgtcaaaaccgttatctctgtgtactgaatctattactatgttctcaaaacgcaaatcttggaggtgtttggattttctttaacctgattcggtcgtgaactgatggtttttcttgtcgtaagtatgctgttgcacctggtgttgaacaactaatctctgtttttgaaatggttttcggaaaacagcattatggctcgatgcaggattacagcc

SEQ ID NO: 22298 - DNA, 967 bp, Oryza sativa
  ref <308>: DATABASE ACCESSION NUMBER: AK072489
  ref <309>: DATABASE ENTRY DATE: 2001-12-06
gaggcacgaatcgattcccatctaggcatctcttcccagagagaagaaaaagaactctcccgcagccgatccccaaatccccacgcatctcatggcggcgagcctgtggcgggcggtgatgggcgccggcgcctcgtcggcggacaccgacaccacgggcggggtggagttctggcgttcgccggagcgcgcggggtggctgaccaagcagggggagtacatcaagacgtggcggcggcggtggttcgtgctcaagcaagggaggctcttctggttcaaggactcgggcgtcacgcgcgcgtcggtgccccgcggcgtcatccccgtcgccacctgcctcaccgtcaagggcgccgaggacacgctcaaccggcagttcgccttcgagctctccaccccggcggagaccatgtacttcatcgccgactccgagaaggagaaggaggagtggatcaactccatcggccgctccatcgtccagcactcccgctccgtcaccgacgccgaggtcgtcgactacgacagcggccgtcctgccgcctcagtcaccgcagacggcgacaagtgatcgatttcatcgattgattggtgagcaaaaggacctgtggttcctgtaatactgcagcatatccatggtacttacttaggttttgcgattatggttcatgtttcttgatttgcgaacgtaagtgtgcatttgtatattactgatgcttatcggggaataaatttgggagtttagtgtataggatgcgctctgatactatccaccagttcactccatgtaactttctttaataaggtacgatttgtttggtcaattggtctgtgtttagttgtctaaattcttagatcaagtgtgttggtgaaaccgtagcaaatctttcaaggttagtcctgactaactctgcactcttgcccgtaaatagccaactggctttgatctatggaattataattcaattgt

SEQ ID NO: 22299 - DNA, 1381 bp, Oryza sativa
  ref <308>: DATABASE ACCESSION NUMBER: AK099280
  ref <309>: DATABASE ENTRY DATE: 2002-08-28
gaccccacccccacttttgctgctgcggaccgcgcctcatcgcgtcccgtctccacccgcgcctctcctctcgtcccgcgcctcggccgccgtctgattccgtgcagttggaggctaggaggagctcctcaaaatggtgaccaacgtggtggacctacggtcggacacggtgacgaagccctccgacgcgatgcgcgccgccatggccgccgcggacgtggacgacgacgtccttggcgccgacccgaccgcgcaccgcttcgagatggagatggcgaggatcacgggcaaggaggccgcgctgttcgtgccgtccggcaccatggccaacctcatctccgtcctcgtccactgcgacaccaggggcagcgaggtcatcctcggcgacaactcccacatccatatctacgagaacggcgggatctccaccatcggcggcgtccaccccaagaccgtcaggaacaaccccgatggaaccatggacatcgacaagattgtcgtcgccatcaggcatccggatggggcgctgtattatccgaccacaaggctgatctgcctggagaatacccatgcaaactgtggtggaaagtgtctgtctgctgaatatactgacgaggttggtgaagttgccaagagtcatggtctgaagcttcacatagatggagctcgcatttttaatgcttctgtggcccttggagttcctgttcatcgacttgtgaaagctgcggattcagtctcggtgtgcatatctaaagggttaggcgctcctgttggatcagttattgttggttcgacggccttcatagaaaaggctaaaattcttaggaagacactaggtggtggaatgaggcaagtgggaattctttgtgcggctgcctatgttgccgttcgcgacactgtaggaaaacttgctgatgaccatagaagggctaaagttttagcagatggtctgaagaaaatcaagcattttagagttgatacaacttcagtggagaccaatatggtattctttgatattgtggattcacgcatatcacctgacaaactgtgtcaagtccttgaacaacgcaatgtgcttgccatgccagcaggctcgaagagcatgaggcttgtcatccactaccaaatttctgatagtgatgttcagtatgcactgacatgcgtggagaaagctgctgaagaaatactgacaggcagtaagaagtttgaacatctgacaaacggtactaccaggaattcatacgggcactagtagatcactcctttcgtgcccactgatgcatcagtccagcgtccagcttgcttgtcatctcatgactgatgtactcacaacttggcttaataataactgatgttcactctgttggaatgagctgttact

SEQ ID NO: 22300 - DNA, 1017 bp, Oryza sativa
  ref <308>: DATABASE ACCESSION NUMBER: AK072490
  ref <309>: DATABASE ENTRY DATE: 2001-12-06
gggtctggagcaacagatctatccatccatcccatcctcgatccttcattcctgcccggcggcgagcgagagagaggcggaggagatccgagatggcggggagcgggtggaggaggatcccggcggtgaggaggccgcccatgtcgcgcccggcctcggtctgcctctggatcgtgctcgtcgccgccaccctggcgctcgcccaggcgaagaaatcgaaggcggatttgactgaggtcacccacaaggtctacttcgacgtcgagattgatggcaagcccgcaggacgggttgtcatgggacttttcgggaagactgttcctaaaacggcagagaacttccgagcactttgcacaggagagaaaggaactggaaagagtggcaaagcactccacttcaagggaagtgcattccacagaattatacccagctttatgatccaaggaggtgacttcacacttggtgatggaaggggtggtgaatctatctatgggacgaagttcgccgatgaaaacttcaagatcaagcacaccggaccaggcctcctgtccatggccaatgctgggagagacacaaacgggtcccagtttttcatcaccactgtaaccaccagctggttggacgggaagcacgtcgtgttcggtaaggtgctgtctggaatggatgtggtttacaagattgaagctgagggccagcagagtgggtcaccgaagagcaaagttgtcatcgcggacagcggcgaactgccgatgtaatgagctgaaatgatgtttcactgaagctactgctactgcttctcgttgtagaactgttattagctgctctgttttgctatgcttctaccccgaatctggttggagtaaatttctgttagactataacagcgtgctatatcgcctcttagttgtgggcgatttggagtgaactagcataaaaaggtcgaaactttacttaagtcgtcttcttgttctaagtcgaattatactttgaagtgacttgcttactgttgagcgcttg

SEQ ID NO: 22301 - DNA, 902 bp, Oryza sativa
  ref <308>: DATABASE ACCESSION NUMBER: AK072491
  ref <309>: DATABASE ENTRY DATE: 2001-12-06
gtacagaatgttttacgaacattcaactttttcaagacccctgtggatttatctgaggcttctcgtgttcggaaggagtatgatgatgcaagctcaaagctgtccaagattcagtctaggatatccactctgacagataagctaaaacacgactttggtaaggagaaggagttctattacttttatgatcagtgctttgagagcaaggagggcaagtatgtttacaaggtatgtccattcaagaaagcttcgcaggttgaaggacatagtaccaccagcctggggcgctgggacaaatttgaagaatcctacagagtaatgcaattttcaaatggagacagatgctggaatggccctgaccgaagtctaaaggttaggcttcgatgcgggctgaacaatgaacttaatggtgtcgatgagcctagtagatgcgagtatgtggctgtattatcgactccagcgctttgcgatgaacaaaaactgaaggaattggaacagaagctcaaggcatcttcgaaccagcgtgaccatgatgaactctaaattatggggtgagacaataatgaacttgctacaaggaaaacaactctcaccatacagccatactcacaagagaggtttaacaggtttattatatgaatagaatagcatatgaaactggaattcttggagttcagcactcggattgccaccgaagcagcattagtttggcaagaaaaatttttgaacaaaagctgtaggatatcgcgaaattcctcaccctgatttgtcggtagattttcttttaccactcttccctgtaaacgtatttgctcaatttttctatgccaccccaaagatgctagactgttgtttgtaacaatctgagtgtttctgagttatgaatagtatatttatgaact

SEQ ID NO: 22302 - DNA, 1292 bp, Oryza sativa
  ref <308>: DATABASE ACCESSION NUMBER: AK072492
  ref <309>: DATABASE ENTRY DATE: 2001-12-06
ggcccgcgcgattcacccaagagagatgtcaatgtggcgcttctcccgctccctcctccgcgccgccgccaccaccaccaccgccaccgcggcgtgtgcctccgcgtccacggcggggaagcatgccgcgtcgcggaggtgggtgacgccgcgtgagctccagaggtgctggtacgcgtcgctcccggcggcggcggcggcggtgccggggaaggacggggaggcggaggtgacggcggaggaggcgaggaggctgatgcggctggcgaacgtggaggccctgaagcggaagctcggggacggcgaggtgatcccgtacgcggagctgctgcgcgcgtgcgaggaggccggagccgccaggacgcgcgccgaggccgcggcgctcgccggcgcgctcgacgaggccggcgtcgtgctgctcttccgcgacaaggtctacctccagcccgacaagatcgtggatcttgtaagaaaagctatgccactcgcgctgacacctgaggatgatccaagaaaggaagaactcaagaagctgcagacacagttggaagatataaacaagctcgcacacaagcaagttcgtagaatcctctggtctgggctagggttcttgatcacacaggttgggctctttttcaggctcaccttctgggagttctcgtgggatgtcatggaacccatcaccttcttcaccaccacgacaggcctggttgtagggtatgcctacttcctcatcacatcaagggatccaacttaccgagacttcatggagaggctgtttgagtctcggcagaagaagctgattcagaggcagaacttcaacctggataggtacctggagctccagaggcgctgtaaaggtcctttggagaagatgtgtggcacaaaccaaactcccaaccctgacatggctcaccttcacgagttgtccgttaacaaatgacaaccttcgctcaaacactaatctaccattgcttcttttcttgttcaattttcttggagtaatgatcaagaaaatactagcaaagctgatattttgcattgccgaggtggacatatttcttttgcgaccctttttatggtcttccattatgcaaatgtgtaggtttaatagctactataatccttttttgtaacaatgctgaagcacaagcacatgataattggaaggaaagctttacatgtatgatcatatgaccagaagctttaccgagagctgtgtatctctgcagccactgctaatctactgtgcaatgtggacagattcattagctttatggtctttttggtcg

SEQ ID NO: 22303 - DNA, 905 bp, Oryza sativa
  ref <308>: DATABASE ACCESSION NUMBER: AK072493
  ref <309>: DATABASE ENTRY DATE: 2001-12-06
ttggcgtccaacgtgagcaacatcaccgaagccggtcgctgatcggaggaaaacccaaaaaagaaagaaaaaaacgacgaaatggcttcctccccgtatcacgccgccgtcggtgtcgccgtccttgccatcctcctcgccgcgccggctgcggaggccggggcacctaccgccgcgccgttggccaactactccctcgaggacgcgtgcaagaagaccggcccacactacggcctctgcatcgtgacgctctccgccgaccggtccgccaagtcgtcggacacggtggggctcgccagggtggccgtcctggcggcgcagaagaacgcgtcggagacggccacctacctctccagcatctacgacgacgacagcatcgagaagaagacggtgcagctgcagcagtgcctcgaggactgctccgagaggtacgaggcggcggtggagcagctgacggacgcgacggtggcgctggacacgggggggtacgaggaggcgatggcgctggtggcggcggggcaggcggaggtgaagatgtgccagagggggttcaaggccgtgccgcagcaccggaacatcctcaccttgcgcaaccgcgaggtcgaccagctctgcagcatcgccttcaccatcaccaagctgatccgcgtgtcaccgagcgctgaagaatagctttctcttcttccttttatcccctggatattcttttttattttttcgacgacaggggtaatctgggattccatggttggaagattagcatgtttgttgatggctttgaattggattggtaattgctgtttgcatcagcagacaacatcctaggcgctggcggtggtggaactgttgttgggttcatacgatcaatgtatagcacattcttgatcttaaaaagagcattgctg

SEQ ID NO: 22304 - DNA, 868 bp, Oryza sativa
  ref <308>: DATABASE ACCESSION NUMBER: AK072494
  ref <309>: DATABASE ENTRY DATE: 2001-12-06
gggcccggcctcgcactcctctctcacgcgcgccgcctcgccctcctcggctattcctcccctcgctttgtgccatcgtcgcctcaccctcctcctattgtcgttgcgctggcgccgccctccttgccagtggatctagccatccggaggaaggaagggtcacgaggccatcaagccatcgctgccctcttctcccctctcatctccagaccactaccgccttcctcttcctctccctatcctcggtgagctacagatccggtttggggtcattggaatcgatggtctcggcctccccactggtggatccgatcactggagtcatcggtgagctacagatccggtttgggggtcagcggaatcgatggtctcggcctccccactggttgatccgatcactggagtcacttgcgaccattggtttcctttctggtgaatccttttgataccctttcaaccacaatcgttttgtgcatacatttagcacaaaatccataaggttctgtggagaaactgatgggctaggatgaggtgtaggtcacagattatagagaggacgacttccatgctgcgcatctaccgtcatgctgagcaagctatcgagctttctcctctcttaagcagggctgcgagatttagattatgttgagtttttcttgagttcagattacttcatatgaatttagctatcagaagttccatggttattggttttgttgctgcattgtatgacaccccttgatagaatgacatcaggaagaaaaaagaaaaccatgctaggtattactacaaggctataagtataaagattatatgttatatgagagcattctacaaacaggatatgcaatggaaggatattcttttt

SEQ ID NO: 22305 - DNA, 1923 bp, Oryza sativa
  ref <308>: DATABASE ACCESSION NUMBER: AK072495
  ref <309>: DATABASE ENTRY DATE: 2001-12-06
ttgcagtacaacactggaatttattccatcagattgcaatggttctttcatgtgtgaacaatctacatcctcaaggaggaaactcagatttagaagggattcccttcaagaacagaccactggtttttggtatgaagattgccaagatgacactgggggtgttggaaatattcactggcaatctagggagagggcaaggaatgcaggtagaggctgcaactctttgttcagtgcgaataaccggacaagagaaaggtatgagtacaatgcctgcagttgtggccagcaggaagattatgggtatttttctccaacagctagatcaagtagagagatgaagatgtccaggaaaacaatggttgagaagccctggttacagtaccgcaggtgctatccattggatagcttcatagtgtcaaaaggaagccgagttggtagtacgccaaacaagaatgcagctccaaaacaagtatgggagccaatggatgctagaaagaaagctagcttagggagttcgaatggttcttctgaaacagttagcggtgttgatcgatccaatcaagtggggtgttcaaaggatattgtcaattgtagccaaatacttggctcggagcatgaagaactagctgaagcttcctctgatagatctgaagaagcttgcaaatcgataacagatcagccatgtgaaagcagtgaaaataatcaagctgcttgcaatagtgaacctcctgtggtgaacaagccagacagctgctttaccaaagatggtggtcagacagcaaacatgaccagttcagatagctcttcatgtctaagcgagggagacagagatagtagcatgagcagcatgacctcattgagtgctcagaatccggaatcctcgtctacttctgattcagaaggatcttcagaaaggaacaatagcaacccaggcaatccaccaaccaagaacggttcgcgttcattacttgaaatgtgcgcaggaaatggtttcagagaataccagccacagaatattcacccttctgatggcaatcaatttgggtttggtgtgacccctttccaggagcagctgttacatcagcaaaagattcatgcagctccatacccgtcaaccttgatgggtttccataatcatcacatgtcagttccaacaaatggatacctagcataccctcaacctggtcatttctacccaaatgctgttggatatggtgtggctggaaaccaatgtgttgacttcccaatgcagtacagtaatgtgcatccttatgcaggtcctgaatttggttatgtgcctgcacagccagtccataagactccggtgaactttaatgccatggtgccaactgctgcgctctttagaaatggagcgccagaagtcataaaccctgtcattgtaaaaccagacaggcagcatcgccatacccttcctcctgagccgaagcgggtggatcctgatcctcagaacggctgttcagaagataacaagaagccgcaagatggctctgtgcctttctcgttgttccatttcaaccttcccatatcctcgcctgcccaggcatcatctgaagacgaggtgagtggaggatgtttggcgtcgagatcgccaactccaagtgctcaaaaagctcagccttgctcaagggaggagaccaacataaaggagtacaacctgttctctgcaaggactggagtggaatttcccttcttctagacaacagacgcgcctattatttggcacagaacaatacatagcgagtgatttgtattctccaaaaaaacaaaaacaaaataagttacctcgaggtttttaccgtgttccctcgaatatttatttatttcttcttccatttgttttggttgcccttgtgtgtaaggaaattgcaaagatagtgagtggtatagtttctaaattttgag

SEQ ID NO: 22306 - DNA, 2955 bp, Oryza sativa
  ref <308>: DATABASE ACCESSION NUMBER: AK072496
  ref <309>: DATABASE ENTRY DATE: 2001-12-06
gtggccgcctcgccgtctcgccaccaccgcaaccctcgcctcgtgccgtacgggcgcgccgcgggagccaccaccccacgtccgtcgcgtcgcgtcgcgcggcacgcctcgccgagagagcgggtggtggtggtagtagtagtagcagtagaaggagggggggtcgggcggtcgcggcgcggcgcggcgtgaccccggccggctatgcttcagcgcgcggcgagcaacgcctactcctggtggtgggcgtcgcacatccgcaccacccagtccaagtggctcgacaccaccctccacgagatggaggacagggtgaaggccatgctcaacctcatcggagcggacggcgactcgttcggcaagaaggcggagctctacttcaagagccggcccgagctcatcaaccacgtcgaggagatgttcaggtcctaccaggcgctggctgaccgctatgaccggatatccagcgagctgcacaaggccaaccacaccattgccacagcgttcccggaccagatccaattctccatgcaagatgccgatggggaaggattccagaaggcgatatccgggatcgatctcagcaacttcaaatttcctgcgctggaaggtttgccaatggggtcacgcggcgctagccggggaaccagcccggtcccgaagaggacccagatgcaccggaggatcacctcccacatgaacaaggaaaatgcacaggaggagatcgacaagctgcaaaagcaaatcctggtgctgcagactgagaaggagttcttgaagacctcttatgacagcgcgctgggcaggtatctggacattgagaagcaggtggtggagttgcaggatgaagtttgcagcttgcaggatgcttttagcactggcgcggccattgaagacaatgaagcccgggcattgatggctgcacgagccattgtgtcttgcgaggatacattggttaatttacaggaccagcaacgtagatcatctgaagaggcaagaactgagtttaaacgattcattgaagcaaagaagaagcttgataccttcaaagctgagtgtgggcagcctcatacgcaaaatgatgaacctgataacagtgacaaagaatacatccatgcaatgccatctggggatgttgatgattctgttcagaatgagatcaggtttgacctgcaggaagtatgccaaaaggtcaaagaactaattgaattgcacccaggggtatcggtcactgatttagcagataaggttgaccgacttgtggagaaggtaatcgacctagagcttgctaccacttcacagaatgctcagatcaatagaatgaagactgagatagacgaccttcacaagtgcctgcaagccttggaggaagagaagtcggctttggttgctgattccagtaagctggtagacagattgaagcaagttgaagaggttttgcaagcagtccaacatcttggaaactccatacaaaatgggacacagaatattcataaagaaatgaatgcagcctgcagtgaacttgctgaatttgtagaaaaattacatgaacctgagccccaaaacagtggtttcatgaattcatcccaagagtcaagttgtcaagaagaagattcagaggtaacaagtcagtatgccaagaaacaaacatccgactcaatagatggttcaaagaatgaagtggagaaacaagataaaggctccgagggtcctttggtgcagcaacatcctgacacaaatggatctgatggtgaggacaagattttattagaggggtatgcatctgtccttcagagctacaagggtacagagcaaaagctgtcagaaattgagaagacaaatcaagagtaccattcaaggtcaatgtcagagctgaaggatctgaagagtgccaatgcaatgaaagatgaggagattcactctcttcggcgcatgctaagttctttgcagagaaagatgaatgcccctgctcctgagaatgtggacaagtctgaagaaacttccaaaataagcaccactcctgtcaccgaagacaaagagattgcagaaatagaggagtacatgaagcaatgccaagttgaagagcaacttgcttcgtcaatttccgaggaaaaatttagagcagagattgacagggtgttggagaataacttggggttttggttgaggtttagcacatcatatcatcaaatacggaatttccaaacatcatttgacaagctaaaaactgagatggataaattgattgatgcacaggcacagtgtggtgcagatggagttcctatcagttatcaggtagcaaagctggagtcagctgttctagaaaaaaaattccgggatttgaacacagatcttcaagtttggatagaaaaaaatgtgctattaaaaggagaactagagaacaggttctcatcactctgtggcatacaagaggagatatcaaagatcgcaactctggataaaagcgatgaagttcacttcacccctttccaagctgcaaaactccaaggagaggtgcttaatatgaaacaagagaataacaaagtcgctaaagagctagaagctgggctggaccatgtaagaggtctccaagtggaggttggcagggtgctcttgaagctccgagaaaatcttgaattatctatagcaagaagcaaccgagctcagcaaaacttccgtaacctgtcaacgaaagctggagttccccttagaactttcctgttcggcacgaagccaaagaaaccatcactcttttcatgcatgggtcctggggtgcataagcatcacagtggctcaagggctggtcgtagatgagaatggttggatcatcaactttcttttgtcaattaatacagaacagagctcagtgtacctgtcaattgatttgtggtatatgcagtttctcatagaccttaaatgtaaagaaccctgcatctcttaatataaatttggttc

SEQ ID NO: 22307 - DNA, 1389 bp, Oryza sativa
  ref <308>: DATABASE ACCESSION NUMBER: AK072497
  ref <309>: DATABASE ENTRY DATE: 2001-12-06
ggtctccctcctggtcctggggctcttcctcccccctttccctccaccccttcgcgcatccaaaaccgcaccccccgacgtcgacgagccactccgctcggcttcagctctcctcctcctcctccttcctgctgctcccacgccgtataaaagtgccacggccatcagctcaccacaactatccaggctgctctacgtcggcaagacggccggataccacagccgcacccaggaagagattcatgagctgctactaagcttcgcagaggctggtgccaatgtggtgcggttgaaaggcggcgaccctctggtctttggaaggggtggagaagagatggatttccttcaacaacaaggaataagagttgaagttatcccaggaattacatcagcttcaggaattgcagcagaacttggcattccactaacccatagaggtgttgctaccagtgtcagatttttaactgggcactctagaaatggtgggccagatcctctatatgtggcagagaatgcagcagatcctgacacaactttagttgtgtatatgggtttgtcaacactgccatctcttgctcccaagttgatgaagcatggtcttccaccggatacaccggctgttgcagttgagcgtggcactaccccccaacaacgcatggtattcgccatgttaaaggattttgtgaatgaagtcaagtcggaggatctagtctctcctactctgataattattgggaaggtggtggcattgtcacccttttggatcgattcatccaaacagggtgcacaatccattgagaatttgtacgcagccgagaccaaaagataacagttcctctagaatcaaatgtcggagtgaccgttgagtaatgtcatacatcagatatggactttcacaagtaagatctaagccaatctgatctggtttagtttagggcatgcaaacagatgatggaatgaacctgggcaggagattatgcacattccctgatgacatcacaggaaacagagattcttaaagattgatgacagctttgaacaaaggtggacatgtgatcctcaaataacagcactgcatttgaacggtgtttgacataacttattcactgctactgcaattcttcaactcggagtaatactcctttacttggagctgttcgctactcccttccattttaaggttgtagctgttctctttcgtttttgtttacccggcatttttttggtcagaggctctcctgattcacgaagcctcaacaggcatatggctgttttaagtgtgtaatctaccaatcgttgtatgtcagcttttgcatattccttcgtggaaaactcgattgtacatttgataattatttctgaataaaacgtgtacacccttttcctttt

SEQ ID NO: 22308 - DNA, 1319 bp, Oryza sativa
  ref <308>: DATABASE ACCESSION NUMBER: AK072498
  ref <309>: DATABASE ENTRY DATE: 2001-12-06
gattttctagggttttaagcctcacccaaaccgcctcagccgctcccctctccccttcgacaacagcagcgccgccgccgccgcaggagccgcatcgccgggggttcgccggagggagggagtagccatggatcggtaccagcgggtggagaagccgcggcccgaggccgccgtcatcagcgagaacgaaatccgcatcaccacccagggcctcatccgcaactacgtcacctacgccacctccctcctccaggaaaagcgcgtgaaagaaatagtgttgaaggctatgggacaggctatcagcaagacagtggctattgctgagatcataaagaaacggatccctgggttgcatcaagatacatcaattagttcagtcagtattactgatgtatgggaacccattgaggaaggccttgtaccattggagatgactcgtcatgtttcaatgatatcaatttccctgtcaccgaaggagcttaacaagagttcagctgggtatcaagctcccttgcatgcagagccaattaagccacaaagataccaacaaacccagcaatatcaacaacaacagcaccagtctaggccaagccaagttcaaacagattcatatgggcgcggccgtggtagaggcagaggaagaggaaggggttggggtggtaggggaggctatggtggagggtatggtggatatgataacaaccaaggaggttatggtggatatggacaccagggtggatatggacaccaaggggggtatggcaaccagggaggatatggccacaatcaaggtggttatggagggtatggttacaaccaaggtggatatggaggatatgaaaatggtggctggaactacaaccggaacagaggtggtggtggtggcgggggccgtggaagaggcaactggggatatggtggtccaggaggatatgaacgttcaggtccggcatatgaacgtggtggcagaggtggaggtagcccaggcggcagaggctatgcccggggccgtggacgaatgggcggtggccgtgggcgaggcaaccaaaactattagatcgactttagttggatgtgccagcccggtcgttgggtgctgtatgaagaacaaaaactgtggatgcgttctccataggacggaaccctagctgtttctttgtgatcaatcgactagtcttcccagcttttcgctataatcatcaatggtgtctgccattgcttcgattctgtgggattttgacaagaatgttaagttttaccttggacatattttcctgtatttaagagtgcatttttgaatagcttgtctatcttcctcc

SEQ ID NO: 22309 - DNA, 3913 bp, Oryza sativa
  ref <308>: DATABASE ACCESSION NUMBER: AK072499
  ref <309>: DATABASE ENTRY DATE: 2001-12-06
gaccggtactgcttgctaatcccgatcccaccttcctctctctcttgtgcgctccatctcttgttattttactactatcatcttcagggcttggcttcgattcgttctaggtttttcttttcttttcttttctttatatatactcttggtgttgttcttgtatggtccgaaatgatccatgttgattggggctctagactgcacaggcatatgcatccaatatcttcttctaggcacaattaatttaatttcttgtgtgactctaggatctaacctcgattggtggatgttaactgctagttccctgtgttgctagtatgttctcttcatccttcactcattacatgtcatctaaaaggtacatgtttcatgtttcggcggtttagggagcgttcttatactaaaaatcatcatacatgccctaataaaaattatatcttcccccccccccccattactgcacctattgtactgctggtgccataaataaaccaaatccgcattcatcacttgctaaacaaaccattgcaaactgagtttgatttactcaatgttatggatggtgcttatctaattggcataacaagctttgtgcgtcagggttcatcggtcatcatccagctactatattcacaactcgtgtgatggatgtgcttacgtgctttccagtgccatgggatcgtattgtggccttcatcttggtttctccaccaatgtccgtggggaggaaccatggccaacaatggaattatgttcttcttgttgctggagcaccgttatcttcttctcctattattttctgttgccgccttcttctgtgccaaccagccacaccagcagaagttgtgcttcgactgatggtggcgggaagcacaattaattgtgcccttcatttcagagcatgccgaaaaatctccttcccctcttcagatttatacttactgccaacaatgatgagtaccatacatgctaatcgtatagctcctttaatagcgagttactaacaaaggagtttaattttatgccctccatgggggcttatttttaaacgaattgattttatagttaacgttcgcatcactcaaccaggatgtatgctttaagaaatataacatgattgccatgtaaaacgcctgatgcactattatcatatttcttgatgagttaggtcctgaagaaacatttttttcagttaaaatagccatccatcaaactttttttttgttaaagaaaataaactatggctgacaagatttccatgttcttaattgctttcagtctggagtgctttctgatctctaagactagtgttctcgtaggctaggtggtcacagtagtttaacatgatgtccatctagtataacaggactcgtattttttttctataattgatgctaagatttatatatcttctcttatcttttgttttagttagtcaacattttagccttacaagcatagtttgtcgtatcctttttggaaaataaacggcctatacttttctgttgatatctgaggaggtgtatggcctgcgtcaaatttattcacctgtggtacaaaggttttagctagaatctcgtgggttggctatgaatgatatgtgcaagaatatataattgttccagacataaattaaatattgcctgtctcttgtactctttatatatacatctttatgccatctttattcctttttttttcctcttggtctcaggtgtatttcacttactcttttggatagcatggcttatatcggaactacctctatgctaacattgtctaggtctcattagctagattaacttaactgttttcacttagtggtgttagtctgtaaagaaaatgaatacccagtcttagttgagtcttttgtaaaaaaaaaaaatggaaccaaagaatgcaattgcactggatgaacatgtgctggattctactatccgcaagaggaagcgtgtgggtgctactcaatgtgctgaggccaatgacgcccccaacctctctcagaatggtccaaaacagaatctcgctttatttcctgattcgactggacataagaagtccaagatgatgtgctctgccgatgacattctggagaggtacaataacttcaggataagcgggatgcctgttcgtgtgatgtctcaccaacatggtggatggagagacttcccagaggatgttgtcaattcggtacagcagagcttccagttgaagaggccaattactagtgcagtattccagaacaggcacatcctgttggacttcatgcagatggtttgtttagattctgtgatggccataagcaagccaattgcttggatcgatgatcatggtaaatgcttctctccggattcatgtgctggagtaataccatctgaacctctgcagcatggaaaaaatgagttcttgaaaagttttcatgatctaagcagtagttatgaagctcatgaacatgatgggatgtctgcagctgaaagctcaagttcagcgtcttttgatgcagtgctttctgatgttcaggaggtcaataatgtagtggaggacaaacagaaggtactcaatgaaagtggtgaagtttctggggaaaataaaaagggccatttaagccatatgaatgaaactgctgatggggccatgcaagctcctcgtaataatcaaagtgtccagcgtgctgattcagctgttcggaatttgttgtttcaaggatcaggccatctatttactgaaaaggacatcatcggtatttatagaaccccaatgctagatcaacttgggaggtcccgttatagtcttttccagaaggaggtacaagtcacaaaaaatcaacggggaaatgcaaatgagcgttatgcatggcttgcttgcactaagggtactatggaggagatgatgatgaatggtgctttggaaatagcaaaacctctgcagggtccaatgtatggtgttggggctcatcttgctccagcaaactcctccaatatctgtgttggtttatctgatattgacgaaaatggaatcataaggatgatgttgtgccgtgttataatggggaatgttgaggtggttttccctggatcaaatcaatgccagccaaccagtgaaagttttgacagtggtgtggatgatctccaaaggccaaagcattacatcatatgggatgctaatgtgcataagcacatttatgctgaatatgctgttattatcaaagtaccttacatgaacaatggagatactgcatccaatatctctgagataagaaattctggtgcactagacaatccaaccaaggatgacagtctacagaccattgcgtcttcaggtgatgaacaacaagcatgtatgcttgggcgtgctccaagtccaaggtctcctagttcaccttggatgcccttttcaatgctttttgctgctatttccgctaaagtaccccgttcggacatggatctggtgcataaatattatgaagaattcaagaggagaaagataagcaggcctgacctagtgaagcagctgagacagattgttggtgacaagcttttggtttctacagtagtgagacttcagcagaagttgccacccatggcagcaactgaacaagtgccaagagcacctggaaggggaggaggtgctagtccgtaattaaaaatgacagtttgccgacataacaagctgtggaggagtcgggttgagcaaagagagctcaaggaaatgtgtgtaaaacgtttgtgccgtaatgcacagactttagctcttgacaaacaaaactagtctaaacttccttgttgacaacatgttgtttggttgtataaccatgcatggtattctcgactaccggctgtagtgttgttctttttcgccgtcaaatgtagctgcggcttgaattcatcaatatctcctgtggatatttcgttcc

SEQ ID NO: 22310 - DNA, 1690 bp, Oryza sativa
  ref <308>: DATABASE ACCESSION NUMBER: AK072500
  ref <309>: DATABASE ENTRY DATE: 2001-12-06
gatcatcccaagcggcacagcagcctcgagctgaactgaagcaggggaggggaggagaggagaggagagagcaacgcgttcaccgttgagagaagagaaggaagtaagacgagcgcaatgcgtcgcgtcacggtgctcgttctgctcctcgcctgcgcggcggcgcgcgccgccgccgccgtcgtcaccgacgggctgttgccgaacggcaacttcgaggagggcccacccaagtcggacctggtgaacggcacggtggtgcgcggcgcgaacgccatcccgcggtgggagacgtccgggttcgtggagtacatcgagtccgggcacaagcagggggacatgctgctggtggtgccgcagggcgcgcacgccgtgcgcctcggcaacgaggcgtccatccggcagcggctcgccgtgaccaggggcgcctactacgccgtcacgtttagcgcggcgcgcacctgcgcccaggcggagcagctcaacgtgtcggtgagccccgagtggggggtgctccccatgcagaccatctacggcagcaacgggtgggactcgtacgcgtgggcgttcaaggcgaagatggacgaggtggcgctcgtcatccacaacccgggcgtggaggaggacccggcgtgcggcccgctcatcgacggcgtcgccatcagggcgctgtacccgccgacgctggccaaggggaacatgctcaagaacggcgggttcgaggagggcccctacttcctccccaacgcgtcgtggggggtgctcgtcccgcccaacatcgaggacgaccactcgccgctcccggcgtggatgatcatgtcgtccaaggccgtcaagtacgtcgacgccgcgcacttcgccgtgccgcagggcgcccgcgccgtggagctggtggggggcaaggagtcggcgctggtgcaggaggtgcgcaccgtgcccgggtggacgtaccgcctgtcgttcgccgtgggcgacgcgcgcgacgggtgcgcgggctccatggtcgccgaggcgtacgcggcgagggcctccatcaaggtgccgtacgagtccaagggcaccggcgggtacaagcgcgccgtcctcgagttcgccgccatcgccaaccgcacccgcgtcgtgttccagagcacgttctaccacaccatgaccgacggctcgctctgcgggccggtcatcgacgacgcctccctcgtcggcctccgcaagaagacggccggccggcggctgctcctgtaagacgaacggccgcgtggcatcgaacgccgtcgcattccctccattctatgaatatatgaatacaaggcgcggttaaacttgggggcagttggcacgaccaaagttgggtgctaaaatgggtagtattgctaggctcgtttttttggttttggtgtgtactctggtatatgtacgcgtgtgcgcgcgttgcatggttatactttggagctgcgctcgtttggtgttttgttgtgaagaggagaggtgatacgtggtgcaaggtctgtcacaaggggtttggttgatcaacttaaccggaggtgccaacctaaacgcaccatcagacattatgaatgggaagcattactagtgctcacttttttataagtcaattgtgtatttttaattctgttctaaaaagccagatcctttttgaaagttgagtcatacatttgagctatgctcgaaaacc

SEQ ID NO: 22311 - DNA, 1380 bp, Oryza sativa
  ref <308>: DATABASE ACCESSION NUMBER: AK072501
  ref <309>: DATABASE ENTRY DATE: 2001-12-06
ggggtgcgtcgcggcctccgctacccgacgacgccgccgcggcccgcgtcatctccttggctcgccgcctgcgccgtcgtcgcgccggtctccgtcgccgggcgccctgctgcttccatcgcatactctcgcctctgaccccgagtccatctccccgtcccggcgtcgcctcggcctcgactcccgtctcctcgaggagttcgccccgtcgcctgcggccgatctccatccatcccgcgagcggcggtgcggtgttcctgctgcttccgcctccgggcgggagagggaggagcgggtgaccatggtgagcatggaggtcaccgatgagatgttcaagtgcatggaggttgggctggccttccgggactataatggaagaatcagttctatggatttccacagcaaggctacaaattacctcgtgacagcatgtgatgatgaatcaattcgcctatatgacattcaaaatgctgtgtgtttgaagacgattaatagcaaaaaatatggggttgagcttgtgtgcttcactgaaaacccaacttatgtcttgcattcttcaaaaaatggatgggatgattctctccgtctactctcactggtcaataactgttttttgagatatttcaaaggccatctagacagggttgtttctatctcattgtgctctgagaacgggaacattctctctggttcacttgatcgaacagttctcctatgggattcaagggttgaaaaagcacagggtttgctgcgtgttcaggggaggcctgcagtttcttatgatgatcagggtttggtttttgcaattgcatatggtggctacataaggatgtttgatgctcgaaattttgaggaggggccttttgatattttctctgtcggtaatgatgattcagaagccaatgtcataaagttcagcagtgatggcaggcggcttcttttaaccaccaaagctgggcgtgttcatgtgctagattcatttcatggcaataatatagcaacatacaacgtgaagccagtggtaagcaattcgacgctggaagcatcattcagccctgatggaaaccatataatatctggctctggtgatggcagtgtatatgcttggaatgttaggagtggaaaggttgctcgctggggaagcacagatagtgagccaccgctaattagatgggctccaggatctttgatgttcttgactgcatcttcggaactgtcttgttgggtccctgatctatctaagctgggatcctttactgttagtaagtaattcgaatggtacgagttgttgtttgtgtatgctcaggcctttgttctagctgtttgcaaaatgacaatgttaggtaaaaatctgagctgcagtgggtcaagcctcgggtc

SEQ ID NO: 22312 - DNA, 1638 bp, Oryza sativa
  ref <308>: DATABASE ACCESSION NUMBER: AK072502
  ref <309>: DATABASE ENTRY DATE: 2001-12-06
gtcccggcctctccacccacccctcgatctctcgctcgctcgccgccgatcggatcgcgtggttggatcatcacaactctgcaaagatgagagagatcctgcacatccaaggcgggcaatgtggcaaccagatcggtgccaaattctgggaggtggtgtgtgatgagcatggcattgaccctaccgggcggtacacaggcaactcagatctgcagttggagcgtgtcaatgtgtactacaatgaggcctcctgcggtcgctttgtgcctcgtgctgttctcatggaccttgagcctggtactatggacagtgtccgcactgggccctatggccagatcttccgccctgacaactttgtgttcgggcaatctggtgctggtaacaactgggccaagggacactacactgagggtgccgagctaattgattctgttttagatgttgtgaggaaggaggctgagaactgtgactgcctgcaaggattccaagtatgccactctcttggtggtggtactggatctggtatgggtacacttttgatatcaaagatcagggaggagtaccctgaccgcatgatgctgacattctcagttttcccctcaccaaaagtatctgatactgtggttgagccatacaatgctacactctcagtccatcagttggttgagaatgctgatgagtgtatggttcttgataatgaggctctctacgacatttgcttcaggactctcaagctgaccacacctagctttggggatttgaaccatttgatttctgccaccatgagtggagtcacatgctgcctaaggttccctggtcagttgaactctgacctccgtaagctggcagtgaaccttatcccctttccccgtctccacttcttcatggtcggattcgccccgctgacatcacgtggctcccagcagtaccgtgcccttactgttcctgagctcacacagcagatgtgggatgccaagaacatgatgtgcgctgctgatcctcgccatggccgttacctcaccgcctctgccatgttccgtggaaagatgagcaccaaggaggttgatgagcagatgatcaatgtccagaacaagaactcatcctacttcgtcgagtggatccccaacaatgtgaagtccagtgtctgtgacattccaccgagaggcctctccatggcatcgaccttcattggcaactcaacatccatccaggagatgttccggagggtgagcgagcagttcactgctatgttcaggaggaaggctttcttgcactggtacactggcgaaggcatggacgagatggagttcaccgaggcagagagcaacatgaacgaccttgtctctgagtaccagcagtaccaggatgccaccgccgatgaggagggcgagtacgaggacgaggagcagcaggaggctgacgacatgtaaggtggcttttgcttggtggttctagggcagggttttgtgtgcttggtgtttccgtcttacattatcaccgtattaccgcctcgtacgccaccgcccgcttcctatgtcttcgctttgttttttcgtctgtgctatgggaacctttttgggtactgtattacttgatgctggtctgcgattgttgatatttcggatgaattttaccttt

SEQ ID NO: 22313 - DNA, 1525 bp, Oryza sativa
  ref <308>: DATABASE ACCESSION NUMBER: AK072503
  ref <309>: DATABASE ENTRY DATE: 2001-12-06
ggtttcctctctctcctcgtctcgtctcttctctctccatttttctcgaagcgagagtgcgttgcgttgcgagcgggaagcgaaaactcgaaaccatggccacggccggcgacgagcagcagcagcaggcggcggcggcgcagacggcggaggtgacggaggcggcggcgaaggaggtggtgtccgtggagatgccggcgccggaggggtggacgaagaagtttactccccagagaggggggagatttgagattgtttttgtttcaccaactggagaagagattaagaacaagagacagctgagccagtatctgaaggcacaccctggaggccctgcatcctcagagtttgattggggaactggtgatactccaaggcgctctgctcgcattagcgagaaagttaaggctttcgatagcccagaaggggagaagatcccgaaacgttctaggaactcatctggcagaaagggcaagcaggagaaaaaggaggccaccgaaaatgaagaagcgaaagacgctgaagctgacaaggaggcccctagcgaagatgctccaaaggagactgatgtagagacaaagcctgctgaagaggcgaaggaggcccctagcgaagatgctccaaaagacaccgatgtggagatgaaaactgctgaagatgccagcaagaccgcagacgccgacactcctgctccagcaccagccggaaccgagaaggaagatgcaaaaccggctgaatctgaggctgctcctccagcaccatcggaaggaggagagaagaaagaggatgcaaagccagctgaacctgaagcagcagctgctccaccaagcaacccaactgagccttccgcacccaaagctgctgctgctgctccagtagagaactccgcggacaaaggccctcaccaggacagccagccgccttccgccgccgcccccgccaaggagtcatcccctgtcaacaacgggcagctgccggctggtgcctctgccgtgaagtgcacctgaagatgaagatgaaaccccccaacgaatcatcatcctcctccccttgtccgtgatgtacgccttttaggaatcattcgcatttgcattgtgtaatcaaatcgaccaaggaactgacgttgctgggtgacagccggttattaggctctgcatcagtttagcttgcttgtatgtatggtatgattgtggtgtggcacagcaacatacatacatacatacgtgtaccctacccatcatgctcataatatctcttatcatgcctaacttgctgtaagcacattaatcttaggacatatataccgtcgtctgtccgtccgtctgtctgtgtttgtacctgtgctgtattatgtgtaatgacttgattagctatctatgaataaggttggatgtggatgtgcatcctcttatccatccatttaagattatccatcaacccatcaggcagggtggtttggatatattccccggtaatgcctgtgtaatactagtagtgatgtaatctaagttgtgtcttgtgtttg

SEQ ID NO: 22314 - DNA, 1737 bp, Oryza sativa
  ref <308>: DATABASE ACCESSION NUMBER: AK072504
  ref <309>: DATABASE ENTRY DATE: 2001-12-06
gatcccccctcgacaactagcccaccgccaccgccaccgccgccgagggcgatccgatatgcatttgctgctcccgtagaaggcgcgcgtcgcagcaatggaggcggaggacgacgagcgagccgaggcggaggcggaggcgcggcgggagaaggaggccggcaacgccgcctaccgcaagctctacctcgagacggccgtgcgccactacacccgcggcgccctcctcgacccccgcgacatctccttcctcaccaaccgcgccgccgcctacctcctcatgtccaagtacaaggagtgcgtgagggattgcgacgaggcggtggagaaggggcgggagctacgcgccgacaacaagctggtcgcgcgggcgctggcgaggaaggcgtcggcgctgctcaagctcgccgcctgcgccgcggactacgacccggcgatcagggcgctgcagcagtcgctggccgagcactacagcgaggagacgctcgccaagctgggcgaggcggaggaagccaggaaggagattgaggagcgggagcggcttgatcaggaagctgccgatcaccaccgagacagaggcaacgttttcttcaagcagaaaaggtaccaggaagcagcaatgcactatactgaagccatgaaaaagaacccaaaagatcccagggtttttagcaacagagcccaatgccacatctacctaggagcattgcctgaaggtcttgaagatgcagataaatgcatagcgttggatcctacttttctgaaagggctatctgcgtaaaggtaaagttcagttacttatgggcaattatgaaattgctctggcaacttatgtagagggtttgaagtgtgacccaaacaacctcgaagttcttgatggcttaaggagatgtgcagcatgcattaaaagagctaatggcggtgattctagagcagaggacttgagagagatactgggagatttgcatttgaatgatgatctgtgtaataaacttcaaaaaagcatggatgaagctgcggtgttgaagaaggaagcatccgacgagcgcttaaagcggattgaatctgaacgattggccaggacattggaagatttgtatttaagccaggtccaacaaaggaaagaaacagaggaatctctttcaagggtacaacaagagtttgaacaacttaaaatacagcaagatgaggtcaccgtggaacttcagagagtcaatgagcagaatgagaatctactaggtcaactctcagactccagagagcattttgaatggcttctatctgagcatgaccaattgctacgtgaacgagataatgcagttcgagaggttgaagaactacgtcagaaaagaggacagatgctttcagttttggttacagcgatgcactgtgaattttcatcatctgaagtggaatctgcaacagaaaattttagtaattcattgaagattggagaaggtgggtttggctgcgtatacaaaggtatcctccggaacatgacagttgcaataaaggtgctgagacctgatagtttacagggacaatcacagttcgaacaagaggtttctatcctcagtagagtgagacaccctcaccttgtgactctcttaggagcttgctcagagtcttcaacactcgtatacgagttcctgccaaatggaagcctagaagattttcttatgtgttcagataagaggcaaactctgacgtggcaggctcggattcgaattattgctg

SEQ ID NO: 22315 - DNA, 614 bp, Oryza sativa
  ref <308>: DATABASE ACCESSION NUMBER: AK072505
  ref <309>: DATABASE ENTRY DATE: 2001-12-06
gagttagttaatcctcgagagagtttgcaagatgtggggggagctggggaacgcggcaacggtggcgcagctggtcggggcggacctcggggggctcatctccaagatcatccaggcggccgcgacggctcgccggaacaaggcggagtgcgagcagctcgccgtccgcgcgtccatgatctacgacctgctgccgcacctgcaacacccggaggtggtgcggcggccggaggtcctgcggccgctggccttgctcgaggacacgctccgggaggctcaccagctcgtgacttgctgccagcacaagggcccaacctaccggttcgtgatggcggggcggctggctgacaagatcaggagcgtgcaggctaggatcgactcctacctcctcttcctcccgctcatcagccacatcgacatcatccactgcctcgaccagatccacagaatgctcatttcaaccggcgacggcgattgcaggaccatggcatctccctctgcagactcccagtccctgcttcaacgacggctggtagaggaatcgtagatcaagctagctacctcttccttatttttgatgaaactcatcactactctgtgcttttgtgttattt

SEQ ID NO: 22316 - DNA, 3204 bp, Oryza sativa
  ref <308>: DATABASE ACCESSION NUMBER: AK072506
  ref <309>: DATABASE ENTRY DATE: 2001-12-06
gagttttgcccttgcctacccacccgcctccgccgatccccattccaacccgcgactgcgagcgaggcgagtagggcggcttcgtcggtcgtcctgctgcttccgccgcatccatcctggtgagcacatcctcttccgccgccgtcgcctgcggccgatccccatccatcacgcgcgagctcgtcctggtcctgctgccgtcgcctgcagccgatccccatccatcacgcgcgagctcgtcctggtcctgctgcttccgcagcatccgttacgcgcatcctctttcccatctctccctgtgtctacctacgaacttatttttctcgaatttgtgcgttaaccctagcttctgttgtagaaatctgccttaaaccttaatactagtaacagtttgatgggagcgttaaccctagcttctgttgtagaaatctgccttaaaccttaatactagtaacagtttgatggctcccaaaaaggtttcccatgctagatccgccactgtagtattacgactataagtttttttttgttttcacagcaacttaaagaaataagcactgcgcaacacagtagaatagccataaaacaagccttagtgccagggttgggagcattttgctgctggcgtgagaagatgtttccattctgtgggttcagcattttagctggcgtttagctagatgtgcaacctaaggacgtctggtttagcaagtttaatgtccaagttattattctatagttagaaataaaggtctgttgattaaattacagctagtttagcaagtttaatcacaccttaatactagtaaccgtttgatgggctccccaaaaggtttcacatgctagatccgccactgtagtattacgactataagtttttttttgttttccacagccacttaaagaaataagcactgcgcaacacagtacaatagccataaaacgagccttagtgccatggtttggagcattttgctgctggccttagaagatgtttcccttctgttggttcagcattttagctggcgttgggctagatgtgcaacctaaggatgtctggtttagccaatttaatgtcccaagttattattctatagttagaaataaaggtctgttgattaaattatagtagtttagcaagtttaatcaccaattagggttagattccatcgactggtttggggcaaagtgtttactttattgtagatcttgttgcttaaattacatccgccggagaggttccgacttaacatgctgtagcatcgatgtagtgtattccaagcctctctctctctctaattaacccatccacattatctaaaaaaaattaacccatccaactttttggagatttcttttaaaaaaaattaacccatccaactttttggagatttctttggtgggtggtcaggcgggaataacagtttgtttccaaaagttttggagattcagcggatacacatgaaacatgtttgccatgcttagtctcttaccaaaggctttttttttcttgcagatatgacttgttgagtggaaagaatcaatatagtacaatctattttcttctcaatgtgtagaagaaacagtctgtaaccatacatacttattaatacgactagtgaaatctagacatggacgatgagaatggccttgagcttagcttgggtctctctttgggtgggacatcaggaaagtctaaggctagagatgctcctctagaacctaaagcagagcctcaagtggaagagagcagtagcaaaggtgtttcacaaactcctgaggctccttttgtgcattactatcaaacaaatgcagagaaccaagaacacagtagcaagcagagacacagccctgctgcaccaccgtttgggaacttttggggacagccagggagttcttctgttcctgtggcagatggatccaatgaacagaagccagtctctagtaaacggaaattactttctgaggagataagttttcagaagaaacctaatacagctgctgagcaacctgatgcatttagtaagagctctgacggtggtgtaaaaaacgctcctatttcaattagcacggatgatggttcaacaggtgaaaacgaggatgttgcagaatcagaagcagaaggctcaaactcttggttggttgcacagcgtgaagacagtgctaagggatctgttgtcaatagaggatctgacagaaaacgatccagtgatgatgctgcagttggttttcaaggaaagaggcagccaggtttctcaagaagtgaatccagctctggaaaattgccacaaggaaatcctttgtcattgcaagcatcaaatgttgttgctgtgccatatcaagtcccgtctcaggtttcagctcctcccagtattaccaatgcatcaaatttcactccagtatgtacagtgcagttgaggccacctacaaacaatggactagctgttacaatgggcagtacctctcaggtagcttttggttatccagctgtccagctaccaacacttgaaacaagctcttcatgggcttttggtgctccacctcaggctatgtcctcttttactgcaaaagacaaagttgaacgagcaggaatcagtcaagctgacgatggcaagaaaactcaagaggctggtgcttcctcttctgctcttgtggaggatgacaagaagtctgatagggcattacctctcatgggttctgctataaggccaggcattgcaccaaatgtcaaattcggaggatctggatcgtatcctgaccttccctgggtttctaccactggtactgggccaaatggcagaaccatatcaggtgtaacatataagtttggcagaaacgaggtgaagatagtctgtgcctgccatggcacccacatgacgccggaggaatttatgcggcacgcaagtgcagatgctccgggccaagaaaatagtgcaactttgccggcatttcctgtcgggaaccaagcagcctcagcccaaaactaattcaccgatctgtatgacggtttcaatgagtgctggactaatacctgttgcgccctttgtgtttatatcctccattccttatactattattattatgtattggtgctcatatgatatttatcttgtaagtttagacacgtcatgttttatgcttgatgttgaggataaatttgttgtatgtctttaacttattattatgcatctttttaggaggatc

SEQ ID NO: 22317 - DNA, 1279 bp, Oryza sativa
  ref <308>: DATABASE ACCESSION NUMBER: AK072507
  ref <309>: DATABASE ENTRY DATE: 2001-12-06
gggcggcggcagcatcttctcttccccccctcgcagcctcgcgtctcgactcccttttcaaccctcctcccctccagtctccttccctctcttctcgtctcctctcccaccaccaccgcgccacctaccctcgccgcagcggcagccgcggttttaatgaaaagtagcacttgttaaagctactagttttgttagaaaatctaacatggggtcaggaaacctgatgatgaagaaggtggtgaggcccagctcttttgatttcgacatacagcttgataaaagttggacagaggatgttacttgcccaatctgtcttgattaccctcacaatgctgtcctgctaagatgtacatcttatgagaaaggttgcaggccatttgtctgtgatacagatcaaacccgctcaaactgtcttgagaggtttaaaggtgcatatgagctccctgccaatatgaaagtttcaaccattgcggtggctcctcttgatagtatccatattgtggctcctaatgtgaacaaccgcccaagctgcccattgtgtagaggagatgtcattggatggattgttatcggtgaggctcgtctacatcttaaccagaagaaaagatgctgtgaagaggattgttgttcattcgttggcaacttcaatgaacttcagaagcacacacaacaaaagcatccagactcacgcccttcggaaattgatcctgctaggcaagttgattgggagaacttccagcaatcttctgatattgttgatgtgctgagcacgattcatgcacaagttcctaatggaattgttctgggagattatgtcattgagtatggggatgatgaaactggagaagaatatgaagttttcaggcgggtcagaaggcactggtggtcttttatgtttttcaggggattctctagatcttcaagaagacgaagaagagcaagggcaagggaaagaagaggcagtggaaggaggaacagcaatcaggcacatctcgaaagctttaacctcgaggttcccacacaatctgttgacttgagagaaatcagatttgatgaaattgatgatgaatacatagtcacaggggccatacctagtattgcaacacctggaagaatggctagtttccattacaggtctgtagaaacagtctactgttaatcttccttagttattggagctatatctatcatttttgtaagaacaaagaacacatgctagtccaatgaaaaaatattcaggttgtagagaatatggaatacaaacataccgcacttttgg

SEQ ID NO: 22318 - DNA, 1275 bp, Oryza sativa
  ref <308>: DATABASE ACCESSION NUMBER: AK072508
  ref <309>: DATABASE ENTRY DATE: 2001-12-06
ttgggttggaggatatcatggacaatcaagtgatatgtacaatctacaagcttccggattctcataagcacatcgctcgtccacctgttggtgtaatcatacccaagaagactgttgaagctactgacctgaaaccaccacctgtgctatggcatgaagacagtggtaggaggcctcatgataataacaacaggaggccttatgaaaacagcaacaggcaaaacccagctggagcaatatctggccgccaacttggggaagctgcccaccgacttgtggtgaacagcttgaatgctcggagtggcggacaatacaataccccatcgatgccatatcaaaccataatgaatggcatgccttatccaaatgggattccaccaaggatggagcagcctgctcctggctggcatgttcctggtgatctaccaaatggtcaggtaccaccagcttatgcatcatcatcaggtcattatcagaacgataggtctgggccttctcagtatggacgagataaccatggaaggtacccatatgcaagagacaaccaccatgattcaagaggaagggttccaccataccatcagagcggtggaaactcgtatcaatcacattctgctccatcagcaggtcctggacggtatgcgcaacccccaccatatgctggggggtatggtaggagctaccagcctgcaccgtatggaggtggtcagcagtggcagcagcagcagcaacaaccttatggctcctatgctgggtcagggccttatgggggtggggcacctcctgcaaggcctaattcacgaccacagcagtcgcagaaccgttacaataccttagataggaattctaacaggagacctccaccaggtcatgggcgacactaagcccaacctctgtttgttgtacctgtggttttgttgttagaaaacctgcgtactaaaatagagaacctcagcctagtaaaacagagaacctcagcttagagatatatatagagcaatttgcatagtctcgtgatcgacaagctgttatagcatcaaaggttctaagaggcatgtgttgtacaatagaattgtcagttcatcagatactggtggctgactgccgtttttcatttgtggcactcattattttagccccctaaggttgggaatatgtttaacaagttttgtatttttaagataataatgttctaggttaaatttcagttttggtggatatatgtcaaaatcttgtattcttttcttatttataatggaattgtggttttccctc

SEQ ID NO: 22319 - DNA, 2606 bp, Oryza sativa
  ref <308>: DATABASE ACCESSION NUMBER: AK072509
  ref <309>: DATABASE ENTRY DATE: 2001-12-06
gaattgacaaacgtaaaattggcagatagttaaatccccttcccccctccccctcccccgccgccgccctcacacaggggtcttagttttccttgtgggtttgggatctcatcgaggcggcggcggcgggattccggccgatggcgtggaggcgcgtcctttcgcagcttgcgaggagtcgaccagcatccacaatctacaatgaactgataacctccagaccttcgtggctgcttagaggtgacgtcaacggtggtggcacacttaaaaacttaaatgagaggtatcagtcaagctttgttggtagcttagcacgcagggtgcaaaacctcgacgttccaagtgaagcctctctgctgaaagaaatatataaaagtgacccagaacgtgtcatacaaatatttgaaagccagccatggttgcactccaatcgtttagcactttcagagtatgttaaagctcttgtcaaggttgataggctggatgatagcaccttgcttaaaacactacggagaggtatggctgtttcaggaggagagggagaaagagttggtagctcttctgcattaaagagtgctggacaagcgacaaaagatggaattcttggcactgcaaacgcacccattcacatggtgacatcagaaacaggtcattttaaggatcagatttggcgtacctttcgaagccttgcactaactttccttgtaatttcgggcattggggctcttatagaggatagaggaataagcaaaggtcttggtctaagtcaagaagttcaaccaatcatggattctaaaacaaaattcagtgatgtaaagggtgttgatgaagccaaagctgaacttgaggaaatagttcactatcttcgagatcccaagcgttttactcatcttggtggaaaactgccaaaaggtgtcttgctggttggccctcctggcactgggaagaccatgttagcgagggctgttgctggggaagctggtgtccctttcttctcatgcagcggtagtgagtttgaggagatgtttgtaggtgtaggagctagaagagtcagggacctttttgctgcagctaaaaaacgttctccctgtatcatattcatggatgaaattgatgcaatcggtgggagcagaaatccaaaggatcaacagtacatgaggatgaccttgaaccagttgcttgtcgaactggatggctttaagcagaatgagggaataattgtcattgctgcgaccaactttcctcagtccctagataaagcactagtgagacctgggcgctttgaccggcatattgttgttccgaatcctgatgttgaaggccggcggcaaatcctagagtcccatatgttgaaggtcttgaagagtgatgatgtggatttgatgatcattgccaggggaacacctggattctcaggtgcagaccttgctaacttggtaaatgtggctgctcttaaggctgccatggatggggcaaaagccgttacaatgaatgaccttgagtatgccaaggaccggatcatgatgggcagtgagcgcaagtcagcagttatttctgatgaatcccggaaattgacggcgtaccatgagggagggcacgcccttgttgccatccacactgaaggtgctcgccctgtccacaaagccaccatagtgcccaggggaaggacccttgggatggtgtcccaactcccagaaaaagatgagacaagcttctcacggaaacagatgctggcatggctggatgtctccatggcaggacgggtggcggaggagcttatttttggggatagcgaggtaacatccggtgcatcgtctgatttccagaacgcgaccaaaatggcaagagcaatggttacgaaatatggcatgagcaagcagcttggctttgtctcttacaattatgaggatgatggaaagagcatgagcacagaaacaaggcttctgattgagcaggaggtgaagagcctgctggagaatgcctacaacaatgcaaagaccatcctcacaaaacacagcaaggagcaccatgttctagcccaagcacttcttgagcacgagactctcaccggagcccagataaagaagatcttggcccaggcaaatagcacacagcagcagcaggagcatgctgttgaagctccacggaagacgccagctgcgccgtcgtctccagctgcgtcggcggccgcagcgacggcggcgacggcggccgccgcagcaaaacaagctgcggcgaaagccaagggtgttgctggtattggatcttgagcgcatggaacatccaccgattggcagcataggagtacaatctaagtagcagctaaggtaggagatttgagcaaaatgtgtagtgttcacctgctcttctgcgcaagaaatgtcttttggtacgttctcaccaggtcagagctgttttgttgctggagaccttcccttccaggctccagcgaggggcctatgtagtgttgatatattgtagtaataatttgatagctaaccgtagtccatgtcctttgtttatttatctttatttaagaaactgacgactattaaaaatagaggggacataggaccaatattcaggaaatattattaaggttcagg

SEQ ID NO: 22320 - DNA, 2901 bp, Oryza sativa
  ref <308>: DATABASE ACCESSION NUMBER: AK072510
  ref <309>: DATABASE ENTRY DATE: 2001-12-06
gcttggtccatcgagctcggctggtcgggtagggcgcgcaccggcgacgacaagctcgcgccacgacgccgcgccgccggctagttccactcccattcatggccgcccgacagtgaaagggaatgcaatgtcaacatgtacctgcaaaaatgcttcacctttatggctttcaagcagaatggatgggcatcaacaactgtgttatcaatgccaaaaaacagaggagaaaaggtacgttctaaaactcctttgtccaatcaccaaaaagatagaggcatagagctgctacagttcggtcctcgaggggctcagttcaacttgcttttcttacaatcttcgtactgtatacattgtgggagtttaattgtatcatacatatggttttcttgaggaaattgagcatgtttattgaaagtattaagactcttagtccagctacattacatatatctcagttgacactgctgctgatgccccttacccattcacgacccatcagctcttttgctctggccacaagagcggaaagtggtgtgttgtgctccatgagtcctgtgtctcctgaaaacaacttgtagttttcagatctcgagggcgtacgttctaccattgatagtgtttccaccatccagcatttgtggaaatcatttgcatagcgagaattgaactccatcaagtatatggcatgctgaacaattaccctcctgatgccaggacaatgggcactgggtctcatatgtgcattaagcacatcgacaagcctctttacgaatttttccttaatttgaccatgctctacttctcgggcaaagtcttcaggaatgactttacatatttgtgaactaaggccaataaagacctctagttctgccccttctgcatccattgttcgttccagcacctgtttagcgacaccatgtttagtggaaatagcgacgccatgtgagccaacaaaatcatgattagtaaaaacattattcaacaaacttcagctacattatcacctatttagtttggtcacccaggacgtttccgacagtatacttagttttccaatgtacaatagtttttgcatgttgttgggttcaaataatcaatatcatgacatgagcttacaatgctatcaatattaagagcacatatgtgtatgctttgagaaacaatgtgcaaactgcaggtcggttctccctaacaatttatgaaaaagtacagatagcaagtacatgaaaatagtagttatagtatgcacccccagtattgcacttgatacttcaattagtagtttttgtctctagtctatcaaaaaaagacagaagaatttgcagctcacctctcgtaagatgtaagacagttccttcaggtctgagttgctgagctcaggctgagcatgctcgcacatattccacagcaggcttgctgctgtacatttgtacctgttatcatggatcatagttgtaagttctctaatgaacacataccctggttccattaacataaccaaacagttatctgtactctccattgccagaattgccagtgcttgaccagcatttttccgtagcaagtgattacagtttctacttgaggatggatcttggctgagaaattcacgcatcaaactactgatgatcactcggatgtgcccgatgtcctcactagtgtttctatccatggcaaggttcttcaggatttctgctgccaactgcttcaaatcatggctgctcccattgtcatccatgatctctgcaagattgctcaatatgaagtttccaggatcaaagttagcaagcctctgaagaattagcagtccttgtatggggaggaaatcttggtccgtggatggctcctcctctggaactgaccagcgttttgtgatctgcttccaccatctgagcaaacgtgagttccgttgatgcgtgttagatggctcatccaccggaataaaaaaatatattgccatctgtttcaagtacttaagcacaggggagttctgttcagccatgccaacttgctgaattgtgtccagaagtgaggctacaagctgtgttgccccagggatttgaacaactcggaggctaccagcaagctcggcagtgacctttgcggcgaagaatctgatttcttcatccccgtcacttgtccagcccagcatatcgaacaacaaagctaccgtcttcttggcatttgtacctggcagcttcgaggaagaccatggtggtggcgaaccagaaatcatcctcaggacggagcacggttgggtagcctcctagcaggacaacggttgcccaggtgaaggccagcgtccccagggcgttgcccatcctctcgatcactgcaaggatgtgaacgaagcagttcagctgcttttccggcgcagctagctgcttctgccgccggccgccgccgccttgagccggcatttggacgcggtgctctccgccggtgatgtccgccgccaccgccattgattgatttgatcgaattctggataccttggcacacacacatgacccaactcaagcgggagaatcaactaatgtacttatatcaccaggccgcatgtacttgtcagaaattaatacttcctgttatctggacaagcatccgattatactccctctgtcccattttaagtgtaaccataagtttccacacttaactttgatcgtccgtcttatttaattttttataattagttttttttctgatatgataaaatatgaattgtattttactcgtgacttatgtttttaatttttttaaaaaaaatttcaaataaaacggacgattaaagttgagcgcgaaaaaccatagctgcacttaaaatgggacggagggagcactttttaagacttcagctttcttatgtctgtcagtaattaagctcgaaagtatggtttc

SEQ ID NO: 22321 - DNA, 976 bp, Oryza sativa
  ref <308>: DATABASE ACCESSION NUMBER: AK072511
  ref <309>: DATABASE ENTRY DATE: 2001-12-06
gacctcctccccctccacgccatccccgacaccgatcgagagagagagatcgcaccgatcgacgtacggtacgagacgaccatggcgcgtcctcgcttcgccaccacggcgccattgttggcgctcgccgtcctcgccgccgtggtgtccgtcgccgtcgccaccgctcccgccggcaaggaccccggcggcttcgtcgtcaccgggcgcgtctactgcgacccctgccgcgccggcttcgagaccaacgtctccaaaagcatcccaggggcgacggtgtcggtggagtgcaggcactacggggcggggagggagagcctgaaggcggaggcgacgacggacgagaaggggtggtacaaggtggagatcgaccaggaccaccaggaggagatctgcgaggtggtgctggacaagagcagcgacccggcgtgctccgagacggagaagacccgcgaccggtcccgcgtcccgctcaccagcaacaacggcctcaagcagaacggcatccgctacgccaaccccatcgccttcttccgcaaggagcccctcgccgactgcggctccatcctccagaagtacgacctcaaggacgcccccgagaccccatgatcatcatcatatatatgtttctccttagcagtgcatcaaacgttccttcaaatttgagcctctccgaagctcaagatggagccgccgccgcccgtgtagaagtaaattaatctacgattgcagcatgcaataacggagtttacattgccgatcgatctgttttgtacgtacctaagtaatttggagacgctgatgtgattctttgttcattcatcaagagtctttgtgtgtgattgtaccctcctcctcttgttgctctgtaattacctactccactattactaagtacttgttgatctgcggggggcgcctatatacattgctgtaactgtgtgacacacattaattactccatccatttcatact

SEQ ID NO: 22322 - DNA, 2705 bp, Oryza sativa
  ref <308>: DATABASE ACCESSION NUMBER: AK072512
  ref <309>: DATABASE ENTRY DATE: 2001-12-06
ggcacggactgaacgaggcggcggaaataaaacaactcgaggctggaggctggctggcttccttgccgctgcccggctgaaaaagcccccgaagcagaggcttccggttgaagcaaagcaagagcgcgagggcgccgtcgggcatggggatcgtggagacgtggatgcgggagaagcccatccgcaccttcctcgcccagctctccacccgccgggcggcggcgggggccgcggccctgctcgcttcctcctccgccgccgcggcgtccgccgacggcgagcccggcgaccggagcatcccgcagctctcctccatcgccaactccgtcgtctcccgctgctccagggttcttgctcttgcaaccgaaaccttgcagcaaaactttgaagttgactatcccgatagttgtaaggagtctaatacatatgcaaaggaatttttagagtactgctgccacaaagctctccatgaagtaactacacgtccagatcatttggctgataagaatcttcgccgtttaatgtttgatatgatgcttgcgtgggaacacccaggtgctgttgttgaggatgaattatcagaaaatcattctgctttgcgtacaactgtggatattgaagatgatgacgagggatcaattttttatgcaaattccacaagattggcggttcaagtcaatgacaagaagacagttggcttaggtgcttttgcacgaatagcaccttcatgccctataatagctgacttggttactgtccacaatctgttcgatgcactcacatgttcatctggtggccgcttgcactttttcgtgtttgacaagtatatcaaaagtttagacaaggtattcagatctgtcaaaggtatattgcagtcaccgcttgcttcaagttttcatcttgatgctggggaatgtatcttagctatggatggagacaggcctattcatcctgtttttcaacacattggaatatcagcatggccaggaagattgattcttacaactcatgctctttactttcagagtatcaaagtgggttatggtgacaagattgttaaatatgatttagcaacagattctgatcaggttatcaagcgtgattttactgggccattgggtgttcgcctgtttgataaggctgtgatgtacaaatcaagcactttaacagagccaatttattttgacttccctgaattaggaggtccctcacgaagagactattggttagcaatcgctcgtgaagtattgcaggtgaataaattcatcaggaagttcaatcttgaaaacgttcagagagcggaagcactctcaaaagctatcctgggcatcttgagatactctgctgtgaaagaagcttttcatatttctccttctcactttaagacaacactcacttttagcttagcagaaaaacttccaaaaggagacatggtcttaaaagccttgtatgctaactactttcaactgttggacacttcgttgagtcatttggtgactgagtcacccgttgacaataggctgcagaaccattcattaccattttcattatatgctctctctagaatgggatttatattactgaagagaaaagatgaagctcaaagtgagataagcttttgtgctgtttgctttggtgtaacaaaatctctagaggctgctttggaagagtcaatttgttactctgagagaatagatgcagcacgtgcaactatagatcaagtaaaggtggaaggtgtggatgcaaatcttgccctcatgcaggagttacttttcccattcactcaagtagtcaaactcacttactcattgaccaagtgggaagatcctctgaaatcatttctgttcttagcttttaccctgtatgttattcaaaggggatttattgcttacatgttgccctcattttttttggcatttgctgttgttatgctctggcataagtacaatggaagggagcaattattgggagtgcttgaagtaagaactcctccaagtaaaaatcctgttgagcaaatcttgaccttgcaggatgctatatccaagttggaagaaactctacagtctgtaaatattgttcttctaaagttcagagctgtcttgtttgcagctgttccaaagacaactgaaatggtcgcagtggcatttcttgctgcatctgcatttcttatctttgtaccttggagacatctgctcctgattgcagtcctggaggtgtacacaagagagatgccgctaaggaaacagaacactgaaaagttccgccggcggattagagagtggtgggcccgcattccagccgctcctgtgcagatgatcaaacccaacgaaagcaagaaaaagagatgacaatgtgctccgtgctgttgcaaagagctcacaattttccctgtttcccattcctatttttcacctgaccagctaacctgtacatatctcaaaccctcttgcctcattgttacagagatattcttactgatcaaagctagccaaactagtaatcaattcaatgcatagtgccattgctatgagtgtacactgtacaaatatatgatcgaaaacaaattaatgctgtattttctttcgttgattgtgtaactttttgctgtgcatgcaagttcctgagttctgtgaacaaatctgggtgataaacatggacataatcagtttaaaaaggaaaaaaaatgaagttaatcttattgtatt

SEQ ID NO: 22323 - DNA, 1048 bp, Oryza sativa
  ref <308>: DATABASE ACCESSION NUMBER: AK072513
  ref <309>: DATABASE ENTRY DATE: 2001-12-06
ggcctttcattttcgggcagagagggacatgttggcacaatatacaccccactgttttcatttcccggcatgatcgagtcacactcgccgtcatcttcgtctcctcattgtgcacctcaccgtcatcattgattagggcatgagcaacggggaacacaacgtcatgccaaaaaggtgcgccatataggatgaattttgtattgttgtgtgccaaaaaggtgcgccatacaaaatgaatttggtgcttgaaatttgtattgtctgccgtctcatcgttatcagggcatgagcaatggggaacacaccgtcatgccaaacatgtgcgccatataggatgagatattctaaagattttgttcctacaaattgcaaaccactcaatattgtttttcttattttagcccatacttattatcataacaacaaaaaaacttacacgtgtacacttaactattacccaggccaacctgtcagcctctcccttcccctcttttttttcctctccatccccccactctctctttctctctctctctctacagcgaggcgtcgagctctccagtgctgaacgacgatccccttcaactatcgtcggccttgtcattccaccacagtgtagattgtctcggagcggcgtagattaggtgagctcagaggcaggacgtgtggatgggacttgaagctcggcaggagtacggattgggcgcagatagggctagcagcggcgtggatcggtcacggatccagccgatgatggtgacaagcacgacaggaagcacctcgaggcgatgacaaccacaatggccgacgagttcctggttcatcctttctagcagtcaagtgtcattcctctatggaggttcgagggtcatcgttgggtgaagggggggggggcacatgtgaagacatggaggagaatctcctaactagcagttgggactgaattccacctagttggatagatgtgtagttatattttgtgttgtaacaatgtactccatccgctcaaaaatatataccgtattttgtttcattagacaaagttttg

SEQ ID NO: 22324 - DNA, 1233 bp, Oryza sativa
  ref <308>: DATABASE ACCESSION NUMBER: AK072514
  ref <309>: DATABASE ENTRY DATE: 2001-12-06
gattgaaccgagcaaacgcacaaaccaaaggcggaagctaagcaagcaagcagcagcagccgcagccatggaggcggagaaggagatgtcgatgagggagtggtgcgtcgcgctccccaaggtggagctccacgcccacctcaatggctccgtccgcgactccaccctcctagaacttgcaaagcaactaggtgataaaggagacattgtattcgaagatgttaaggatgtaatcatgaagaatggaagatctctccctgagtgtttccgactttttgaactgtatcatatacttacaactgatcatgatacagtgactaggatcaccaaggaggttgtggaagattttgccatggagaatgtagtatatctggaaataagaacaacacctaagaataatgaagccaaagggatgaccaagaggtcttacatgaatgctgttattaaaggtcttaaaactgttgaagctgttgaagtcgtgttattcgattctaactcaagagcagataaaactcctatgagtgagctgggtggcgacacaaggaaaaagaagatatatgttaggcttcttctgagcattgaccgccgtgaaactactttggctgcattggatactgttaatttagcaatggagatgaaggatcaaggtgtcattggcattgatctttctggcaatccagttgtgggggagtgggagacatacttgcctgccctggaacatgctaaagagcttggaatccccattacaattcactgtggcgaggtagcaaacaggaatgagatccgagcagtgctggacttctgcccacagaggctgggtcatgtctgctgcctcaacgacgaggaatggaagaagttgaagtcgttaatgattccagtcgagatatgcttgacttccaatgttatgaccggtggtgcgccttcactggagcttcatcacttcgccgatctgtacaacgcgaagcaccctctgtccctgtgcaccgatgattccggcctcttttcaacgagcctctcaaatgagtactacctcgttgcatctaccttcggtctcagcaaggctgagctgtttcaactagctcaggacgcggtggagttcgtgttcgccggcgacgagttgaagaggtctctgagagagttgttcgagcgcgtcgggaaggagctgacgacgtagggtaatccaagatgcgttcctgtcgatcggcgtcggaacaaataaatgtatttattatc

SEQ ID NO: 22325 - DNA, 1098 bp, Oryza sativa
  ref <308>: DATABASE ACCESSION NUMBER: AK072515
  ref <309>: DATABASE ENTRY DATE: 2001-12-06
gaattagcaggtcaataccagagtctctctagctacttctcctgcttgctatagccctgtgttgcgctaggctgtgtcatgtaatggatcacgctggcaacacggtcgcgaacgtgacggtggcgcagcagccgcattacgggcggtccgtgtcgccgccgtcgagggtgtcgtcgtgctcgccgccaccacctcctgtcggcaccgcctccttgctggtgggcaacacgtcgtcgtcgtcgtcaccgacgacgaccgtcgtgctgagcccgtgcgccgcgtgcaaggtgctccgccgccggtgcgccgacggctgcgtgctggctccttacttccctcctaccgaaccgaccaagttcactaccgcgcaccgcgtgttcggcgccagcaacatcatcaagctcctccaggaattgccggagagcgcgcgggcggacgcggtgagcagcatggtgtacgaggcggaggcgaggctgcgggacccggtgtacgggtgcgcgggggcggtgtgccggctgcagaaggaggcgaacgagctcaaggtgcagctcgcgcgcgcgcaggccgacctgctcaacgcgcgggcgcagcacgacaacctcgtcgccctcgtctgcgtcgagctcgcgcaccgccgccgggacgacgaccagcagctggaataccaggcgccggcgccgccgctgccgcacccggcggagtactgtagcggcggcgcaggcttcggcgccaccgtgtaccagccgttctacgactcggacctggactcggcggcgtggggcgagccccagctatggacgtgatacaaatttgcatggtcagcgcggctagctaagctaagctaagctaccatactccgtatttggcatgcagggtaattaataatctagagcactagtagtaattaagtactgtaattagaaacagatcagtttaaagaaggaactataattagtacctggcggcttagctagtgtcgtgcttcgagtacatgtaacagcaacggttatacatacttcagccggccggaacagtttatgcttgctttcagagtgttatgttcttcagatttaaaacaagatcagatattttgcaatg

SEQ ID NO: 22326 - DNA, 1158 bp, Oryza sativa
  ref <308>: DATABASE ACCESSION NUMBER: AK072516
  ref <309>: DATABASE ENTRY DATE: 2001-12-06
gctctctctctctcccccaccatccaacacgccgccccctgctgctccaagcttatcctctccttctctctcctctctcctctctcctctcctctctctctctctctcgctgagattgatcgatctcgctcgctgtggcggctgctgctgggctctgatccgtttgatttggtggtgcgctcgccggaggaggaggaggaggatcttgatttgtgtgtttttttttggggcgcatgtccacggcggtggcgcgcggcgggatgatgccggcggggcacgggttcgggaaggggaaggcggcggcggtggaggaggaggaggatgaggtgaacgggttcttcgtggaggaggaggaggaggaggaggaggaggaggaggcggcggtgtcggatgcgtcgtcgatcggggcggcgtcgtcggacagctcgtcgatcggggagaactcgtcgtcggagaaggagggggaggaggagggggaggaggtggagagcaaggcgaaggaggtggcggtggaggtggagggaggggggctcgggttccatggattggggactctcgaatccctggaggacgcccttcccatcaagaggggactctccaacttctacgccggcaagtccaagtcgttcacgagcctggccgaggcggcggcggaggcggcggcgaaggagatcgccaagccggagaacccgttcaacaagcgccgccgcgtcctcgccgcgtggtcgcggcggcgcgcgtcctgcagctcgctggcaaccacctacctgccccctctcctcgcccccgaccacgccgtcgtcgaggaggaggacgaggaggacgactccgacgccgagcagtgcagcggcagcggcggcggcaaccgccggcgcgagccgacgttcccggccgaggctgagcctgcacgcgcagaagagcagcttgacgccgaggagctcgaatccggcgtcgtcgtttagatctcctaggtcattctcactatccgatctccaaaatgcaggctcctataactagctcaagaaaaaaaaatctaggtttctgcttcttctcttgtctgaaaattttaggggtgtgagagaaatcatcagtgttgttgttactgctgctgctgctgctatatgatcaagatatatataacaaaaaaaaagaactcct

SEQ ID NO: 22327 - DNA, 4013 bp, Oryza sativa
  ref <308>: DATABASE ACCESSION NUMBER: AK072517
  ref <309>: DATABASE ENTRY DATE: 2001-12-06
gatttagaaacagaaaaccggattgctttgcgtctctctctctctctctctctccgcctttcccccttccttcgccgtctctccctctttccctctctcgattcccaaccgcaacgccgagcggcgtcgccatggacgacgaagccggggagtgagctcgccggcggcggagcatgatgggtttgggccgtgcgtggtctggccaacctacacgcgtgatccatggtcgctctgcccggatctgtaccggtggcgaggagagtttgcttcaaagtcctgtgtaatattttttcttccctactatgtccccttcggcgctgctgcctccacagatcaggccgagtctgatggcttccttcgtcggctggatgatgataggtgatacggtggatctgattcttcttgcaccggagatggctccagatctcgttcatcggctggcatctggtggtttcgttcatcggctggaggaggaaaggtgagatctttatggcttagtcggctggagatggaaagatcccatcttgttggcttcccttcgtgcctgtcctgttatttccccctctcccttctggtttttcatcaataagactgcacacattgtcaggcatgagcggccaaatatatgatcagtataaagacttctttgtcaggcatgataagcatataagccttcacacattgtcaggcatgaacaggcaaatattagattagtaaatagggcttcacacattgtctggcacgaacagatcagtatatgaatgcaagattagtaccattgttacataacttggagaaatgaatttcttctgttctacatctcctactcctgaatttccagctgcaagtttttacatgttataagtctgcaagtgccataattccaaactttctaaaatccaaatgttccagtctgctttagttacttttatcatgttctatatctgcttcagtaatttcatttgtaactatgcatgtacaagtgcaaccatgtgcagatgcactattcatactgggctaaatgtgttcagacaacagcatctgctagattggaaaagactgttgagagctgcttaggcatgtttttttttcactttatggttttgatgaggttcgacccagaaaaaaaatgtggtagctgatttgtcaaatatttatttttgtttagtttatctcagatgtttcagttgtctcagatttgtgaaatatatattttttgttttagttttcactttgtctcagattcttgaaaagtcattcaaatcagatttttgaacaataaatacaagccttggatcctactacctccgtttcacaatgcaagactttctagcattgcccgcatacatatagatgttaatgaatctaaacacatacatatgtctagattcattaacatctaaatgaatgtgagcaatgctagaaagtcttacattgtgaaacggaggaagtatttttgaaccctgaagcacaaggttttggatatttctgccttagttttgcatgaagtattagctagctgtaacaagctaaaacaaataccatagctggtgtcctggtggtagcaagctggtatatttgaaagaactaatgaagcccttttttacccgagtttttttaacttgatttccactttatattatatttacatactacgccgttgacttttttataacgtttgaccattcctcttattgagaaaaaaatataaatattatttattttattgtgacttgttttatcatcaaataatatataatcttaacttatacttttacatattatatactaagtttttgaataagacgaatggtcaaacgttgtacacaaagtcaacggcgtcgtacattttgaaaagagggtagtacttctgtaaattcgtagcaaaacaactgcaatttctgtactgtatcaattttcgacttcttttgaccaaacaaaatttaaagggcaaccaaagcagcactaaggttgtgttcttttggaggggttgggaacccctcccctacgcatggaaaacggagcaatagattatcatatgattgattaggtattagctataaaaaacatgaaaaatgaattaatatgatttttaaggtaactttcctacataaactttttaccaaacgcgtactgtttagcagtttgaaaagcgtgcacgcggaaaacgatggagagtagttggaaacatatgggaaaggacacagccttataattaccttgtccacttcaccacggctttcaggtgttgggttgtcatttacctccatgtgatcgctccagctcacaagtgtcgacatctgcattcaataagtttttaaagtcttgatcaggtccctctaatttcagtttttcataaccgagaactttaatttgatgaaactgctatatatggtggacaaaatgctatatatatggtgaaaaatcttactatactttgttttgttcatatgtaatgctatttttgtatgtaaacaagttcaaaagatgtgtcagaagtctcatgtccagaagtctgtttttacaggaatttcaacataattttacatattacatatgttaaaattgcacttcattttcttctgcaatttttatttaaatgctgagctaaatcagtgggtgttttttcaatcgaggttagcatgcatatatatatagatcaaaccatacgctattatctgttctatttcaaattcagaaacacaagaattataggtgtagaatgcaccaatcctattattaagtccttacaaatgcatgcagcaaattgaaccatgtattcttgatattgagctgtgattttaatcaagaagtatggaaacatcaagattaccagaaaaaaattgtttctttcttccagagctaactagagaaacatcaagattcatggcaaagattgatcccggttaggtgcaaatatcatttgtttgtttgtttgaagttcagtgtaattaccgcatttactttatcgctgtttgcatatgttggagcgtcatctgcccctatccggctcaggttcacaagggaagacatctgcaataaaaaaggtaagttgtgtgttgtgattttataaaaccatactgacttgttcagtatcgtattgtttaagttgcatgttgtattatttctatgctgaattttcctactttgtgtagcatatgtgtgttctcttctgacatgtgacctcaatgtaagaaaaaatgacaccaccatgaacatctaagtgctctttctggcctgtgaccataatcttaaaaaaaaaaaccaaaaagacctttctggcctgtgaccttaatctatagaaaacatgactccttttatatgtacttatctgattttttttatgatgtttgatgtccgtgtggttgctggggatgtctgagttgtgtttcagagataggcactgagggttattttactagttttggaaggacaaaaggctttagtttattgctagagctctagctatcccctaattagcatgtttttcatccttgtctatggttagttttcagaactcgaactcaatgcctgagaattgaactttcagaacatttgtcatagatgatttggagttcattttttaactaggtagaaaagtgctacctgtattatgacaggatcattagcatataggtccattagccttacatccacttagcggcgagcccggcgagtcacggcggcggcgcgcctcccagctcgtggcggcgggcgaacgaaggcagcgaagcgcgcgggatggatggattggggcgccgtctcccgccgtggtggatggattggggattttcttgatctgcaagcgggcccaatcaagacagtcgttggatggggattggatggctgagatccaccgaatgtcacattgtgacatgcttacacaatgtcaccgaatctgagtccgtcatactagggtcagattctgccgaaattcagatgtaacacaactgtactggtttcggccaaacacaacgcagccatagacgaatctcacccccaacttaccaccg

SEQ ID NO: 22328 - DNA, 1412 bp, Oryza sativa
  ref <308>: DATABASE ACCESSION NUMBER: AK072518
  ref <309>: DATABASE ENTRY DATE: 2001-12-06
gacgcttgcggccacgcgcgatgcgacgcgacccgactttttcccccctgcgcgtacgcgtgatggcgcgtgaggacggagaagatgagacgggaggaggaggaggaagagaaggggcccatccattccatcgcccgacgcggcccgctgcggagaagaggagatcggattgtactctacatgataagaaagtatggcaccagcaaacaaagcagagagaaaagcagtgctggatgctggagcatggatgttcaacgttgtgacatcagttggtatcatcatggtcaacaaggcattaatggccacacatggttttagttttgctacaacattgactggattgcattttgcaaccacaaccttgatgacattagtaatgaaatggttgggacatattcagccatcctatttaccattgccagaactcgttaaattcgtcttttttgcaaacttatcaattgttgggatgaatgttagtttgatgtggaactctgttggattctatcagattgccaagttgtgtattattccagtcttgtgcattctggaaatcctgtttgacaaagtccgttactcaaggaatacaaaactcagtatagtgcttgttttagtaggagttgctgtatgtactgtgactgatgttagtgtgaattcaaaagggctgctagcagctgtaattgcagtttggagcacagcactacagcagcattacgttcatcaccttcaaaagaagtactcgcttggctcattcaacctattgggtcatactgctccagctcaggcagcatccctgttaatactggggccttttgtggacttctggctgaccaatagaagagttgatactttcaattacacaacaatagttacgttcttcattgtattgtcgtgcacaattgctgttgggaccaatctaagccagttcatatgcattggaagattcacagctgtctcatttcaagttctaggccatatgaagacgattcttgtattgaccttgggttttcttttctttggaaaagagggccttaattttcacgtagtccttggcatgatgcttgctgtgattggcatgatttggtacgggaatgcttcgtcaaaaccgggaggcaaagagaggcagatttactcggtgcccagcgagaaaactcagaagtcatcacaatcagagcttgaccagaaggtctgaaacaaagttgtttcactatttttacagctccattgcttagcgagcattgagaagaccacgatctgatttattctttttttttctggtaagtttaaagatgtttctgtacaactgaaattcataccagacaaacagaatatggcaggaactaagcgcgacgataatttaatttgtaatattccattgagtaactgcatatatgatggaaagatattttcagccg

SEQ ID NO: 22329 - DNA, 1298 bp, Oryza sativa
  ref <308>: DATABASE ACCESSION NUMBER: AK072519
  ref <309>: DATABASE ENTRY DATE: 2001-12-06
gacaagctctccgctcagctaagctctccaccattgcttgcaaagctggtcgtgtcactcctcccgttaagcttcccgcggcggcgagagcaagctaagctaggtcgggcatggggaaggacgaggtgatggagagcggcggcgccgccggcgagttcgcggccaaggactacacggacccgccgccggcgccgctgatcgacgcggcggagctggggtcgtggtcgctgtaccgcgccgtcatcgccgagttcatcgccacgctgctgttcctgtacatcaccgtggccacggtgatcgggtacaagcaccagacggacgcgtcggcctccggcgccgacgcggcgtgcggcggcgtgggcgtgctcggcatcgcgtgggcgttcggcggcatgatcttcatcctggtctactgcaccgccggcatctccggcgggcacatcaacccggcggtgacgttcgggctcttcctggcgcgcaaggtgtccctggtccgcgccatcctctacatcgtggcgcagtgcctcggcgccatctgcggcgtcggcctcgtcaaggcgttccagagcgcctacttcaacaggtacggcggcggcgccaacaccctcgccgccggctactccaagggcaccggcctcgccgccgagatcatcggcaccttcgtgctcgtctacaccgtcttctccgccaccgaccccaagcgcaacgcccgcgactcacatgtcccggtcttggcgccgctgccaatcggcttcgccgtgttcatggtccacctggcgacgatcccgatcaccggcaccggcatcaacccggccaggagcatcggagcggccgtcatcttcaacaacgagaaggcgtggcacaaccattggatcttctgggtcggcccgttcgtcggcgccgccatcgcggcgttctaccaccagtacatcctccgggccggcgccatcaaagccctcggctccttcaggagcaacgcgtgatatcaaaggagttcgagcagccattgttgggggataatggctggaaggcgttgatgaagcaattggccatgatgatgagttctaccgtgttatgattctccctttttcaaaaaaattaagttcgccgctggtcgttttgtttcagcagctgctcctcctcctgcttgtcgtgtgtgtgaagtgaacatccatgtgtttgtaatctgtttttaaatcgagggatgtctcatgtgtttagcctgtactcccatttaatttagcgacgataagcatcgatgcccgcctctcctatctggaatatactccctccgtccc

SEQ ID NO: 22330 - DNA, 1267 bp, Oryza sativa
  ref <308>: DATABASE ACCESSION NUMBER: AK072520
  ref <309>: DATABASE ENTRY DATE: 2001-12-06
gaggtttccagaattgcatattaaagcctcccatcaacttcttgcacacaccctccctttggctttcatctgcatctattcagttgcagattgagagccaaagacattatcttgattctatcaggagggttgtgctagcgaattcttgttagcaacaaattgacatattgctcggcacatccccaccgagaatacaagatgacgttctctggtacacaggacaagtgcaatgcttgtgacaagaccgtgcatttcattgatctccttaccgcggacagtattccctaccacaagtcttgcttcagatgcagccactgcaaaggcacactttcgatgtgcagctattcgtccatggatggggttctttactgcaagacccattttgagcagctattcaaggaaacaggcaccttcaagaagaacttcccctcaggtacaaaggcaaacagtgaacaggctaagattcccagcaagctgtcctctgtgttctgtggaacccaggacaagtgtactgcctgcaagaagactgtgtatccattggagaagatgaccatggagggtgagtgttaccacaggacctgcttcaagtgcgcccatggcggctgccttctgacgaacgcctcctacgcctcgcacaacgggatcctctactgccagaaccacttctggcagctgttcaagaagtccggcagctacgacaacctgctgaagcccgcctccgccgccgccgagaacaccgtcgaatccgaggtcgccgtcgcggagcccgcgaaggaagacccggagacggaggaggcagccaaggaagaagaagaagaagcgtcaccggagcaggtcgcggaagctgttgtagaggaccaggagcactcatgagaagaacctgccacagtgccacttgcacgcgcacacaggaatatatatacatgttcccatattactgctaattttttttggtgtcgttgagaaacttgtcgctggttcttctcatcttctcgtctggattcctgcaatcctggagtctgtacctgtgctaagatatcatgaatgagagcagattttgcaaagaaagggagaaatatgctcattctgatattttgacatgtatcatccgtctcagaaaaatcaacttctcactgcgaacattgacataatctatgtccaggttcatagttagaagttgatttttaaggatgatttggcagcaccattttaagaagaaatattttatctggatcatgtgagaattgagatgataatattccgagtc

SEQ ID NO: 22331 - DNA, 1005 bp, Oryza sativa
  ref <308>: DATABASE ACCESSION NUMBER: AK072521
  ref <309>: DATABASE ENTRY DATE: 2001-12-06
ggctgtcagcctcagccaaactcttctcttctcttctgcctacttcccacgccacccccaccctcgccgccgattccgattccgattgcgctcgcccatggcggccgccgctctccgcgaccagctcaccgctctcctctcctccatgttctcccagggtttggtggacgagcagttccagcagctgcagatgctgcaggacgaggggggcaccccgggcttcgtctccgaggtcgtcaccctcttctgcgacgacgccgacaggatcatcaacgagatcgccaccctgctggagcaacccgtcgtcaacttcgataaggtcgacgcctacgttcatcagctcaaaggcagcagcgccagtgttggtgctcagaaagtgaagttcacttgcatgcagttccgtcagttctgtcaggacaaaagcagagatgggtgccttatggcattggctgttgtgagaaacgacttctatgatctgcgcaacaagtttcagactatgcttcagctggagcagcaaatccaggcttatgatcccaagcagcaataattgaagcaaaagagtgtagctgcatgtgatctcacatgataaatgtatctttgaagatgtagaccatgttcaatgggcttctggcttagagtgtgtgcgcgtgtgcagaatcaaatcatttggtttgaggcttcatgcttccaactttgagctcataaccctttaattgttagtgacaactgatcgtctagtgtcgatgtacctgttacctgtctgtgttcggttgtctgccacctttgcaaactcttactggttgtctggtgacttgtttagctggcttgtgactttaggaagggaaagtgtgtgaaattgcaccataatttctgacttaagagttgtgaagtcttgatgctgggtggtatacaagtctataaacaacgatcaccctgtttaatatcaacatgaacaagcatccgtattcagttttgagaatttcatgttgttgtgcatgtcgtcgg

SEQ ID NO: 22332 - DNA, 1895 bp, Oryza sativa
  ref <308>: DATABASE ACCESSION NUMBER: AK072522
  ref <309>: DATABASE ENTRY DATE: 2001-12-06
gggtggctcctttggcgcggaaagagggggagctcccgccattccccaccattaacctcttctcccggggaacaaaacaccgctgttcttccctttgccccgcctcgatcgatcgccatcgatcgatctcgtgcgggaagcgatcgatctcgtgcgggaatctttgggggagggatttaatctgttggtgtgcacgcgaggaattaatcgaaaatggtttgcaggtcgtgcgcgatgatccgctgagcggggggcggccaccagatcagcccgcgcatccaactccggcgagaggaggaggaggaagaagaagatgtcttgctgcggaggcgccgaggaggacagctacggcccgccggcgaaccaggccgctccgccgcccaacgtcaatgctccagggaatagaggcgggccgagagggccgggggcggcgcggccgggcgggccgccgaagccggtgaacatcgacgtgccggcgataccgttcgaggagctgaagaagatcaccagcaacttcagcgaccgcgccctcatcggcgagggctcctacggccgcgtctacaacggcacgctcagcgacggccgcgccgccgtcatcaagaagctcgaccccggcgcctcccaggagaccgactccgagttctccgcccagatagcgatggtgtccaagctcaagaacgagtacttcctggagctcttgggctactgcttggaagacggcaaccgcatgctggcctaccagtttgcaaccatgggttctttacacaacattcttcacggtaagaagggagtccagggcgcggagcccggcccggttctgaactgggcgcaacgggtcaagatagcttatggggcggcgagagggctggagtacctccatgagaaagtgcagccatcgatcgttcatcgagatgttcggtctagcaatgttcttatattcgacgagttcagctcgaagatcgccgatttcaacctgacgaaccagggcaccgacaccgctgcccggttgcattcgactagggtgctaggaacatttggataccatgctccagaatatgccatgacagggcaaataaatcagaagagcgatgtttacagctttggcgtgattctattggagctactaaccggaaggaaaccagttgatcacaccatgccaaaagggcaacaaagtcttgtcacttgggctactccaagattgagcgaagataaagttaagcagtgcgtcgatccaaagctcaacaatgattaccctccgaaggctgtcgcaaagctagcagcagttgcagcattgtgcgttcagtacgaagccgacttccgaccgaacatgacgatcgtcgtgaaggcaatccagcctcttctgaatacaaaaccagctgggcctgcagagccaccacctgcctgatcagattgtatgggagttctgctctaggcagacaggggaaaaaaaaccacacaaactttgcatggtttcctgtgttttcacatcaggcagtgtatgttttaagaagccatgcaacttggaggagcaccaattcggcatgattttttgtaaaacactgatccattggtaccacagggtatattacatatagagggggtattttgctaactggtgtaatgaattaagttattctttgtcgtgtcatggtgtaattttaaggtccttcaaaagcttgcatagaaccaaggattgcatgatgcattcccaagaacttccatggctgcctctttttcttatatttgtatagaactttggaattaatagtagtttttcttcttctttttttctgttggaactacaaagctggggctaaaatcctgttcctgaattcaggttttggccaggatggagattaaatggtgcacattgcatagatgtacacctaagatgc

SEQ ID NO: 22333 - DNA, 3178 bp, Oryza sativa
  ref <308>: DATABASE ACCESSION NUMBER: AK072523
  ref <309>: DATABASE ENTRY DATE: 2001-12-06
gtggcgtaattggacccgtcgatccccttgacggaaaacccaaccgacgccgccgcccgatccatcggcggccggcggcggccggtgggtgatgctcggcggcggacacgaggtcgaggactccttcgacccctgcttcaccgacgcccacaccgtgtcgccttcccgcacctccactccgcgcctcctagcttccgcctcgtcactccgccggcggtgtcgccctacgcgaccacatcgccggtgggcggtggcgtcaagctctgtcagggcggccggagactccgcgctcatccggataacctgcggatcgccggatcatctgcagcatatacaaggattattattatggaaaattacgggtctgagtggctgagattttcgtttctgatgaatctcactgatgttgaacaatgatcacagagcaagtcgcctgctgtcgtgtcgtcgtctcaggttaatcgtatcccagaatggagttaacatgggaccgatcaatccaccaattgttagaatcatataagaattcctttcaaaaaaaaaaacaaaagagagaaaagaatcatataagaattacttgtggaactggaagtataataaaaccgttggcgtcatgttgtcaagggtagtatactgtatactggagacggaggctacattattggccacttggtcatcaggtgagatgaacaaacagattagcctcctctctgaagaaaaactggtgttgagttgaattccatgggctggtagctggttgagttgaaggccttagcttgccatgatagtgcagacgccatggctcttactgctacaaaaatgaagcagccgacgatggccacgaggctggctgcaggctgcaccctctcgctgttggattgatcagcccgtatcagcaaaggatttttcatgttgctgaatcttgccagaggaaaggatatcaattctgtctgtggagacgaagtaaataagaacaaaagctttcttgcaagacctaaatttattcgtccaaggagctggtcatgaagatcactgcaattgggttgtttttgttggtgcttatagcgagctgtcctgtccaaatcttctgcagttcgtcgtatggaaacgagacagataagctctcactgcttgagttcaaaaaggcaatcagtcttgatccccagcaagccctgatttcttggaatgacaccaatcacttttgcagctgggaaggagtcttgtgcaggaagaagacaccccttcgtgtcatttctcttgaccttagcaaccgaggtttagatggacaaatctccccttcacttgcaaacctaacattcctaaaatttctttacctagacacaaattcattcacaggagagatccctctatccctcggtcacctgcatcacctccaaaccctctacttgagcaacaacacattagaaggaaggatacctgattttacaaactgttccagtctcgagattctattgctcaatggcaatcacctagctggacagttgaataatagctttccttctcagcttcaaaatctgatacttgcagaaaataatcttactggaaccatcccttcttctcttgccaatatcacaggactaagaggacttagtttcatgtcaaacaatatcaagggaaacatcccaaatgagttttcaaagttcgtcatgatggagcttcttgctgtgagtggaaacatgttgtcaggaaggtttccacaacccatcttaaatctctctactctcactaatctttaccttactttgaatcatctaagtggagaggtaccatcagatctccttgactctctacctaatctacaagaacttctactgggtcacaatttttttcgaggacatatccctctctcattgggaaatacttccaacctacgtttactggacatatcaaataacaatttcaccggcattgtaccaagttccattggcaaactaaccaaaatgtctttgttaaatactgaattcaatctactccaagcacacaaaaaggaagattgggagtttatgaacagtttagccaactgctctagactacaagttctttcgatgggacataaccgtctagaaggccatctaccaagttcgttagggaacttatccactcatctgtgacaacttattttctcaggaaatcagctcaggattttttccttccggcatagaacacctctccgacttgaattctttaggactagataataatgaattaacaggttcccttcctgaatggcttgagaatcttaaaaagttacaaaagttaaccttgcaaaacaaaaatttcccttcctgaattgcagttattccgtcatctgtttcgaatctgtctcaactagcagttctcggactatattctaacaagttggaacggcacataccaagcttcgtaaacctgcaaatgcttcaactactagtcatttccagtaataatcttcatgtcagcataccaaaagagatatttagtattccatcaataattgcaattgatttatctttcaacaacctagatgggcaacttcctactgagattggagatgctaaacaactcgtatctttgggactttcatccaacaagttgtttggagatattcctaacagtttgatacatgatgcaacggacctcgggtgcggtagaccccgcggtctcaggcggtccactgtccagcagcggcgataagccaccagccacacatgaagaatcggcagtggtgtggagctttgtttttcaaagtcaacgggaagtcctcgcgcccaaggaccattaccagatatgccgagcgcgcaatgtggctgtccaaacccaaacaagcctatccggttggttatcaaccaacaatgtggcggagacaattggccagaaccactcatgatggccgctcatttactcaatggtgtacaaaactacttgaccgaaagacgcgcacaaagctagctagtttcctctgagatatgaatctttgattccgtgtagcttggcagcaacctcctgcatgctgatgcgttcaatcggtgttgtcttggtgcagcagagtccaatatttagcacactgcgcaggcagtgtatgcctttctccttgactgccattggtgtttcttggcaaaggtccagctcgtgttgcagctggggatcaacaatctctagtatcctgtcagggaagttc

SEQ ID NO: 22334 - DNA, 1598 bp, Oryza sativa
  ref <308>: DATABASE ACCESSION NUMBER: AK072524
  ref <309>: DATABASE ENTRY DATE: 2001-12-06
cttccctttctcctcctctctcctcttcccctctccaagtctcccggtctccttcctcctctcttcccggccgcctcgcctcgcctccgccttcccgatcgcaattcgcctcctcctcctcccacccatggcgcggcgatccgcccccctcctccgccgcatcctctcctccccggcccccgccccggcgcaccatggcggcgccggcgcgcgccgcacggtgacctacatgcccaggccaggggacgggaacccgcgcgccgtgacgctgatcccgggggacgggatcgggccgctcgtgacgggggccgtgcagcaggtgatggaggtgatgcacgcgccggtctacttcgagacctacgaggtccgcggcgacatgcccaccgtgccgcccgccgtcatcgagtccatccgccgcaacaaggtgtgcctcaagggcggcctcgccacccccgtcggcggcggggtctcctccctcaacatgcagctccgcaaggagctcgacctctacgcctcgctcgtcaactgctccaacttccccggcctccccaccaggcaccaggacgtcgacatcgtcgtcatcagggagaacaccgagggggagtactcggggctcgagcacgaggtcgtgcccggcgtcgtcgagagcctcaaggtgataacaaagttttgctctgagaggattgccaaatatgcttttgagtatgcttaccttaacaaccgaaagaaagtcacagcagtgcataaagcaaacatcatgaagcttgctgatggtttgttcttggaatcttgccgtgaggttgcctcaaagtatcctggtattcagtataatgagatcattgtcgacaactgctgtatgcaacttgttgcaaagcctgagcaatttgatgtcatggttacaccaaacctttatggcaatttggttgctaacacggctgcaggtattgctggagggacaggtgttatgcctggaggtaatgtgggtcaggaccatgctgtctttgagcaaggtgcttctgcaggaaacgtcggaaacgagaacatcttagagcagaagaaagcaaaccctattgcgctgcttctatcatccgccatgatgttgaggcatttgcagttcccgtcattcgccgaccggctggagacggcggtgaagcgtgtcattgcggaaggcaagtacagaacaaaggatctaggcggcaccagcaccacccaggaagtcactgatgcagtaatcgccaatctggattagataccagccggtgcacgcctgagagattaattcttttgggggactagctcatttgtcccgactcccgattatttttgtttcgtatagagtttagatcgtcaatttgtacgacgcttcccaggaaggaatcgtgaggcaatatctgtttcttagttctgttccacaaataattcaggaacccacgaggagtattcttcacacgatgctgtgtaacaaggtaaagagaacaccttttgttgcaaagggaaatgctggcagccttaattcctttaactgaaatgattatgagagttgattatcggtcctcagccgcggctgtgtctccatggacctcaagaccgttgtttcc

SEQ ID NO: 22335 - DNA, 1661 bp, Oryza sativa
  ref <308>: DATABASE ACCESSION NUMBER: AK072525
  ref <309>: DATABASE ENTRY DATE: 2001-12-06
ggcccgcaacctccgactccacgagctctcttcccccacgcttccgattctgcccatggcgacgccgccgcacgacgcctcgccggccccaccaaaccctaaccccgtctccgacgaccccccgccgccgccgccggtgacggagacgaagccggagccggagccgcctctccccaccacctcgatcgaccccaccccgtctggcgacgaggagagcggcgatgactcctcgtcttctgtctcatccgcctcgtctacttcgcccacggccgccgcggctgctgctgctgcgggaggtggaggtggaggtggaggcgagagggcggctccccacccggcggcgaaggatctcctccatatctccttcaaccaggactacggctgcttcgcggcggggaccaagtcgggcttccgcatctacaactgcgatccattccgcgagatcttccgccgggacctcggggccgcgggggacaacggcgtcggcggtggaggaggaggaatcggcgtcgtggagatgctgttccggtgtaacatactggccctcgtcggcggcggagacgcccctcactacccgcctaacaaggtgatgatctgggacgaccaccagagccggtgtatcggggagctctccttccgctcccccgtgcgcggtgtccgcctccgccgcgatcgcatcatcgtggtgctagagaacaaaatcttcgtctacaatttcgcggacctgaagcttgttcaccagatcgagacggcgcctaacccgaagggcctctgcgcggtttcgcagcagcccggatcgattgtgctggtttgccctggtgcacagaaagggcaggttagagtggagcactatggtgccaggaagaccaaattcatcaatgcgcatacttccggtgtcgcgtgctttgcattatcacaggatgggaggctcattgctactgccagcaccaaggggacacttgttagaatctacaatgctgccgagggcaatctcctgcaggaagtacggagaggtgctgatagagcggaaatatatagcttggcgttctccaacaatttgcaatatttggctgtatcaagtgataaaggaacaatacatgtgttcaatctaaagataaatgttggattaaccacgaatgataagcccctgcctgctccagatcctgatgttccacatatcagtccatctctttctttcattaagggtgtactaccaaaatatttccactcggagtggtctgtagctcagttcagactccacgagggggagcaatatattgttgcatttggccatgagaagaataccgtggcagttgttggcatggatggaagcttctaccgatgccagttcgaccctgtaaacggaggagagatgctgcagctggagtgctacaatttcctaaaaccatcatcggatcaaccacagtagcagcccaagcagcggatctgtttttcctcccttgtatcggggttgtacagtatctgtgtgccctctcgattattgttattatttgtaaatatatcttagtggtgattctacaagtatgctctgttgagggttaaaagaacccttgtgcagatggacataataatattactcccacgttagcaaatgctttcacgattcatgtttctctattatcctgaaaagttcatccagc

SEQ ID NO: 22336 - DNA, 1587 bp, Oryza sativa
  ref <308>: DATABASE ACCESSION NUMBER: AK072526
  ref <309>: DATABASE ENTRY DATE: 2001-12-06
gattggcgaccagccccggctgcccttcaccctgcgccgccccagtccaccgccgcgttcgccggagcgacgatctcgcgccgccgcctcctcctcctcccctagattcctgacccggccacgccggcggcgctccccctccgccggaggctggcatggcgtccggccgcggcgggatccccgggccctctcgcgccctcctcgtcctcctcctcccggcgttgctgatgctcctggccttctccacctcctcctccgcggcggcgtcgtcgccgggcgcgatgcacaacaacaactgggccgtgctcgtctgcacctcacgcttctggtttaattatcgacatatggcaaatactctgtctctgtacaggacagttaagagattaggaatacccgacgagcggatcatacttatgttggcggatgatatggcttgtaaccctaggaataactatcctgcccaagtgttcaataatgagaaccaccagcttaatctatatggtgacaacgttgaggtagattaccgaggttatgaggtgacagttgaaaactttttgagagttttgactggaagacatgaaagtgctgtaccaagatcaaagcgtcttttaagtgatgaaggaagccatattctcttgtatatgacaggacatggtggggatgagtttttgaagttccaagattctgaagaacttcagagccatgatttagcagatgcagtaaagcaaatgaaggagaagcatagatttaaagagttgttgataatggtagatacatgccaagctgccactctcttttcacagcttcaatcacctggtgttttaacgattggtagcagcatgaagggtgaaaactcttattctcatcatcttgattcagacattggtgtttctgttgtggataggtttaccttttatacacttgctttctttgagaaactcaacatgtatagcaatgcctcattgaacagtcttttcaactcctataatccttctatgctgttgtcgactgcgtattatcggatggatctttatgaacggccattaaatgaggtccctgtgacaaatttctttggatcagtcatgaatactatccacacagattctgcctactcaggcttcttagctgcagatgatattggaaccatcccatccactggagataatctactgaaccatgctgtgttacagaataaggctagccaaagaagatcaaacattgaagaagtgaaagaagcacaagtaaggtcccatgggtggacagatgttctgctggaacagcttgatgtcaagaatgctgacactattgtcatgtatggtctgggaacaatgggtatactgttagcaatttcaacctggttatcaatgtagaaacaaagaagtatgaagtgtgctgttcacacatcatcctcttctagataaatgaatcatcctaacccctggatagagatcaaaaaggaagaaactttggaggttaactctttgtatattttttctctttggtaatgtccattcagctgggacataattttgtatttagtttttgtatgccacgttcaactttttgtcaggatactcattatttgcc

SEQ ID NO: 22337 - DNA, 2803 bp, Oryza sativa
  ref <308>: DATABASE ACCESSION NUMBER: AK072527
  ref <309>: DATABASE ENTRY DATE: 2001-12-06
gtcagatccccctcctccctctccacccccgccgatccgttctcccgcccccgatcgctcggctgtatcctgttccgtgtggccgatcctagcgcgcgaaccctaggtggtgttctttttttcttctttttttattcaagaatcgtctggatctggtttcttggtgagcaaacgtttaggttcgcgtgggtgatccgttttgtgatgcgatgttgagggattctaggcggggaggatttaggttttacgttagggaggggggatgcggcaggttacgcctcgaatttgatttgcgtggagggatttggttcttgggatgttgggagttgttagtatgattaatcggtcacgcgcgaagctttttgtgtgagattagttcgtgttcttgcgagtggtgatgataacgagatggtctgtattgttcgcctccgcgattcggattggggaattggtggcggaaaatggggattttttcgctgtgataattgggtgtggaaatgttagtagtgatagtggtggtgctcgttgactttggttgatgtgtcccttatgttgaccttcccgaatccgcatcacgaacggaacagctctgatgcatgatggcttgctagatagcctttagacaatggaatggctatctccacctttcggtgccgcgcgtcataggatataggctcatgccctctgtgcattgttcataggggggcttcttattctttggttctgtagtgttgcatacctgggttttattatgtgcatcatatagtgttacatatgtaaggctgccatgattcgtatcttgtgccaacttggccttttttgtcttagcgagttattagcttctagtatttgagaaagcatccatgacgagtgctaccttttgctaagcacttacatcatcgtatccttgtagtgttactttgtaaatttatatctgttctcggcatgtgcatcacaggctttggcacgacagtgctttcttaatagtttcaaacttctcaaaattgttcaaaaacccatgttgtttccacaacagttaagcacattatgattggatattctactttcatctgatgtttgtgcagcttataagattggtcgaacatcattttgattacattgtttgcacttgtgctgaactgctgatatttacagccatcagcagtgaaattatatgttgattgtgttctatgaggtgttagaattgtaaatagcttttctgctgtttaacctttcatgggacatttaacttaacaaagcactttagcaaagctcttgccacggtggtggtatcaatctctcctattgagcacaacataaacctatagacatcttggtagatctctgtcagttatacctagcttcactataagcatacagaagttagcttcctgttgtccccctattccaaaataggaaatttcttggttgtatgaagctatcaactttctaatgcaaacttcagtgtaatgaatttgtcatgtatccttttttctttgggtctgctttgttggcaatgaatttcctgttttcactgtagttggcatttgttggagcttatctttaactcctaaaatttgtattaaggtgcaagaaaatgacttactgctactcattatagtgacctaatatacctaatgatgttgcattgcacaagtttgatgttgtcatttgtttaatttggttcaaggcttcgtgtttgaatgatgtgtaatttgaactgtaattgttgcatatgctgggattgtgacttggtgagaacctgtgatcctgtttgtttgatgttaagtgatatggacattcctcctaacaaatttgctttgcatcgtttgtggctgtgtctttcactctttggatgattggcaggttaggtgaagggtatactgtatacattcgtttttgcatagagaagcaatgattaaccataaggctagaagtgtttgttgtgccatttttttattcgaaatgctaagatatcccataaaagcatttgtggtggaatttgttgatattaggagatgaacttgagaacatgattctttcggtgattattgttcttgagacaggtttctgagcattgaggaaccagagcctctttctttaccatgtctaaatatatgttggatttaacatagcttcactactatttcaatggttttatttaagttttcttccagtttcaatctgaacttttatgtcacttctgtgaaattcactccggtcacctttggaggggctttttatataaaaagagtcatggaatggtgaactaattgtttgtatggacattttgcatttattaaaagtatcttgctgccctaatgatattctctcggcctgttgctgctatgaaatcagctccagaatcttatcattttctgtaggcatctgagctcaacagcaagcaaatggcaggtggcagaattgcacatgcgaccctcaaggggccgagcgtggtgaaggagatctgcattgggctcacccttgggctggtcgctggtggtctgtggaagatgcatcactggaacgggcagaggaagactagatccttctacgacatgctcgagaagggccagatcagtgttgtcgtcgaggagtagtcttttgtgttgaaagtcttttgcctttgttttttgcaagttatttctgaaactctctggagagcatgacaaagctagtgccgtggagattgtcatgaaaaataagcatagcaatttgagaacatttgatctcgttgaatttgcttcttttcttgtattatcgtaaaatctgtctttaatatatgccagtaacagcttaaggg

SEQ ID NO: 22338 - DNA, 3801 bp, Oryza sativa
  ref <308>: DATABASE ACCESSION NUMBER: AK099281
  ref <309>: DATABASE ENTRY DATE: 2002-08-28
gagtggagcgcgagctgaagaggaggaggggagtggaggaggcggcgctgcagatctggaggcggagcggcgaatggtggtgtcgccggcggccgccgcgatctaggcttgccgcgcgcgcgcggatctgcgagctgcgtagccgtttctcgctgtgagtggaggaggaggaggaaggggaggaggatggcggcgaacgcggggatggtggcgggatcccgcaaccggaacgagttcgtcatgatccgccccgacggcgacgcgccaccgccggctaagccagggaagagtgtgaatggtcaggtctgccagatttgtggcgacactgttggcgtctcggccaccggcgacgtctttgttgcctgcaatgagtgcgccttcccggtctgccgcccttgctacgagtacgagcgcaaggaagggaaccagtgctgcccccagtgcaagactagatacaagaggcacaaaggtagccctagagttcagggcgatgaggaggaggaagatgttgatgacctggacaatgaattcaattataagcatggcaatggcaaaggtccagagtggcagatacagagacagggggaagatgttgacctgtcttcatcttctcgccacgaacaacatcggattccccgtctgacaagtgggcaacagatctcaggagagatccctgatgcttcccccgatcgccattctatccgcagcggaacatcaagctatgttgatccaagtgttccagttcctgtgaggattgtggacccctccaaggacttgaattcctatgggattaacagtgttgactggcaagaaagagttgccagctggaggaacaagcaggacaaaaatatgatgcaggtagctaataaatatccagaggcaagagggggagacatggaagggactggttcaaatggtgaagatatgcaaatggttgatgatgcacgtctacctctgagccgcatagtgcctatcccttcaaaccagctcaacctttaccggattgttatcattctccgtcttatcatcctgatgttcttcttccaatatcgtgtcactcatccagtgcgggatgcttatggattgtggctagtatctgttatctgtgaaatttggtttgccttatcctggctcctagatcaattcccaaagtggtacccgataaaccgtgaaacataccttgacaggcttgcattgagatatgatagggagggagagccatcacagcttgctcccattgatgtctttgtcagtacggtggatccactaaaggaacctcctctgatcacagcaaacactgttttgtccattctggctgtggattaccctgttgacaaagtgtcatgctatgtttctgacgatggttcagctatgttaacttttgaggctctgtcagaaactgcagaatttgctaggaagtgggttccgttttgcaagaagcacaatattgaaccacgagctccagagttttactttgctcaaaaaatagattacctgaaggacaaaatccaaccttcctttgttaaagaaaggcgggcaatgaagagagagtatgaagaattcaaggtacggatcaatgctcttgttgcgaaggcacaaaaagtacctgaagaggggtggaccatggctgatggcactgcttggcctgggaataacccaagggatcaccctggcatgattcaggtgttcttggggcacagtggtgggcttgacactgatggtaacgagttgccacggcttgtctacgtctctcgtgaaaagaggccaggattccagcatcacaagaaggctggtgcaatgaatgcattgattcgtgtatctgctgtgctgacaaatggtgcctatcttctcaatgtggattgtgatcactacttcaacagtagcaaagctcttagagaagcaatgtgcttcatgatggatcccgcactaggaaggaaaacttgttatgttcagttcccacaaagatttgatggcattgacttgcacgatcgatacgctaatcgcaacatagtcttctttgatattaacatgaaaggtttagatggcattcagggtccagtttatgtgggaacaggttgctgcttcaataggcaggccttgtatggctatgatcctgtactaactgaggctgatttggaacctaacattgttgttaagagctgctgtggtggcagaaagaaaaagagcaagagctacatggatagcaaaaaccgtatgatgaagagaacagagtcttcagctcctatctttaacatggaagatatagaagagggcattgaaggttatgaagatgaaaggtcagtgctgatgtcccagaagagattagagaaacgttttggtcaatcgccaatttttattgcgtccaccttcatgactcaaggaggcataccaccctcaacgaacccagcatctctactgaaggaagccatccatgttatcagttgtggatatgaggacaaaactgaatggggaaaagagattggctggatctatggttcagttactgaggatattctgactggatttaaaatgcacgcaagaggttggatatcaatctattgcatgccaccacggccatgcttcaagggttctgcgccaatcaatctgtctgatcgtcttaaccaagtgctacgttgggctcttgggtctgttgagattctgcttagcagacattgtcctatctggtatggttacaatgggcgtttgaaacttctggagaggctggcttacattaacaccattgtttatccaattacatccattccacttatcgcctattgtgtgcttcctgctatctgtctcctcaccaacaaatttatcattcctgagattagcaattatgctgggatgttctttattctgcttttcgcctccattttcgcaactggtattctggagctccgatggagtggtgttggtatcgaggactggtggagaaatgaacagttctgggtcattggtggcacatctgcccatctcttcgctgtgttccagggtcttctgaaagtgttagcaggaattgataccaacttcactgttacctcaaaggcgcccgatgaggatggtgactttgctgagctatacgtgttcaagtggaccagtctcctcattcccccgaccaccgtgcttgtcatcaacctggtgggcatggtggcgggtatatcatatgccattaacagcggttaccaatcatggggtcctctctttggaaagctcttcttctccatctgggtgatcctccatctctaccccttcctcaagggtctcatgggcaggcagaaccgcactccgaccatcgtcatcgtctggtcgatcctcctcgcgtcgatcttctcccttctgtgggtcaagatcgatcctttcatttcgcctactcagaaagccgtcgccttggggcaatgcggtgtgaactgctgatcggcaccgttacgaagatgaacttcaatcaatcaaggtctacccccccttgtgtaaatacctgaggggggctagaatgggatcttctttttgtgtagatgaagaccttttttatctaagttatgccactgtttattagctacttcagtgctggcgctagctgctgatacgatggaactgtgaagccttattttgcctgcgaagaagccagcccagcagcgtaaattgtgaatttttttcttcttttgtgacacccgttattttagtcatttgtttgaggggtcgttgttacacatactatgggatgttatttatacggatatattccaattacattcttttgcggtgaacattttaattatattcgtagcatataatgtaagg

SEQ ID NO: 22339 - DNA, 1881 bp, Oryza sativa
  ref <308>: DATABASE ACCESSION NUMBER: AK072528
  ref <309>: DATABASE ENTRY DATE: 2001-12-06
gagctgctctccaccaagagctgctccgcccccctaccccgcaacccgttgctttgtgccgcgcctcgctttggtcttcatccgcctcagatctgattcgttctaggttggtctggggaagatggcgatcacggtgaggcggtcgacgatggtgcggccggcgtgggagacgccgcgggtgcggctgtggaactcgaacctcgacctcgtggtgccgcggttccacaccccaagcgtctacttctaccgccggggccccgagggagggggcacgccggaggggttcttcgacggggagcggatgcggcgcgcgctggcggaggcgctcgtgccgttctacccgatggccgggcggctcgcgcgcgacgaggacgggagggtcgagatcgactgcaacggggaaggggtgctcttcgtcgaggccgacgcgcccgacgcctccgtcgatgactacggcgacttcgcgcccaccatggagctcaagcgcctcatccctgccgttgattacaccgacgacatctcctccttctcgctcctcgtgctccaggtgacctacttcaagtgcggaggtgtctcccttggagttggtatgcaacaccatgtggcggatggcatgtccggtttgcactttattaactcatggtctgacctctgccgaggaactcaaattgccatcatgcccttcattgaccgcactctcctacgagcccgagatccaccaactccatcatacccacatgttgagtaccagcctgccccagccatgctgtcctccgtaccccagtctgttactgctaataagacaacaccacctccaactgctgtggacattttcaagcttacccgctcagaccttggtcgactgcgttcgcagctcccatcaggagaaggtgcaccacgtttcagcacatatgcagttcttgctgcacatgtctggcgatgcgtatctcttgcacgtggcctgccttctgaacagcccactaagctgtattgtgccactgatgggcgacaacggttgcagcctccacttccagaaggttactttgggaatgtcattttcaccgccactccacttgctgaggcaggcaaggtgaccagtgggctggcagatggagcagcagtcatccaagaggcgctagataggatgaacgatagctactgccgctcagcattggactacctggagctgcagcctgatttatcagcattggtccgtggagcacacactttccggtgtccgaacctcgggctcaccagctgggtgcgcttgccaattcatgatgcagattttggatggggaagaccagtgttcatgggtcctggtggcatcgcctatgaagggctggcgtttgtcctcccaagcgcgaacaaggatggtagcctatccatagccatctcattgcaggctgagcacatggagaagttcaggaagctgatcttcgaggtgtaagcagactacttatgttatgtcagggagaagttgtagagctagagttctcaggtaaaataccttcaagtgagtcatgggggctatgctcttgctcctgttgagcaaattgtctggccacgttctcttgtaccttagcttgcaaggatatttggccatcaccacagccgtgtgacgatgtgagcaaccaataatgagctgtttttttgttttcgtttaggataggaatcaacaatgaagaaaaggtgctgtattctgtgaaactacatggcagtgttgttcttaccaaaaatacatgacaagtgaattgggtcaagttattgcctgttgtagctcaagtcgatagatgaacatcattgtacagtacgaatgtacgatacgactataacagcctgattgcctatgaactgcaagtaaatgcatgtgaataactg

SEQ ID NO: 22340 - DNA, 1325 bp, Oryza sativa
  ref <308>: DATABASE ACCESSION NUMBER: AK072529
  ref <309>: DATABASE ENTRY DATE: 2001-12-06
gtgggagcagcatcgaaatcgaatcgatccatctgcacaaggaaggaagcatcgaatcgaacgacaaatcgaatcaatccatcggcggcggcggcgactcggctctcgcttccacgcatccatccccgcgcccccctcctctccggcgactccccggaatcgcggcgcggcggcgcggccgccctagcgtcggcgacggctaggtcttcctccccgaccccttcgtgaggtgaggaattcctatataggactacaatttaagggagaagctttcaggcttctagcaagtaataactactgatctccaatggcacaaccttcttctaagaagacgccgtcagtctatctttacatccctaatatcattggatattttaggatcatcataaacttcattgcttttgccgtatgttattccaatagggtgctctttgctatcctatacttcttcagctttttctgcgatggcttggatggttggtttgcacgaaagtttaaccaagcatcaacatttggagctgtgctggacatggtaacagatagggttagcactgcctgtttgttggcacttctctcccagttttacagacctggcttagttttcttgatgttgcttgggttggatattacaagccattggtttcaaatgtacagttcgttcctatcaggtaagactagccacaaggatgtaaaagacacaggcaattggcttctgaagttatattatggacaccgaccattcatggccttctgttgtgttgcttcggaggttctgtacatagttctttttctgttcgccgatgagaagtcaacaagcttgcttaatgtgtgcggaaaccttctgaagcaaagtcctctcactgtctttgttttcatttcaactctagttggttgggcgttgaaacaagtgatcaatgttatccagatgaaatcagccgcagacgcgtgcgttgtgtttgatttgaagcgcggcaagtgagcagaaatgcacaacgatttcgtttagcttgtgtttggcatgtcgaagaaaatattccatgaggcttgatgtaccaaggctgtacaaacctaatgtaagattttgacatgtccttgacactgagggagggcatgctgtgcattaacagcatgaaaagaaaaggagagagatcagatgtatttgaggaaaacagggttttagtcagattttgtatgtttctttttacaacagcgatgaatcagcgcgatctttgtttctttatgagcttgatgtttgttgacagtatttttagctggttatttgtgaataccattctcacctctggaaatttggagggcatgaatcc

SEQ ID NO: 22341 - DNA, 1742 bp, Oryza sativa
  ref <308>: DATABASE ACCESSION NUMBER: AK072530
  ref <309>: DATABASE ENTRY DATE: 2001-12-06
gaatcgggtaattacgccatcccgcgggagaccgattctttactcgcactcccaccgctgctgctgctgcacacggacggggggactctctctggctgccatggcagaagcggcgaagcttccacgggtctccgcctatatatccccacccccaagcccgcgccttgccgacctctactcctcctaggcgtgtggcgggtttgactttctgactttgggagggagatttgtccaagaagaattccgttggaggaggattcggagagctcctttggtctgtgggtcggtcggtccagcttgctggagaataagaagggggtgttgttgcgttgcgggcgagggaaggaggggaggagaggaggcgtcttgccgttggggttctgatccctcttggggctcccgtcgaggagttaacaggtggcacgatgaagacgccatcactgcttgttcagtgtttccctggcttgcttcccagcaaggctacgagttgtgtgccaattgtatcagaaagggatctacagctaccatcaccagctgtcgagataatcccatcaaagagtgctcatccttacaaatatgctggcgagaaggttgatgttcaaggtcttgacattttcaaggggaaggtcagtgtagcggatatgatagccttctccccttctgaagtagtcgcatccaaatatgatggatctctgaaatattgggagagttccattactctcgtcaacattattaaaaatgagatccgtgatgggcagttgagcttcaggggcaagcgggttctagagcttggttgtggatctggtctggctgggatttttgcctgtttgaagggtgcatccacagttcattttcaggacacaaatgcagaaacaataagatgcagagcaatacccaatgtgcttgcaaaccttgagcaggctcgggacaggcagaacagaccatcagagagccctgttacaccatcacgacaactgttagccccgaatgtacatttctatgctggggactgggaggagctccctactattctctcagttgtacacccacctgcagcaccaacaaaccttagcttctcagaggacgactttatggatggctgcagtagccatgatgggagcagcatagttggtgtcgacaattgccccaggcgatcaaggaaactttctggtagccgtgcatgggagagggccagtgagacagaccaagctgatggaggctatgatgtaattttgatttctgaggtcccctatgcggtgaactctttgaagaagctctatgcccttatcacaaagtgcctgcgacccccatacggagtactgtatgtggtttcaaagaagaacttggttggttccaatggcggcgcaaggcaactcagagctttgatggaggaggagggtgtccttggtggccactttttaaccgagttagctgaccgggaaatttggaagttcttcttcaagtaaactagcaaaccaaggagctgggaagatgaaatggggccctggccttgtgacacaattttttgatgtctactctgcagcgctgtacataccgcaaagcgtagttccattaattctttggtaatataggattatgatatgtgtgcctcagttgttgtgcttgctgatgtgttggaaattccacccttttgtagatctcctatgtggtgttgctaagtaaagaaatcaaattgtaatgaaccttctgcataccgaaattatacggtgatggcattagtc

SEQ ID NO: 22342 - DNA, 1252 bp, Oryza sativa
  ref <308>: DATABASE ACCESSION NUMBER: AK072531
  ref <309>: DATABASE ENTRY DATE: 2001-12-06
gagagcagaggagagaaccccaccttggcaaaaagaaaagaaaaataatatcatcgcactttttgctgcccttttcatcccctcggatattcacgaagcaaatctctctgcaattcttttcttttttttttttgatcttgcggatcttctccattgaggaaaggcgagagctttgggatcgattccgggccatggcgaaggaggtggatccgtgcgaccacggcgaggtcgtcgacgccgggtgcgtccgcgccgtgctggccgagctcgtcctcaccttcgtcttcgtcttcaccggcgtcgccgccaccatggccgcaggggtgccggaggtggcgggggcggcgatgccgatggcggcgctggcgggggtggcgatcgcgacggcgctggcggcgggggtgctggtgacggcggggttccacgtgtccggcgggcacctgaacccggcggtgacggtggcgctgctggcgcgggggcacatcacggcgttcaggtcggcgctctacgtcgccgcccagctgctggcttcctccctcgcctgcatcctcctccgctacctcaccggcggcatggcgaccccggtgcacactctgggctcagggatagggcccatgcagggcctggtcatggagatcatcctaaccttctccctcctcttcgtcgtctacgcgaccatccttgacccgcggagctcggtcccgggcttcggcccgctgctcacgggcctcatcgtcggtgccaacaccatcgctggtggcaacttctccggcgcgtcaatgaacccggcccggtcatttgggccggcgctggccactggagtgtggacccaccactggatctactggctcgggccgctgattggcgggcctctcgctgggctggtctatgagtcattgttcttggtcaagaggacccatgagcctctgctagataattccttttagtagtctggtctctttagatggtttcatttgcagaatgcatatattgccaggtagtaataagatgcttgtgcagcttgtaggcctgtaagggctgtataattattattttctttttgccctcgaggattttatcaacgttgataatcagccatgtaaaaagattgtttgggatatgatttttttgttagtataaaatgtagtccggtagttggtctgttgtaaatcggcgaatgccatgtggttttgaaattagaatctatgtaaacattttcaaatgaattcagtaaaattcatttcaaatgggt

SEQ ID NO: 22343 - DNA, 2759 bp, Oryza sativa
  ref <308>: DATABASE ACCESSION NUMBER: AK072532
  ref <309>: DATABASE ENTRY DATE: 2001-12-06
gtggtggccaacaatagacaattggacaacctgtttcctcctcttcggctctcctcctcctcctcttgccttctcttcttcttgttcttgcccaatcctagtagaagcgcctaacttgtcgtttgctgtggcttgggttttgagagccggaggaggcaggattgatttttccatgattgggttttcttgattgattggcgcctgctgctgcggtgcggttggtccaagaaccgggatttcccggcgcggaatccggtcatccaagaggtgcatctgaatagataagaagagaacataatctttgggcattctctgtggttgatctctgaaaaaggtatcaaacagcctgcaaattaggtctcctgctctttccatcaaaatgtcagttcggcgccgatcagagagtatggagggcctgttctcgtttgacgagaggaaagatcgaaggtcagatgtggagaactcggaggacgagcggagaaggctatccattgggtcactcaagaagaaggcactgaatgcatcaaacaagctaacacattcactcaagaagagggggaagagaaaggtggagaatcggccctcattcacaatcgaagatgtcagggatgaagaagaggagcgtgctgtcttttccttccagcaggagctttttagcaggaacttgctgcctgacaagcataacgattaccacatgttgctgaggtttttgaaggctaggaaatttgacactgagaaagccattcaaatgtgggctgagatgctccagtggaggaaagaattcggcgcagacacaatactagaggacttcaattttgaagagctagacgaggtccttgtctattatcctcagggttaccatggagttgacaggcagggaagaccggtatacatagagagactaggaaaagttgaaccaaataaactgatgcacattactacagttgaccgctatatgaagtatcatgtacaagagtttgagagagcattccatgaaaagtttccagcatgctctattgcagcgaaaaggcatattgattctactacgaccatacttgatgtcgatggtgtgggtctcaagaacttcagcaaaacagccagggacatgctgggtagaatgcagaagattgacagtgactattatcctgagacactgcatcagatgtttgttgtgaatgctggtaatggtttcaaactactctggaatacagtgaaaggcttccttgatcccaaaactgcatcaaagatacatgttttgggaacaaaatttcatggaaaactccttgaagtgatagatgcaagccaacttcctgaatttttgggtggagcatgcacttgtgctgctgagggaggatgcctcaagtctaacaaaggcccatggaatgatcctaacattatgaagcttgcacataataaggaggcaaaatttactagacatactcggcgcttgtctgagattgagcaacgaaggggttcatttgctaggctacatcttttgaagggtagaagcagtgacacatcaacagtggagtcgggttcagatgttgatgatctcagttctccaatgatgagaaggccagtggaatgtagtcgattagctccagttcgtgaagaaatgcagatcagagcacgagactctgcagcttactacagctgcgatgatcactttgttgtggtagacaaaactgttgactatggtagaggaggagcgatgcctgataaaactagtgccccagaagtaagagctcaagctcggccttttggaggtagcacaacatcatatgcaacgggttcctcaagcaacagaggcggtatttcctcgagcaacagaagccgaacagtcgtacctaaagagaacacggatgaaggatttttccgccgtttcttcagattactgctggccttgattataaaagtttttgccttcttccacatagcatatggtcagcaggagatgcgggttgacaatccattgcctccagctgagcctgaaccaacttctgatgatcatccagcagtggagactttcagtgtagaccgcatcagtcctgtcatcgagcggcttcagagggctcgagggtaaggtcgatgagcttggcaacaagccaccagagattcccttggagaaagagcgctccctcttggaatcttgggataggataaaatgtatcgaatctgatctcgaacgcacaaagaaggtgctgcaagctaccgtgatgaagcaactggaaattgcagaatcaatagaggaagtgattaggaggcagctaaggagacgaagattttgtgcgtaataaagagacctaactccagaattaacaacacatgtcattgagaaataagactcaggagtacatttggcggccaaattatgcataggacatggttgatgagtgcagacacttggattcggtgtttggattggctcaaagaatgggtggcaggagcccagaaacagcaaaatatcagctccccttctgaatctaagaggcttgtctatccttgatgttagcataggatgttaggatggatggcaaaaagaaatgtagaataggtaaaaatgggaatggatgtgaaacatatgtcattgtctgcatctagaaacataagcatcgagttctctttgccaaacaaattttctttatgtgatcctgtggtatggcaaaattgtaagggaaattgtaagaattatggaaagtgccttgcatcaggaattgagaggcaaagagaaatgtaatcatcaaaatgattacattgtg

SEQ ID NO: 22344 - DNA, 1182 bp, Oryza sativa
  ref <308>: DATABASE ACCESSION NUMBER: AK072533
  ref <309>: DATABASE ENTRY DATE: 2001-12-06
ttgggtactctttgccctcgatcgaagctaccacccatcccaccttgcccttccttcgccgccgattccgatctgggccgccggcgacggcgaaacacaggcaaagcaaagataaaggtacaactgttgtttggtgcttgtccagctaggacagccgagtgaagtgccagcatgggtggcatccttggacgccatgacaccatgaagaggagctctcacggctcgaagctcgagacgaagatggtggagtccatgcagcagagagcgtcgcacgggacttcactcaagtcgttcgatagcatcatcatgaagtttccgaaaatcgatgagagcttgaggaaatgcaagatcatcttcgagcaattcgatgaagattccaatggcgaaatagataaacaagaattgaagcattgtttccaaaagttggaaatttcattcacagaggaggagataaatgacctctttgaagcttgtgatataaatgaagacatgggcatgaagttcaatgagttcatcgtctttctgtgcctcatttatctgctcaacgaaccagctgtgtcagaagcaaagattaagatgggattaggaaatcttgaggcaacttttgagaccttggttgatgcatttgtttttttggataagaacaaagatggatatgtcagtaaggaagagatggttcaatcaatgaatgagactgcaacaggggaacgctcttctgggcgtatagccatgaaaagatttgaggaaatggactgggacaagaatggaatggtgaccttcaaagaatttctgtttgcattcactcgctgggttgggattgacgaaaatgaggacgacaatgaatgaatttcgtgaagataagttgttcaattattaggacctggccagcctaaggaggttataaagtttggtggtaatgacaactggagcatatgatgttgattagttgatcgttgatattgtgtattatcttataggatgattcaacatgatcctagtagaatatcttaacatgcctgaagactccatgtatgcttacaaatttaaagagttccatgacagatagatctgaacttgtacagtaattctaatggttgtacttaccaatatcctggacttgatgtggagaaatgctataattcagttgcatgctcaacgaaaataagatcatatctttatgtt

SEQ ID NO: 22345 - DNA, 1355 bp, Oryza sativa
  ref <308>: DATABASE ACCESSION NUMBER: AK072534
  ref <309>: DATABASE ENTRY DATE: 2001-12-06
gaagagaagcttccactagaaaatggcccaatcccgtcgcccccttcccctcctccgctcctcccaaacccaaatccgccaaatttgactcgcgcgaggggcccgattcgtggggcgcgcttccccctgctgctgctgctgctgctgctgggattcggacgagctggtcgcgttcgcgttcgtgtgatctaggggggggatatggggtacttgagctccgtgatccccacggatggatcgccggtcagcggcggcggcctcagccagaatggtaagtttagctatgggtatgcgagctcccctggtaaaagggcttccatggaagacttttacgagacaagaattgactctgttgatgggcagattattggtctttttggagtttttgatggtcatggtggtgctaaagtagctgagtatgtaaaacagaatctcttcagtcatcttctaaggcatccaaagttcatcagtgacaccaaagtggcaatagatgatgcttataaaagtaccgacagtgaattcttagaatctgacagcagtcaaaaccagtgtggatcaactgcatcaaccgctgtccttgttggtgaccgtctctttgttgcaaacgttggagactctagggctatcatatgcagggggggaaatgctatagctgtttcaaaagatcacaagcctgatcagacagatgagcgacaacgtatcgaagatgctggaggttttgtaatgtgggcaggaacatggcgtgttggtggtgtgcttgctgtttctcgcgcttttggtgacaaactcttaaagcagtatgtagttgtggatcctgagattcgggaggaagttattgatcactctctcgagttcctcattcttgcaagtgatgggctgtgggatgtagtaaccaatgaggaggctgtcgacatgaccagatcgattcatgacccagaagaagctgcaaagaagctcttgcaagaggcctacaagagggagagcagtgacaacataacttgtgttgtcgtgcgcttcttgcatgggcaagggagtagtggatatgcttaaaaaacaactggtaaaagttacccaatgtagttgtgtaccaccatgtatacatgttttaattcaaatctcacggggttaaatggagagaaactcggagtaggatacgtgtattctgatggctgaagtaagctgaagggtgagtatgccttaggttaacaataagtttgctggtgaccgatcaccatagttcgttgcttttgaccctggatttgatggtcgtgttgtattgctacgggagactggatcgtttccctaggttcaatgtacgtggatattactcctctatttatttgtttgtatcctcc

SEQ ID NO: 22346 - DNA, 1700 bp, Oryza sativa
  ref <308>: DATABASE ACCESSION NUMBER: AK072535
  ref <309>: DATABASE ENTRY DATE: 2001-12-06
gactcaacctcttctcctccctatccattaattactcgcttcgtggtcggaatccatggccgccgccgtcgggaaccctaacgcggccgccgctgcgtcgatctcggcgtcgagggtcggtgcgggggcgttgcgcgcggggggcttgagggtggcggcggggaggaggggagcgggggctgtggtggcggcggcaatgcggccggcgaaggcggtggcgtcgccggcgaaggaggcggccggggaggtgaacggggcggcgtcgggggggttcgcgaggcccgacgcgttcgggaggttcgggaagttcgggggcaagtacgtgcccgagacgctgatgcatgcgctcaccgagctcgaggccgcgttccatgccctcgccggcgacgaagatttccagaaagaacttgatggtattctcaaggattacgtcggccgggagaccccgctgtactttgcggagcgattgactgagcactacaagcgcgctgatggcacaggccccatgatttacctcaagagggaggatcttaaccacactggcgcccacaagatcaacaatgctgtcgctcaagtcttgcttgccaagcggcttgggaaggaacgtatcatcgccgagactggcgccggccagcacggtgttgccactgccacggtgtgcgcgaggtttgggctgcagtgcatcatctacatgggtgctcaggatatggagaggcaggcacttaatgttttcaggatgaagcttcttggagcagaggtgagggcagtacattctgggacagcaactttgaaggatgccacctcggaggccatccgtgactgggtcaccaatgttgagaacactcactacattttgggatcagttgctggtccgcatccatacccgatgatggtgagagagttccataaggtgattggcaaggagacccgtagacaggccatggagaagtggggtggcaagcctgatgtcttggttgcttgtgttggtggtggatcaaacgccatgggtctcttccatgagttcgttgatgatcaagatataagaatgattggagtggaggctgctggctatggtgtagacactgacaaacatgctgccactttgacaaagggagaagtgggagttctccatggatcattgagctatgtgttgcaggatgatgatggacaagttattgaaccccactccattagtgctgggctggactaccctggtgttgggcctgagcatagctttttgaaggatattggacgtgctgaatatgacagcgtgacagatcaggaggcactggatgctttcaagcgcgtctctcggctggagggcatcatccctgctctggagacgtcccatgcgctcgcctacctggagaagctctgcccaacgctgcccgacggcgtgagggtggtggtgaactgcagtggaagaggagacaaggatgtccacacagccagcaagtaccttgatgtctaaaaaaactctagaggggctaaaaaatgatagcttttccatgagcagttttgaaagggtgcaatacaacagcagcaattgattagagctttgttatttggataaaaaagtaccaataatgcttggaagttcatattagctacaagagtatctttgtttgtttgtctttgtatctgaatgatgttattggcggagttggtaaatataactaaataaacaccaatctttctcc

SEQ ID NO: 22347 - DNA, 745 bp, Oryza sativa
  ref <308>: DATABASE ACCESSION NUMBER: AK099282
  ref <309>: DATABASE ENTRY DATE: 2002-08-28
ggctccttctcccctcccgccgccgccgcctcgcttcgccgcaggagtttgcaaagatggtggtgccgttgctgacgaagaagatcgtgaagaagcgggtgaagcagttcaagaggccgcacagcgaccgctacattggcctcaagacaagctggcgcaggccaaagggtattgactctcgtgtcaggagaaagttcaaaggatgcaccttgatgcccaacattggatatggttctgacaagaagacaaggcactaccttcccaacaagttcaagaagtttgtggtgcacaatgtctctgagctggagctgcttatgatgcacaacaggacatactgcgctgagattgctcacaacgtctccacccgcaagcgcaaggagatcgtcgagcgcgctgcgcagctggacatcgtggtcaccaacaagcttgccaggctccgcagccaggaggacgagtgaaattttctgcagtttttcgtgcttatggctgcattgttcgtagggcagtgccttggtaccttaaaattatccattttgtgttgctgttagatttgcccgtatggacatcattttgctgtgagtgacctgtctagttttagcaacaatgagataaaaagactttcagcttttcatcatcataaacttatgtggtttctcttgagcgctccaagttttctagatcctggaaacacttgttagttattattgtcctctatgagaatacaactaaatcaatccattattat

SEQ ID NO: 22348 - DNA, 3007 bp, Oryza sativa
  ref <308>: DATABASE ACCESSION NUMBER: AK072536
  ref <309>: DATABASE ENTRY DATE: 2001-12-06
ggcgccgcacccgcgattccccatccacccacaccaccgcacgctgcctcccacaccccgcgattcccacaccccgcgccgccgtcctcctcctgcgccgccgtcctcctcctgctgaccccgccaccgccggagcccgacctcgacgagcctgacccgacgcctccccacctccgacgagcccgaccccgatgcctaccctcctccgacgagccggaccacgatgcctcctgcagatccgcgccgactccacacgccgccgtcctcctctacttctccatcgactcctcctccggccggccggcttccgctgtcggctcctccctcttccccaatgccttcccatcgctgcagttgagtccaccctcttccccacctcctccgccgcctcctcaacctccaggtttagtttagtggtccactatcgattttgctgcaatcaacctacgttgttgagcatctacccagcaggacatctcaagaaaaacttcgtaccacgaaaacaccactgaaacacataataatttaggcgacctgtgaaatttgattgtcaatatcagctatggataagagatggatggaccttcctaggcacacatctgaatacatacaaggggtcaacgaatttatacaatatgcttttacccattcagcaaaagagaacacaatactatgcccttgcaagaagtgtgtgaatggttgttggaaggaagctagtgaaatctatgtccatttaatatgtgatgggtttttagatgggtataagacatggatatttcatgtagaggcatcgtcttcctttgctcaatatggtgaagcaccagcctcttttcctgagcaaactttgatgagattatgagacaagatagtagttcagaggaagctaatgagatgtttgatatgcttcatgatgttgctcatggattagatatggggaatttggatagaaatgacgatgacaatgtagtgatgcaaatacatcactttatctaaggtgcgaaagcttctcaaagttacgctttctagtcgaattactccacataaaacttcttggtggctggagtgataagagttttgatatgcttcttgatcttcttagagaggctttccctaagggctcaacagtacctaagagcttttatgaagctaggaaaatagtcaagtgtctttcgcttgggtatgatactattcatgcatgcgagaatgactgcgtactgtttaggaagcaatatgccaatgcagatgtctgtccaaaatgcaatacttctcacaggaaaacatccaagaaaagtcttgatgggaagcgtgtccataaagttcctagaaaagtgcttcgctattttcctattgaagagaggcttcaaaaaatgtttatgtccccaaaacttgctaatgatgtacggtggcatgatgaagggcgcacgaaggatggactattgaggcatccagctgactctccagattggaagcattttgataacacatacccagagtttgctgcagatagtcgcaatctcaggctaactttagctactgatggctttaatccatttagattaatgaactgcagttatagcatctggcctgttgtgataattccaatgaatctacctccttggcaatgtatgaagcaaccaaacttcattctttccttattaatccctggtccaaattcacctggaaagaatatggatgtctattttgaaccactagtagatgatatgcatgatatgtttgaggaaggtgtaagaacttatgattcttccaaggacgaatatttccagttgcatgctgccctacaaaaaaccatcactgattttcctgggttaggttatgtctctgcatgtgtaacttcaggaaaagtagcatgccctcattgccactcatatacttgttctattcatttgaaaaatggaggcaagtgttgttacatgggtcatcggaggttcttagatgcaaaccacaagtttaggtttgatgcagcatcattcgatggcaatgtggagttagggacagcaccgaagcctctgaccagagaagagatttttaagcaaacagaagatctacctgcagattttggaaaggacccaaagaagaaaaaaaccaaaccaaatagtaaaggcaaggaaacagaggaaaaaataatatggaataggagatctatctggtttaggttgcgatattggaaggatgtgatgcttccacataattttgatgtaatgcacattgaaaaaaaatgtatgtgacaacatcatcaacacactattgggtatcgatgggaaatctaaagataatctgaatgctcgattggatcttaaacttctagatatacggaaatatttgcatcctgtcgaagttggggattcttattatttgcctcctgcacctttctcaatgagttctgaagagaagaaattgttttgtgaagttctgaaacgaatcaaatttcctgatggctatgcctctgatattcgccggcatgtacatgttaaagagaaaaggataattggtctgaaaagtcatgacaaccatatcctcttacaacacttgcttccactagcagtacgaaagacattgccagaatatgttagtgcagtattggttcgtgtgagtaacttctttaagaaaatatactcacctgttatttccataagtgatatggaaaagttagatgctgaaattgctgaaacattaagccttctagagactatatttctaccagccttttttgatattatggttcacttaatggctcatcttcctacccaagtaaggatttctggcccagttcagtacagcaacatgtatccaatagaaaggtttctaatgaggttaaagggatatgtacgcaccaagagtcatcctgagggatcaattgctgaaggctatttgtttgatgagagtcttacattttgctctcgttatttagaaggatgtgaaactaggttctctcgaaaatccagaactagtatagataaaccaagctcaattaccatgccattcttct

SEQ ID NO: 22349 - DNA, 2989 bp, Oryza sativa
  ref <308>: DATABASE ACCESSION NUMBER: AK072537
  ref <309>: DATABASE ENTRY DATE: 2001-12-06
gatttccttcgcactcaaaatctcatctcctctcctccgcttcccactcgccttcgcgtagtgatactagtagtagccaagtttcttcgagcgttggatcgcgtggggggctagggtttcgcggccatggagcagaggaacctgttcgtgtcggcgctcagcgtcggggtcggcgtggggctcgggctcgcgtcggcgaggtgggcagctccggggagcggcgagggcggcggcggcgcggggatcggcgtggccgagctggaggcggagctgaggcggctggtggtggacggccgcgagggcgacgtcaccttcgacgaattccgctactacctcagcgagcggaccaaggaggtgctcatcagcgcggcgttcgttcacctgaagcaagcggatttgtccaagcacatccgcaacctctgcgccgcaagccgcgcgatactgctctctggcccaacagagccctacctgcagtccctagcgagagctctgtcgcactattacaaggcacagttgctaatcctggatgtcaccgacttctctctccggatccaaagcaaatatgggagctccagcaaaggcttggctcaaagccagtccatttctgagaccacatttgggaggatgtctgatttgattggatctttcacaatatttccaaagagtgctgaacctagagaatcattgcaacgtcagacaagcagtgcagatgtgaggtccagaggatctgaagcttccagcaatgcacctccacttcggaaaaatgcttcaatgtcttctgatattagcgacgtttcctcacagtgttctgcacattcagtttcagctaggcgaaccagtagctggtgtttcgatgagaaagttctgatacagtcactttacaaggtcatggtttctgtggctgaaaataatccggttattctttacataagggatgttgaccagctccttcatagatcgcagaggacttattctttgttccagaaaatgttagccaagttaactggacaagtgttgatacttggctccagattacttgattcagatagtgatcacacggatgttgatgagagagttagtagcctattcccttttcatgttgatattaaaccaccggaagaggagacccatctcgacagttggaaaactcaaatggaagaagacacaaagaaaatccagattcaagacaatagaaaccacatcatagaggtactgtcagcgaatgatctagactgtgatgatttgagctcaatctgccaagctgatactatggttctcagcaattacatagaggaaattattgtctcggcagtctcgtatcatatgattcacaacaaggatcctgaatacaaaaatgggaagcttgttctatcatctaaaagtttgtcccatgggctaagcattttccaagaaagtggctttggtgggaaagagactctgaaattagaggatgatctgaaaggtgccactggacccaaaaagagcgagacagagaaatcagccacagtgccacttaaagatggtgatggtccattaccaccaccaaaaccggaaattccagataacgagtttgagaagcgcatcaggccagaggttataccagccagtgagataggagtgacttttgatgacattggagccctggctgacatcaaagagtcgcttcaggagctggtcatgctacctcttcgacggcccgatctttttaaaggaggacttcttaagccttgccggggaatattgttgttcgggccaccgggaacagggaagacaatgcttgcaaaggctatagccaatgacgctggtgccagcttcatcaatgtctcgatgtccaccatcacatcgaagtggttcggggaggacgagaaaaacgtccgagcattgttcagtttggctgctaaggttgctcctacaatcatttttgtggatgaggtggacagtatgttaggacagcgcgctcgatgcggtgaacatgaggcgatgcggaagatcaagaatgagttcatgagtcactgggatggtctcatgtcaaaatcgggtgaaagaatccttgttcttgctgctacaaatagaccctttgatcttgatgaagccatcattaggagatttgagcgcagaatcatggttggccttccaactctagatagcagagagctgatcttaaggacactattgtcaaaagagaaggttgctgaagatattgattacaaggagcttgcaacaatgaccgaaggatacagtggaagcgaccttaagaatctttgtgtgacagctgcttaccgccctgttagggagctcctcaagagagaacgagaaaaggagatggaaagaagggcaaacgaggcaaaagagaaggcggctacggcagagaattcagaaagtcctgaaagtaaaaaggagaaggagaattcagaaaatccagaaagtaaggagaaggagaaggagaggaaggagaattcagaaaacaaagaagagaaaacagaaaacaagcaggataactcaaaggctgaaggtggaactgaagggacaattgacctcaggccactgacgatggaagacttgaggcaggcaaagaatcaagttgctgcgagcttcgccaccgagggtgctgtaatgaatgagctgaagcaatggaacgacctatacggagaaggtggctccaggaagaagcagcagctgacgtacttcttgtagaaatcatgcaagcttggtcccaggaaggccaggattgcctgcggctgtggagaagaggaattcagtggagtagagcacgagtttggtagtgggaaaggattctcttcgtttgttagtctgtacttggattgattaagcggtttatattgtaatcattcatctataagtaattttagcttggctgttgcgatgtaaagcttcagttagtttagccatagaaagctgtgatgtaaattcttacatatgttcgatgcgtagtatagtaaatttttatagtcaatcactgggaaatacc

SEQ ID NO: 22350 - DNA, 1106 bp, Oryza sativa
  ref <308>: DATABASE ACCESSION NUMBER: AK072538
  ref <309>: DATABASE ENTRY DATE: 2001-12-06
gatccacgccctagccttgcccgttgatggtgggcgggcttcgccggcggcggggtggagatggacaccgggaacaaaggcacggcgacaccggtgctgctcaacgtctacgacctgacgcccgccaacgattacctctactggctcggcttcggcgtcttccactcgggaatcgaagttcatggcatggaatatggatttggagcccatgatttcccatcaagtggtgtttttgaggtggaatcgaaaagctgccctggctttatatatagaaagacggtgtggctaggcacaactgacatgtcccatggagagtatcgctcgttcatcgaaaagcttgcagggaaataccatggcaactcatatcatttggtttcaaagaattgcaatcacttcacggatgatgtgtgtaagaacttgactggaaaacccatacctagctgggtgaatcggctagcaagagtaggttcattttttgattgtcttctaccagaaagtgtccaggtttctcctgttgggcgtgtcccaactcttcgtccagtagctgatgatgatttggattcaatatccacagttagtgacaacaatgaggaggacaaacacttgctgccagcaccgtcgaatgacctacattccgtagatgtaccattaaagttagccaaagatgttctttgaattgtttcatattttcacaaaacatgccatattatcatcgcaagtgctgcagtcggggtgctgaattgtttctcgaggtgacttcataggacaacaccgttgagcagaggttcccgttcgtgatactgatttcttttttcagagtttcctgtccaagtaggtacactgtatacaaataggaattgcccatctttccagctatttgttgtttcactatcgtacagtgagattgttgtatcgtccttgctacttttttatggaatatcatccatgctactttggtagcaatggtatgacattagtccatatgtcatggcagagctggaatagacatcgtactatgggctatatacttatatttttctattagccttgtgtaaaaattgcttgtatgagctcggaaatgagaatacacactataacttactatc

SEQ ID NO: 22351 - DNA, 1587 bp, Oryza sativa
  ref <308>: DATABASE ACCESSION NUMBER: AK072539
  ref <309>: DATABASE ENTRY DATE: 2001-12-06
ggcccatgcaaaagaaacagaatggcaagccaaaccaccatgtgaccccaggcaaacgcagacaacgccttccccggtcgccgcctcgccaagggaccccatttccacggcacctcagaaccgaggagagatgccctgccaacctcctcgatcgtggcggtccgcggatccggcgctcgtttcgctcggtttcctgcagaaaacacgctgtccatctggagttctggacatctggtctgaactctgaacaccgatccgttctctataattaagtgacagcatatcacaatctcctgtacagttctaaacctgtttgctgtccaatcccattgccaccttgcttacaaccaagtaataacaggagcagtacttgctcagagaggtgatgagaagaaaaacagagatgattcagactaccccctgcgtcgcgctgctcttgctcgtcggcgttgcttttgctgctcgatcggcgtcggctatcaccgatggcctgctgccgaatggcaacttcgaggaggcgccggacaagtcgcagatgaacggcacgagggtgacgggtcgctacgcgatacctcagtgggagatctccgggttcgtggagtacatcgggtcgggccagaagcagggagacatgctcctgccggtgccggagggcgcgtacgccgtgcggctgggcaacgaggcctccatccagcagcggcttaccctgacgcggggaatgcactactccatcacattcagcgcggcgcgcacctgcgcccagtccgagctcctcaacatcacgatcacccccgagtccggcgagatccccatccagacggtgtacaccagcagcggctgggactcctactcctgggccttcaaggccaagcacagcgtcgtgttgttcatcgtccacaaccccggtgtctctgatgacgaagcttgcggccccctcatcgactcgttcgccattaagaccctgaaccctcctcaaagaacgaaaggtaacatgctgaagaatgggggcttcgaggagggcccgtacatcttccccaacacgtcctggggcgtgcttgtgccgcccatggacgaggacgactactcgccgctgtccccgtggacgatcctgtcgaccaccaagtccgtcaagtacatcgacgcggcgcactacgctgtgccgggcggcgcccgcgcggttgagctggtgtccggcatggagacggcgatgctgcaggaggtgagcaccgtgcccgggcggtcgtacaggctggagttctccgtcggggacgccggcgacgggtgctccgggtccctgaccgtgcaggcgtacgcgtcgcgcgggagcgtgaaggtgacgtaccagtcgcagggcacgggcggctacaagcgcgggctgctcgagttcacggccacggagaaacggacgcgggtagtgttcgtcagcatggcctacaccacgaagtccgacggcacgctgtgtggtcccgtcatcgacgacgcgtcgctcgtcagtgtccacagccaccgccggttccttctgtaatattattactatcgtcaaagccactagaatttaaaatgacttaaagttgtcccatatgaagg

SEQ ID NO: 22352 - DNA, 1306 bp, Oryza sativa
  ref <308>: DATABASE ACCESSION NUMBER: AK099283
  ref <309>: DATABASE ENTRY DATE: 2002-08-28
gatcgatcgcttcatcactcgctagctcatcactgcgagcggagacagctcaggagggaggaagcaaaagaagagagagagagatcaagagatagacgaagagatttgtctgtgtaaatcaatggaagggcagcagttcgcttggggaagggaggagggagggtggaggaaagggccatggacagcgcaggaagacaagctgctggttgagtacgtgaggcagcacggcgaagggaggtggaattctgtcgccaagatcacaggtctgaagagaagtggcaagagctgcaggcttcgttgggtgaactacctgagacctgacctcaagcgaggcaagatcacgccacaggaggagagcgtcatactcgagcttcatgccttgtggggaaacaggtggtcgacgatcgcgcgtagcctgcctggcaggacggacaacgagatcaagaactactggaggacgcacttcaagaagggcaagccgtccaagaacatcgagcgcgcgagggctcggttcctgaagcagcgccgcgagatgcagcagcagagccagctgatgcaaaccggccagcagcagcagctcggccaagacgacgacgccaccagcgcggtggtggacgacaaccttgcggaggtcgcgccaccagccgccacctcgctgacccacgacggcgagctccagataatgcaggagatggcgccggacatggacgacctgctgtactaccacccgggagacatgtcgccctattcctacgacgacctcctcggcagcggcggcggcgagtgcggcgccgtggcggccagcgctggcgctgccgcctcgacgagcgagggctcaagcgaggagctcgacggcggcgccgccacgtggggcagcctgtggaacctcgacgacgtggtgcacgacatgatgatcgactgcgccgccggcgccggctgctgccggggtagcttccctccgctacaggataaaggcctcgctttctactagctatagcttaacgattactaaattgctagctagctatagctacaagcctacacactctacaagtagatgttccttttggtcttgtgcatcgatccaaactgatagcacacagcagcctgtgcgtgtggaggaggtcacacgtagtgactatgcaggtgagagcgagaggccattttgtgtacacgaagtgttggtggataaggatgcaacaccaactatactccactttgagtagctagctcgcctcgatggcatgtttggctcatttgagagcgctttttctaggagaaaaaggaagggaagagtttttttctt

SEQ ID NO: 22353 - DNA, 1588 bp, Oryza sativa
  ref <308>: DATABASE ACCESSION NUMBER: AK072540
  ref <309>: DATABASE ENTRY DATE: 2001-12-06
gggagagactgtccatgttgaatccaatcatgtcgtcagatcggagctccaagaaggtgtgtgtcgtcggcgccgggatggcggggctggcggccgcgcgcgagctgcggcgggaaggcctcgacgtgacggtgctcgagcagctcgccggcgtcggcgggcagtggctgtacgacgcggcgaccgacgccggcgacccgctcggcatggccggcgtgcacagcagcgtgttcgcctcgctccgtatcaacggcccgagggagtccatcggcttctccgacttcccgttccgccccaccaacgacgccggcggcgacgcgcggcggtaccccgtccacggcgagctcctcaggtacatcagggacttctgcgacgcgttcggcctcatggacgccgtcaggctcaacaccacggtcacgcgagtcgccatggcaccgccgcggcgcgacgggtcgctgcggtgggcggtgaggagcaagcgccacggcgaggcggagacagaggaggtgttcgacgccgtcgtggtggccatcgggcactactcgcagccaaggctcccgaccatcgacgggatggataggtggaggaggaaacagctccattcccactcgtaccgcgtcccggactccttcgccggcgaggtcgtcgtcatcgttgggtgcagcgtgagcggcgcagagctcgcccttgagctccgccgcgtcgccaaggaggtccacctcagcaccaagtcgacggaggagaccatcacgtcggcgatgtccaaaagtgtcgccaggtacgaaaacctccacctgcgaccacaggtcgaacacctgcgcgaggacgggactgtggtgttcgacgacggctcgttcgtcgtcgccgacgctgtcatctactgcaccgggtacaactactcgttcccgttcctggacacgaacgggaaggtcaccgtcgacgacaaccgcgtcgggccgctgtacgagcacgtgttcccgccggagctggcgccgtcgctgtcgttcgtgggcatcccgggcaaggtggtcctgccggtgttcatcgaggtgcaggcgaggtgggtggcgcaggtgctgtccgggcggaggacgctgccgtcgccggaggagatgcagcgcgccgtcgaggagcacacccgcggcatggaggccgccgggttgccgaagcggtggacgcatgacatgttcttgaacctggaacgctgcgacgactacggcgagcgcatctgcggcttcccgcggatggaacagtggaagaaggagatctttgtgtcatccctctccgacatggtcgacgacatcgagaacttccgcgacggctaccacgacagcgacctcgtccgcgacgccctgcgccggcacggttggactcccgccgaggaggacgacgacgcccacaaataaaagcacttggattggactccaataaattcaggttaagatgaagcaaaccaaataaatacacgacaattcaacaaaaaaaatgctggcctgtctgtctcaagaggatttttcattgtactaaaaactgaacctttttattttcggaattgctataaatatgccgccatctttcttctcggatt

SEQ ID NO: 22354 - DNA, 3391 bp, Oryza sativa
  ref <308>: DATABASE ACCESSION NUMBER: AK072541
  ref <309>: DATABASE ENTRY DATE: 2001-12-06
ggctgtcacttcctcctcccgcgcctttgccctccccaatcctccggtctggaagcgccgccgcagatcaagcgaccctcgtcgccgtcgggtcaggggcgctgccgcctctccaccgtcatgtcaagggtgcctcctcctcctcgctgtcagaccccctcgagaaccctagaatcctttggacgccatcaaataaggagctgcctcgacaccttcacgccaccagatcgctgtcatgccgctgctcgccatatcacacgtcttcgcctgattgtattcccctgttcatatgcttgcagtgaaggttgagaatatgcaactgaaacggccaacatggatggtcagcaatgagaaagagatgcttcctgacaaaactggttgaattgcctagctgtttggatcgcatgtgacagtagatcattacctcttattgctattattcaagtaaataaggctaactgaaatggctaacataaatacttgcataaattctggtctgatttcatttggttggctcagtgtatagctgtcggctgcgtcgatcggtttagtgcggtctctgacatcagttctttttcctaatctgttatagaacctcaaatggaatttttcatgaagaatgacaggtccattagccagtactacaatatttgagcaaaaataatttcaggacacaactttttcaactgaatagtcatatatgtttatccaccataatatacacataattcctttctctctttcttcatttgctttcagggaaaattatgaattttgcttgtctcataaaatttgctttcatggactgccgtgaagcttatcatcctcactgtgtgggagaggaagacagattgaggagttccgaagactggttcgtttgtgttgagcacctttttttttaaaaaaaaagtatttcaattatgctttgtactactcattattctgtttgcccacgattgcttaactcattcgttacagtatttcaaccatgctcagtaatagaaagaaaatgttatgctagaatgtattatgtgcatagttattgagaccggaccggccatcaaatcggctaggcctttggttcactagttcaccggtttgaccggttgaaccgtcggttcaataaggttaagtataactgattcactctagacataaccaacaatatggcttggtggttggtgcaccacaactccattcagcccatcctgggttcgaatcccaccgtacgcccctttttcctttatttccttctcaatgcgtgcacttgcacgtggtctgcctccttctccatgcgtgcacgtggtccggcagagtagcaggtcacggttgagtggtcctgcgccggttttctgaccggcttttaagcggttttcgaataaacccggccggcccaaccggtttataccgggtcatttgcacatacaatcttttaactggaccgaaccggcagaggccttggttccggttttttccggtccaaccgccggtccggtccggtcccaataactgtgattatgtgttgtccatgtagaagttataatctaataaaattttgagttgtagacatgcaacaggaactttcattgctgccagaagatatgcaagctctatggttcctacatcaattattagccagggcatcggttggcaggtaaataaatcaaattattatttgcaccatggagttcgtccggtctttgatttggaatattgatcatcctaaaacatcgttgtgagggtatcatcatcttgattgatccttttttggatggccaatggagcctcagttgcagcgtaaatataacatcagaggataaatagaactgacattcattgattgttcagacaatttgtttttttccttttgccaaatggcagtgtgaatttgtatttgcagggagaatgttggtttacatgctttgacacatgttggtatttctcggcctgttggatggccttcaattcatagtaatcagctcctatgttttgacagcagagcagtgcacaaaagtatgggcatacgtccatgaaaggtacacatgttctccccttcttcatttatccatcgtcatgaacagagtggctatggtatttttttaaagacttccatcggtgtgttggtaaaatgcttacccaataggttaaatctttagcaactcggcaagtggcagtaagcctgctgaccattcccacaactaatggctggcagcagcaatctttgagcaaaaataatttcaggacacaaccttttcaactgaatagtcatatatatttatccacgataatatacacataattcttttttctcttttctgcattggcttccagggcaaattatgaatttggcttgtctcataaaatttgctttcatggactgccttacacaacattttttgcagtacttctggcatttttctgctttatgcatgtgttgggttggcattaaactatttagagctgcagattttgggctgttcagtgaggaaaattggagatacatatattgatttgggggtttaacagtgtaactgatttttttttttgttgttgtgttacagcatgacagaaatttaggattgttagatggttttcctcgggctagctgcaattggggcagagaaggtagtttttgttgtgtatgatagatcaagtttatggggtcagcttctcctgtgtacttcttaggaagatccatggactgaattgaaccgagttttgctgagctccaattcatatagctacgtaattactttgaacgtatgcagccttttttttggggggcaggatggatgcctcctgattaaaaaagatgcggctgcgtgttttgattattttgttgcagaagtgcaaaccgcagatcatgtccctggcgcaagcagtgaatgagattgcccgggagagtttgatgttacattggggtttcatgtctgtatgcgcgcgtttgtgtggagatctaactttctggtgttttgcagacctaagtagtttggatctgcctgtgatggaaggtcttgacaaattacttcttgtaagtttacaaactacggctttggtgctgttctaatggatttcaacatcttaatgtgatgttgcaacggatgcttcattttcaaatatcaaaggccatggcaaagggagtaaacccagaagaaaatggtgttatggtcgcatcatctacgaatggaggaatcgcgagccagcggcagcccatagcgctcagaacgccggctcctgaactaccgttgcaactgccggacgagcaacagtgatcgcgcttgcatggataggattaagttagttggttgtttccgtctcattagcaacaattcagttaattgtatgcctattaaagggccagtgattcatgaataaagcaaccaattgatcc

SEQ ID NO: 22355 - DNA, 1119 bp, Oryza sativa
  ref <308>: DATABASE ACCESSION NUMBER: AK072542
  ref <309>: DATABASE ENTRY DATE: 2001-12-06
gttgagtcccctgtcgagatagaggacagatatagagagggtgtgtgagagagaaggggaagcaaaacctctgctcagggtgttgcctagaccatgctgaaaatatgtcgggttctgtgcatcttgcttcccctgcaataaataaatacgaccgtccctccctagattttgttccaccccgtctcaagattcctgcaggaaccatagaagaatcagtaatagggggagggactatcgatcatgtgacgaacaagaaagatgttgagagacaaactacaaaaccaattggtgttatggctccgcaggatacatggtgtaggatggatcccaaatcccttcaacagagcgaagtcgatgggcacgaagggtgcagccaaaatatgttgggttatctgcatcttgcttcccctgcaataaataaatacgacagtcgctccctagattttgttccaccccatctcaagattcctgcaggacccatagaagaatcagtaagagggagagggactatcgatcatgtgacgaacaagaaagatgtggagagacaaactacaaaaccaattggtgttatggctccgcaggatacatggtgtagggtggatcccaaatcccttcaacagagcgaagtcgatgggcacgaagggcgcagccctaaagactcaatatacaccaactgcactatcccccatcgatactccctaccttcgaaggatgataaagatcaatgtgaatatccatggaccaaatcctccaatcaatatccccgaacttcaaggtactatcatggatactacccgccttcaagttataatgaaggaggtttcacaccttcgatatatattgaaagaggcccctcaccttggagacatcataaaggagattcctcatcttcaaggtatgatggagaaggttcctcacctccaagtcactatgaagatagctaccggccttctaatgtgtcatggaatcgagtgttctccgccttatggagatggtaaatagcacaaagatattagagcactgatgtaccactcaaaagccatcaatttttagaggagtctatgaaagaatctccatgtcgatagtctccacctttaagtaacaataaagattactagt

SEQ ID NO: 22356 - DNA, 2543 bp, Oryza sativa
  ref <308>: DATABASE ACCESSION NUMBER: AK072543
  ref <309>: DATABASE ENTRY DATE: 2001-12-06
ggtcttcctgccgccgccgaggagccgagcaaaatccaataatccatcatcggagacgagcaggagcacgcgcatcaatcatcgtagagtgactcatcggaggaggcgtgaattccacctatccttttcttttccccccttgtattctcttattattgaaatcccaaccccataatccgaccgtacccacccgccccccatcgccggcggcgcccagatcgccaccgatcgcctccaccaggggcgcggcgcctcttccgccctctctcagcggcggttgctccacgtctccggattccggaagaggagggagggagggagggagggagggagggaggaggcaactcggggcgttggaccgggctcccacggcgacgcccatggtcgacaaccagggctgctcgccggcgctcgagcccgtgcccacgccgcccaaccccgacccctcatccatctcgccggaggcctgggatcccctcgaggccgccgccggagccgtcgtcgcccggatccagcccaacccgccctccgaggaccgccgcgccgccgtcatagcctacgtccagcacctcctcaggtgcaccgttggctgccaggtctttccatttggatctgttccgttgaaaacttatcttcctgatggagatattgatttgactgcctttggccattcaagtgatgaaattttagcaaaacaagtacaggctgttttagaatcagaagaggcaaggaaagacgctgaatttgaagtcaaggatgtccaatatattcatgcagaggtcaagttggtgaaatgcattgttcaaaacatcattgtagacatctcattcaatcagtttggtggactgtgtaccctttgttttctcgagaaggttgatcaaaaatttgaaaaataccaccttttcaagagaagtataatgctgataaaagcttggtgttattatgaaagccgcattcttggtgctcaccatggattaatttctacctatgcattggagatattggtgttatatattttccatctcttccatggaacattggatggtccactagctgttctctataggtttctggactactatagcaaatttgactgggacaataagggtataagcttgtatggccctatttccttgtcttccctgcctgagctagttactgactctccagacactgttaatgatgattttactatgcgagaggactttctcaaggaatgtgcgcagtggtttactgtacttcctagaaactctgagaaaaatactcaggtctttccccgaaaatttttcaacatagtggatccattgaagcagagtaacaatctagggcgcagtgtcagcaaaggtaacttcctccggatacgcagtgcatttgattttggtgcccggaagcttgggaagattattcaagtgcctgacaattttactatggatgaagtgaatcaattcttcaggaacacattgaagagacactgcagtagggtaaggccagatgtgcaagaaatagctctggacttcaatggtgaaagagccgacaacgatagttcgcctttatacagtaataattcctttggtgatctatctgatgagttcaataacatcagcatttcagattccagcaaccatgggtcactaaggcaaaatggatggaattatgtggctgagaacaaggaaaggaagtctgtttctggtggcttgctggcaagcaaagcaacaaatcctgcagctactaattcaactggtatgacgaatggcagtgactcttgtgagcccgcatcaccatcaattaccggagcacatagcttgccatctgaggaaggtcatgacgcactggatctctttaatgagtcagaaagtggtacgaaagctggcataaagtatggcacaaacccatcacaccatggaatgtcaacagtgagttatgcaggcagatcccaccagtcctttgaagaggtggataatgatgatagaggtaccatcgatagcaattggtcagatctcactggagactacacaacaaattttaataatcttctctatgctcaagggttccaccaagattatccaatgaaccaatattatccatttggtccagtgtactatccaataccctcccctccacctgcacgatatcagaataggcgatcatcaaatggtcatagcagaaataatgtgtatggatatgctggtacaaatggaataggccctgctccttgtccaccaggttatttaattatgaggccatatagtcaaattgatgattcaaatcgagctcgtggaactggcacatacttccctaacccaaacttgtccaaagacagatcaccttctggacgaggcggaaggggaaaaactcatttcctgccacataaccatcaaagaccacaccactacggtagagctgatatgtcagcagatttgactccttcggaggaattgagacatatttatgatcctgatgcatatgacttgggaatcccctcttcactgcgcatatcaataccttctccatcttcggaagctccaagggaaattgtgcatggc

SEQ ID NO: 22357 - DNA, 1762 bp, Oryza sativa
  ref <308>: DATABASE ACCESSION NUMBER: AK072544
  ref <309>: DATABASE ENTRY DATE: 2001-12-06
ggcccgcccgctccattttttcgctcctctccaccgcgggccgcgtctcggaataaaacctcctactactaaccccaccattccttctcccctctcctctcctgcttctctcgcccgcgccgccgctcccgcggggcgaaccgggggaaaggcggccgtctcgcgtcggcgagatttctgttttacaaggttggtggtgaagattttgctatccacttagccgaccagagtgaatttggaagttgcaatgggtgaaaacgctcaaggtagtggtcgccgcccctttggagatttaacaaatgtccttggcaagcgcccagccccatcgaatttggagaaaagtgcaggtggaatcaagattgtccgggttgaaaaggctgttgagccaagaaaagagtttgatgaaactgcaaaagcaagtggtggagcgacacgaaacacattgcccctttttgatagtattgccaaagagaatttaatgaggccctcaatttttcgggaaactaagatgcagcacatggctgctgaggcagctgtgttgctatccaaggaatccgatgacatgaggagttgtgccatgtcattaggctcatctggcttgcatgataaggagcaggagtcttcgctggaatcagaaggtggctgtgaagaagatgatgatgatgacatggatagtgaatacttggcatataccagagatagtactaaaacggcaactaatgatggtgaatgtcttactcaagaggagatggctggatcatcagggaatcagaagccactatcttcactggacttcacaacaggttgtgatgacatgccatgttccgatgtccatcaccattcactgggaaatagtgaactggaaaatgacgataccactaagtcgtgtgcttgttctttctgtcttaaggctgcattcatgtggaccgatctccattatcaggacacaaggggacggcttgctgcattgaagaagagcataaagttcgctagattgctgggcaagagaagccaaggagatgaatattctgttaatgcaggcagatacaacttgaaacgggttgcagagatggagtttgagctatatcaacagcaaagatcactcttccttcatacagaaaatgtccttatccgtgagagcgcacagcttcattcatctcttgtgaagttaaaggaattcagagagaactgcaagacagatctcgagacggctagcagttcgttgttgggaaaatgaatctttcatggttgtgctgttaaactgcttttgcctgggattcttcagatcagctgggccagtttgagtcaagttgtgcattgagattggttgattgctaggaagattagtggttattgccagtcaggaagtttggttatagtgatggtactacctatatgcagtgttcagcatctttgtttgtaaaaatcgtgtgggaaggtcggaactccaagttagcgacatgattctcctcagttgtaactggcagttagcttgcgccatgtggtatctgtatgatgtttcctgctcccaagcataatggtggaagaacgatgatttgacttcttttttttcttgcttgccgcccctcaatgttcaggtctgtttgcttacactggctaacatgtagtaagtactctgcagatttgctgttactacgtgtactatccttgacttgcgtgagccggccgatgcctgtatcgctgtaaccacaagcattgtcaaggattttcaatctgatctttaacattctctacggttgtt

SEQ ID NO: 22358 - DNA, 2535 bp, Oryza sativa
  ref <308>: DATABASE ACCESSION NUMBER: AK072545
  ref <309>: DATABASE ENTRY DATE: 2001-12-06
ggctcgcgccccccaagtcgtcgcctagtcaccaccaccgcgagcgtctcctcctcctcctccacgcgccgcggcggcggatttcttcgccggcggctgcgagcgactcggtaccccgcgccgcgcgcgggcgctccttcgatcgtgatctgggctgggaggagggaagtggggggtaaggcgaggcgatgcagaggcaggggcggcacctggagcggtcggggtcgaagcgggcgctcgacgcgggcggcggcggcggggatgacgacgaccgtgcgcccaagcggccgcgcgtcccggccctcgcgagtgtcattgtagaagccctcaaagtagacagtttacaaaagctttgttcatcacttgagccgattctgcgaagagttgttagtgaagaagtagagcgtgctttagccaaattgggtccagctgcaactcctgctagaattcaaggaaggagctctcccaaaagaattgaaggtcctagtggtatcaatctccagcttcagtttaggtctaggctatcactaccactatttacaggagaaaaagtggaaggtgagcagggagcagcgatacatgttgtgctgctggatgcaaacactggacgtgtagtcacttcaggacccgagtcgtttgcaaaactggatgtccttgtgcttgagggtgattttaataaagagcaagatgaagattggactgaagaggaatttgagaaccatattgtgaaagaacgtgaagggaagagacctcttttaactggtgacctccaggtgactctcaaagaaggtgtagggacgattggagagcttatcttcactgacaattcaagctggataagaagcaggaaatttagacttggtttgcgagtctcttcaggattttgtgaaggtgtccgtgttaaggaggcgaaaacggaggcttttactgttaaagatcacagaggagaattgtacaagaaacactaccctcctgccctaaaggatgatgtttggagattggagaagattggaaaggatggtgcatttcacaagaagctaaactcaaatggaatatacacagttgaacattttcttcaacttcttgttagagatcaacagaagctaagaactattcttggcagtaacatgtcaaataagatgtgggaaagtcttgttgagcatgcgaagacatgtgttttgagtggcaaacactatatatattactcaagcgatgcaagaagtgttggagcaatattcaataacatatatgagttcactggtttgattgctgatgatcagtacatttcagctgaaaacctttctgaaaaccagaggttgtttgcggatacactggtgaaacaagcatatgatgactggatcaacgttgtcgaatatgatggcaaggaactgttgagattcaagcagaaaaagaaatctgtcacgacaagaagtgatacagcaaaggcttcaactagctacccttcttcatatggttcgacacactcacataaacaattgacaggcggacctgtgaatattgagcaatcatctatgagcagtatgagtgaagatggaactagaaacatgtccaacgggagccaagcagcaagatatgcagccaatcctcaggacatctcacaaagtatcaccatgccatatgacatgagttcattgagacccgaagaacagttcgctggttcttcaatccaaactcaagcttcaagaagctcaaacatgctagccttgggaccaacacagcagcaaaactttgaattctcagcacttggtcagtccatgcagccttctcccctcaatccttttgatgactggtcccggttgcaggagaaccgtggaggcgttgacgactacttgatggaggagatacgggtgaggagccacgagatactagagaacgaagaggacatgcaacaaatgctgcgcatcctgagcatgggtggatcatcagccaacatgaatcatggagatggattctcccccttcatgccgtctcctgcaccagccttcaactacgaggatgaccgggctcgcccgtctggtaaggctgttgttgggtggcttaagattaaggccgctatgcgatggggcatctttgtgaggaagaaagctgccgagagaagagctcagcttgtcgagctggaggactagcctagcggaggtcgtccggagtgttcatcttatggaccatgaggcctggccagtctggacagatggtaacacgcctctcttggctggtcttgtacaatagtagtgttgatatttatgtttactgatgaaagaaatgggctcagcgatgcaccaggccaggatggtccacatgacgagcttattagtatgaaatggacacccgttgtttgtatagctgtttgatggacattatgtaagttttgctagtccgccctgttgtattacatgcaatccttgatccgaactgtgcaaatttatttgttggaggttttgggaacacaagtgataggaggcatgtcgccatcctcttgtcctggaccaaaatggtagtcatagtatacattattgc

SEQ ID NO: 22359 - DNA, 835 bp, Oryza sativa
  ref <308>: DATABASE ACCESSION NUMBER: AK072546
  ref <309>: DATABASE ENTRY DATE: 2001-12-06
gacgtactgagctcgagcttaattagctctagctagctgcagcaatggccatgggggctcgcctctgcagcagcagcattattgttgtggtggtcgtcctgattgtggcgacggcggcggaggcgatgcggtgtccggggacgacgagcgtgtaccggcggccgaagaagaaggcggcggacatggtggacatgccactggacgccgacgtgttcgcggagccggcggggaggaacgcgccgcagcaggtgcacataacgctgggcgaccagacggggacggccatgacggtgtcgtgggtgaccatggaggaggccggcaacagcaccgtcttgtacggcctcgccatggacaagctcgacatggccgccgacgccaccgtcaccacctacacgtactacaattacacctccggcttcatccaccactgcaccccactactaggaaaatgatttgttgccacgaaaaaaatcgtggcaatagatacatattgccaccattttaaaaccgttgctagccgtggcaatagaaacagtagcaataggttattgcaacaatttttatctagtggcaacaaactttgataatgccacaaaataatcgtggcaaaaaaacatattgcaacacttaacatcgttgcaacaaataattattgccacgacttcgtgcgtggcattagttgtgcttgccacaaaatagtttcgttgcaatatctaatatatgttattgccacatagcattaatcgtggcaatatatcatatgggttattgccactaaaatatttttgtggcaataagtattattacaatgaaatgaatttcttctagcttttat

SEQ ID NO: 22360 - DNA, 883 bp, Oryza sativa
  ref <308>: DATABASE ACCESSION NUMBER: AK072547
  ref <309>: DATABASE ENTRY DATE: 2001-12-06
gggtggtggactggtggctgcagctgttcctcatcgccattccaatccaatccaatggcgctcaccaaccacatcctcgcgccggcagccgcagcagcctgctgcttcggacggcgggttcctctgccgccgcctcatcagctcgccgtgcggaggaagcaaaagagcgtggtggtggccatggccgacctgctgggcgactttggcgcgcgcgaccccttcccggaggagatcgagagcaacttcggcgagagggtgctgggcaacgtcgacaccctccacaacatcctcatccccacgctctccgtgctctccatcgcgcgcctccccctcgagcctaaccccgcgcccgtcgacgctgccgacgcccgccgcctcctccacaaggtggttggctggcgcctcctcgacgacgccgacggcatgcgtctgcagtgcgtctggaaggtcagggacgaagcctgcggccacgagctcgtcgccaggatcaacgccgcggttgacggcgccccggccaccgtcgtcttcgaggcccccaaccaggtcagggccgagctgcagacgccctccgccggcggcctcaccgtcaatgacttcatcgtcgcggctcgcatagacaaggtcaagacggtcgaccttatccccaagaagagagtctgggcctgattcttcattcacatatatccccttaatcaatcaatcaaccaatcaatcaattagtagtatcttttttttggctttcaatcgcttgtggagtagtacactactacggagtagttgttgttttgaatttataaaatatttagtagtctttcaaagcaaaggcaccggcagaatttgtgcccaaaaccaaaaaacaaataaaaagggatgatatgatatt

SEQ ID NO: 22361 - DNA, 1252 bp, Oryza sativa
  ref <308>: DATABASE ACCESSION NUMBER: AK072548
  ref <309>: DATABASE ENTRY DATE: 2001-12-06
gttatcccactcgccaatctcgattccctcctccgctctacctcgccggagttcaccctggtcagtggctccgccgccgcattcctcgtcttcttggtggggattttttttcctcttggagcgagtggtgagtgaggcggttctttggtgttcttctttttgttgcctcctgcagtgtgggactgggagcggcggcggcgtcggaggcaatggacgcttcgtcggtggcgctctacggccagctcaaggctgctcaaccattcttcttgttagctgggcctaatgtgattgaatcagaggagcatgtcctgaagatggcaaaacacatcaaaggcatcacaaccaagcttggtctgccacttgtgttcaagtccagctttgataaagcaaatcgtacatcatcaaaatccttccgtggtcctggtctggaggaaggcctgaagatacttgaaaaagtgaaagcaacatatgacattccagtggtcactgatgtgcatgaaagccaccagtgtgaagccgttggaagagtggccgacatcatacaaattccagctttcctctgtcgccagactgatcttctagtggctgctgccaagactggaaaaattatcaacatcaagaaaggacaattctgtgctccttctgttatggccaactctgcagagaaaatcagacttgctggaaatcaaaatgttatggtctgtgagcgtggcaccatgtttggctacaatgatctaattgttgatccaaggaattttgagtggctgagagaagctaattgtccagttgtagctgatgtaacgcatgctctacaacagcctgctggaaaaaagcttgatggtggaggtgttgcaagtgggggcttacgagaactaataccatgcatcgcaaggacttctgttgctgtcggagttgatggtattttcatggaggtacatgatgatcccttgaacgcaccttgtgatggcccaactcaatggccactgcgcaatttggaggagctattagaggagctgattgcaattgctcgagtcaccaagggaaagaagccactcaagatcgatctcaccctcttcaaagaataatctggtccagttggtaggaaataatgggcacacttgcttggttgatagttttgaccagcatatatttacctgtttggatgaattgctcgttgtatgtcttacattcgtttatcggtgactgttgtctgtattgtactgcctatacaataaagatcattgttttaccc

SEQ ID NO: 22362 - DNA, 1376 bp, Oryza sativa
  ref <308>: DATABASE ACCESSION NUMBER: AK072549
  ref <309>: DATABASE ENTRY DATE: 2001-12-06
ggaccgtgcctgccttccccctaccacatcaccgccgcggcgtccacccgaatcccccctcccacaagacgaccgaagaaaaacgggcaatcgccaaatccccgtgaaaccccaaagcggccgcaccgcgggccgagccgccgaggcgatggagcttgcgacgcacgacctcgcggcgctgggcgcggccgacctcgtccgcgtctccgcctcgatcccgcgcgcggcgccgcgcaccttcgcgctgctcaccgcgggcctcgtcttcccgctctccgccgcggtgctcgtccactccctcttcacccaccccatcatcctccgcctccagggcgccaacggcgactactcctcctccgactccgcccagtggctcaagctcttcgcgtaccagttcctctacctcatcctcctcttcaccctctccctcctctccaccgccgccgccgtcttcaccgtcgcctcgctctacgccgccaagccggcatccatcgcctcctcgctcgccgcgctgccgcccatcctcccgcgcctcctccgcaccttcctctgggtctcgctcctcatgctcgcctaccacctcgtcttcgccctcaccgtcctcctcctcctcctgctcttcgccccatcttcctccccgccctccctccccttcgtcctcatccttgtcgtcgtcgtgttcgtcttcctcgcgatccatgtctacatctccgcattgtggcacctcgccagcgtcatctccgtgctcgagccgctctgcggtctcgccgccatgacaaaaagcaagcaactgcttcaagggcgcacccgcacggccggcgtgctcgtcgtctcctacttcgccgcctgcggcgttaccgctgtgctgttccgcgcggccgtagtcaagggccgcggcgaggaggggagccttggcctgagcttgcccggtcgggtgcttgctggtgctgtgctggtgtctgttcttgtctgcgtcaatttgctggggctactcgtgcagagcgtgttttactacgcttgcaaggccttccacaaccagcagattgatcgaagcgcattgtatgagcatctcggagggtaccttggtgaatacgtgcctctcaagagcaatattcagatggagaaccttgatgcataaagggtaagaactgctggatcttgctctaaagaagagagtaggatttgttttgtgctcttctatctagttcactatgatgctttgtaatctgtaagtagtaataatatggaatggtctatgcaatggaacagagatgcataaggaaaattctctttcttttgcattattgtgtctctgtttacattattttcctgtcattcatgactaatttatgatatacgggtttcttttcctcttc

SEQ ID NO: 22363 - DNA, 1137 bp, Oryza sativa
  ref <308>: DATABASE ACCESSION NUMBER: AK072550
  ref <309>: DATABASE ENTRY DATE: 2001-12-06
gtcctataggaggaggcaaatccaaacgaaggagagagagagagctcatcgccatcgccatgggaggaggcgtcatgcgcaccgcggccgcgaaggtcggaatcgccgggggcgcggccgtcgcggcggcggcggcgggcgggggcaggttccgccacgtggcgccggcgttcgccacggccgcctccgcggaggccgccgcgccgacgctggtgtccgcggcgggcggcggcggcggtgacgaggtccccgcggtggcggcgtcgggggcgcagcgggcgtcgtcgtgggaggtggacgactgggagttcgcgggctggagggacggggcggcggcggagcccgaggtgacgacggccgggaagccgaggctggtgttcgcgccgccgtcgcgggaggaggccgaggaggccaccaccgagctcagggacgccatagacagggtttatttttctgaggctcccatagaagttgtgaaagaacaggataaagatcttagcaagctgggagccgatgcaataattcctgctatgccaggacatgtgatgcaagcttttaccttgttgaaatcaagcccagaggcacggggtgttgttgcatctcttgcctctgataaaaatgtctgggacgcagtgttgaaaaatgagaaggtcatggaattttacaagacgcaccagcaaagtctggtttatactttccctgagggcactgcctcggtagtttcacctgagaagcttgcagacgcctcctcagagaattcatcctccggggagaagcctgagagctccccttttgcagacttcatggataatgcaaggaagacggtgatcgacattgtgaacgatataaccaactttttccaagatatgttccgcaaacccaatgaagccgagattcttggtggatcattcatggctctggccatagcagtcatcctgttaattatgtttaagaaggcgtgagattttggttcgacctcccttgggaatgattgtgctttaaattcgtcgaaaataactggcatcgtattattaagtactactacaatgtaatactatatagctgtgtctactgcgtccttgaatatatttgaggacacaggacagtacaataaagacatcgttttatctaatatct

SEQ ID NO: 22364 - DNA, 1008 bp, Oryza sativa
  ref <308>: DATABASE ACCESSION NUMBER: AK072551
  ref <309>: DATABASE ENTRY DATE: 2001-12-06
gcctctctctcgcaccctcttattggcggaggaggaggagggatggtgcgggaggttgcggagagctgtgtcgacggggtggtgatggagatggtggcggcctactgcggccgcttctacgccgccaagccggagctcgccgcccgccgcatcgaggccatcggcttccaggtcggccaccagctcacggagagatataccatggagcgccctcgatttagtgatcatcttgaagcaatcaaatttatctgcaaagacttttggtcagagctattcaagaagcagattgacaatcttaaaactaatcataggggaacatttgttcttcaagataaccgtttccggtggcttactcgtgtttctatagatccatctgtagagagcatggatgcaactgacaatgactctgcaacactaggggatagcgcagcccaaacaacaagcatgcttctgtactttccatgcgggataataagaggtgccttgaccaatttgggtatttcgtgttctgtcactgcagacatgtccaaccttccagcatgttcttttgttgtgcgcataaaaacatgagctgcagattttatgcctgcttgttcgatcaagcggtttgaacattaaagagtgcaagcacgcaatagcctgggaaatacgccttgtagctgctcctttttctttctctttgttcttagaggcacctctttacttactgacttcatcataccttcctttgtgcacatcttaagattgggtgtaattttgtgattcgtgtgaacaagagaagacaaaatgtaatatttctcctgagatactggctagagccatgtaattttgttgtctagcagtggagaatgttttatcttgtatgtgatgcccgcgcacagtcacgatttacctgtttttatggtttcatttttatggtttcatcgatttaccctgtttaggggtgtttggtttgtaacttggacgttgtggaaacaatagatcatagctgatagttttgttgtttgt

SEQ ID NO: 22365 - DNA, 2568 bp, Oryza sativa
  ref <308>: DATABASE ACCESSION NUMBER: AK072552
  ref <309>: DATABASE ENTRY DATE: 2001-12-06
gacctccgccgccgccgccgtcgcggcggccgcccgcgcctcgccgacgtcggcggcggcgctcgcgctcttcaagtcggtgctgtccgcggacaaggcgctctcgccgctcgccgtgctcccgcacctcgacggcgcgccgtcctcgctgcccaacctcctgctcaccgcctccgccgccgtgcgcccccacgccacctccctccgcctctactcgcggatgaagtccctatccctccccatctcgaccgcctcgctccacccgctcctctccgccctcccctccgccccgaccttcgccctcttcgccgacatgttccgcctccgcctcccgctctgcaccaccaccttcaacatcatgctccgccacctctgctccggcgggaagcccgcccgcgcgctcgagctcctccgccagatgccccgcccgaacgccgtcacctacaacaccgtcatcgccgggttctgctcccggggccgcgtccaggcggcgctggatattatgcgggagatgcgagaacgcggaggaatcgcgccccaccagtacacctacggcacggtgatctctggctggtgtaaggttggccgggtcgatgaggcagtgaaggtgttcgacgaaatgctgaccaagggagaggttaaaccggaagctgtgatgtacaacgccttgattggtggatactgtgaccagggtaagctggatactgcgctcctttaccgtgatagaatggtggagagaggggtcgcaatgacagtcgcgacctacaatttactcgtgcacgccttgttcatggatgggcgtggaacagaggcatatgagttggtcgaggagatgggtggaaagggtcttgcgccggatgtgttcacgtacaatatattgataaacgggcattgcaaagagggcaacgtgaagaaagcactagagatttttgagaatatgtccaggagaggggtccgtgcgacagtagtgacctatacggcattgatatatgccttgtctaagaaggggcaagttcaggggacagataagctgtttgatgaggctgtaaggagaggcattaggcctgaccttgtcttgtacaatgctctgatcaatagtcactccacttctggcaacatcgatcgagctttcgagataatgggtgagatggagaagaaaaggatcgcaccagatgatgtgacctacaatacgctaatgagggggctgtgtctactgggacgtgttgatgaagcgcgcaagctcattgatgagatgacagagaggggaatccagccagaccttgtcacttataacacgctgatcagtggctacagcatgaagggtgatgtcaaggatgctctgaggattcggaatgagatgatgaataaggggttcaatccaacgcttttgacatataatgcgctgatacaggggctctgtaagaatggccagggagatgacgctgagaacatggtgaaggagatggtggagaatggcatcacccctgatgacagcacatacatctcactgattgagggtcttaccactgaagacgagcgtgccattgatgatgagcgactggctgcagcagatgctgcgaaagtatgagccatctattaagcagagaggcattttgggcagatagagcagatcagttcaaatacttcatgccttcaaaaaaggaggaaaatcaaatgcttgaacgacttgctcaacctctgccatgtgtgcaatatcatgttaaattgcctggccattttctgactggagtgcaacataatcattttgaagcctggcgtatctggcgatgaggatcaggtggcactcacattttgtctccccgttgttcttgcccaagttgtagacgtccatcttttctcagttcatctgtggacgtatgcctgtaattttgacaagaaggaaacacatgctgttttgaagattcccgacaacaaacattccaatctagaactctcaagattcggcttggctatatcagaactcactctgtttatttggttttctcattgtcatactatctttattaatctgataacaataagattagacagcttgtgacttgtcactaacggctaaggctaagcataacgcatcttaatgatctgtcctgcccagcaaagtggagactggataaagttaatcaccctggccagcttacttgtcattgacagcatcacagtgtctgcactttgtgtggtcctggtttccattactactgcaagtatcatctgaagaggtagcactgaagatcatttttattgcatagagtaaagagggcctttgttggcatgtgcttagttacttcctgaggtgcttttcatcattgtcgattttgatgtttcattgtcatactctatgttggtaattatttatgtatcatgatgcatatcatcactgattcactgtcacagtgaaccacagagcgataggtttatctagcttgtccttttctttgtaagagtgcagagtgtttggtcattgaaactgtacagcagagaccgttctgttccaaaaccataacaatgttcctcttgttaatttatactattggttagtcgtttggagcc

SEQ ID NO: 22366 - DNA, 754 bp, Oryza sativa
  ref <308>: DATABASE ACCESSION NUMBER: AK099284
  ref <309>: DATABASE ENTRY DATE: 2002-08-28
gcattattgattcttgcaaggaggaagagcagctagaggcgaggcaagaaaagaagtgaaatctctccgttagacaggaagaggaaaagcaagggggaattggggatggcgtcaaagaggatacagaaggagctcaaggatctgcagaaggatccccctacatcatgcagtgcaggtcctgttggtgaagacatgttccactggcaggcaacgataatgggtccatctgatagcccatatgctggtggagttttcctagttaccatccacttccctcctgattatcccttcaaaccacccaaggtggcgtttcgcaccaaggttttccatccaaacatcaacagcaacgggagcatttgccttgacatccttaaggaccaatggagcccagcactaaccatttccaaggtgttgctgtcaatctgttccctgctgactgatccgaaccctgatgatcctctggtccctgagatcgcccacatgtacaagacagataggcacaagtacgagaacacagcaaggacctggactcagaggtacgccatgtagcacctcagatatcgatggacatgtcgatgttgtaacaacattatcaacgggtgtgtctccctctcgccttgtgtggtgtaaggatcaaaaccggctttgcagtgcactcttggtgttgctccattgtgtcactcactcattgcagtgatttcgaatagtatcaaactggtggtttttttcggtcagataatgtttgcaacttgcc

SEQ ID NO: 22367 - DNA, 1448 bp, Oryza sativa
  ref <308>: DATABASE ACCESSION NUMBER: AK072553
  ref <309>: DATABASE ENTRY DATE: 2001-12-06
gtctgaaaccacttccgccctaaggtagttgggtcaagtaggcggcgctggtcgagctccggcgagccgccggcgaggtcgccgcccaagaattcctctcgacacctctgcttctggcgaacggtgagtctccggtaaacggaagcgatcgaagaagtgggggggagggggggagtcgccgcgtggttgctttgtcgcctcccccgccggtggggatcccttggcgctctcgagccacagccatggcgctgcacgcgacgtcctcgcgcgactccgtgcgcgcggcggcggaaggagagccggaatgggcgggcgacgcgtcgcggcggccggccgcgttctacagcgcggtgttcgcgcagatcgaagaggtcgggtgggagcggctggtgagcggcaagggcgacggcggcgtgtcgtgcctggtcttccgcatcctggatgatcagggacgaaaccatttactggagatcacgctgcccatgaactacccttcaagtcctccttgccttgtggcagatgttccttatctaccagaattacagtggtcaaaaggctcaagactaaaagatgttgtctgccagttccaagagcacctgaagatattgcaagattactggtctataatggatgacattgataaggtcctttgggttgttgatccaacaaagccaacctttgctatgtctcatcgccgtatagctttaggtgatgattgctatcttttactacatgttaatgtgcgaaagcccagatcattaccagaggttcgcttcctgggaacagatgggaaactggacagactgataactaattggagaaaatattgcaaaaagtggagtgcagacaagaaattccatgaaaacctgtcaactgtcttggatttcgctttgcctccaccaccttcagtcaacatcgaagatgacgagcaagttgattgtggaatatgttatgccaagcatctgccaattgatgatgaacttgggactcacagcgggggcacgacagattacacatgtgaaaacccgagctgcagcagagctttccattctgtctgcctgagagactggttacgcgcgattactacaacaaggcagtcgttcgacgttctgtttgggaactgcccctactgcagcgaccctgttgccgtgaagatcaccgaccgctaaaacagtcttcagaggcagatttcagctgattctaaccactcgtgagaccattactaactagtcagttgccatgtacagtgttatgtttcagttttctcaaagaaagctctagagcgcaacgtggaatgatgctctcatcagtttttttttcattcagaaaatgatgatttagcatatagtcgagtctcgagacatcatcgatggagcggcatgaggtcttcgccgtccgcttctagagagatgagaatcaaattgtcctggtgaccgagtcagttaatc

SEQ ID NO: 22368 - DNA, 2050 bp, Oryza sativa
  ref <308>: DATABASE ACCESSION NUMBER: AK072554
  ref <309>: DATABASE ENTRY DATE: 2001-12-06
gatatcgcgtaaaagaaaaaagaaatctccccgtctccttctccttgcctcctccgctccttctcgcgccgccgccgccaagacgagtcgcgtcgcggctgaacaggggagggccgggcggcgatctccatctggcgagcagcggaggggagggatcctgatcctggattttgggcaaaggtgggggtgaatttgcacgagggttttggttgatggcgaacattcgggctcttctcatcgggttggtacgtgccaggggttccttggtggacattgggcgatgcgtttcttcttcaaggccttcatatctagcgtcactgggcagacattacaaggttcccatggaaattcgttggttatcctcaacagggtttcctcctcatctggtggttgggatgcctgcattatcccctactatgaatcaaggtaacattgcaaaatggagaaaacaagaaggtgaaaagatagaagttggtgatgtgatctgtgagatagaaactgacaaagctacgcttgagtttgagagccttgaagaggggtatctggccaagatcttagcacctgaaggttcaaaagatgttcaggttggacagcccattgctgtcacggttgaagatcttgaggatattaaaaatatacctgctgatgcttcctttggaggtgaacagaaagagcagtcaattgcaagtgaagcacaaaaggttgaaacggatgctgcaaaagagagctcgataataacccgtataagcccggcagcaaaattgcttatcaaggagcatcgtctagatcagtctgtactgaatgcatcgggtccccgtggcactcttctgaaaggggacgttcttgctgcattgaagttgggtgcctcctcaagttcaaccaagcaaaagaatgctccagctgcaccatcatctcagccaactcatgatttccaagctcaatcagtcaccattccacaacaaaatgatgcatacgaagatatccccaacagtcagatacgcaaggtgattgcaaaaaggttgcttgaatcaaagcagaccactccacatttatatttatcacaagatgttatactggatcccttgctcgctttcaggaatgaactgaaagagcaacatggggttaaagtttcagtaaatgacattgtcataaaggctgttgcacttgccttacggaatgtaccagaagcaaatgcatactggaacaatgacaaggaacaagcccagaagtgtgtttcagttgatatatctatcgcagttgctacagagaagggcctgatgactcctattataagaaatgcagatcaaaagactatatcagcaatatcctcagaggttaagcagttggctgaaaaggcacgtgctgggaagcttgctcctaatgaatttcagggagggactttcagcatctcaaatttgggaatgtacccagtcgaccacttctgtgcaatcatcaatcctcctcagtctggaattcttgctgttgggcgtggtaataagattatcgagcctgtggtggacagtgatggaaccgagaaggctacagtggttacaaaaatgagcttgacattgtccgctgaccatcgtgtatttgatggtcaagtaggaggcaagtttttcacagagttgtcacagaattttggtgacattaggagactgctattgtaaatgaaagttagtactaatcgtgcttccaaatattctgttggaaaaaggttggccaagaaaaatctttcccatgcagctcggagcttggttgcttcacctccagcacgtacaaaagtaaccaattattttttatttttttaataaggttaaatctgcatttccaagttttttttcttaattaataatactgggattaatgccccaagaattttgcagatacagtgccatttcgtctttatgtggctgtgcaacatttaatcctttattagatcccgttgtttcatgagtatttctagctgacggagctcgctcaacattttttttcaatgatttctgatacacattgcagcaataagaaaatgctatatttttgaagcatcacc

SEQ ID NO: 22369 - DNA, 1320 bp, Oryza sativa
  ref <308>: DATABASE ACCESSION NUMBER: AK072555
  ref <309>: DATABASE ENTRY DATE: 2001-12-06
gaccctcttcttccccaaaatccttttctatttcttctctttctctctttttttcacggccctgcaggtgagccggccggcgagctcgccccggtcgtcgtcaccgaggtggatcatgcctgcgagccctcgagctcttgccgccactgtcgggctcgagctcgacaaggtagccgtcgggagctcgacggagaagaaggcagccgtagtcacggcctggctcagtctcccttcccgccgccccacgcccttgccggagccattcctccatcgccgccgaagagaggggcaccaccggggagaaccacgcctcactgacggccagatccgccggtctcgcttctcgctggtcgtcggcaccggatccgcgccgcgacgcctcgccaccggagtgatggatgtcgagctccgcctagttgccaacgttggatctggccttctcgccagttgtcggcgccgcatccaaccttactgccggatccgcgacgcgacacctcgctggcggcgtggtggcagggagaagggcggcgacagcactggcgggagcagcagcaacagcagcagcgaggaggatgaacgcgatgtggcagcgcataggatgagtgacatgaaccagtgcgcatgccacaggaaggtgaggacattgatgcgatgcccatcgtccgtgccttcgattcgatgagcgtctccgatgacccgaagcacgtcggcgtcgggaagccggatgtggatgtgccgaacgacccaatgtcggtgtcgggaccgtcgtggctggcaaggtgcagctggtgatgcagtccatcggcaccgtgatcccaggcgtcggcggcagcttgcaatcatagggcgccgcgcaggacacggacgcctccaccacccttgccttcggcgagccgacgattgggcagtagcaggacaagggggtgacgatctctggtgtggtgaagcggcggaaggaggacgtggcgcagggcgtgccgacggtggcggcggcgccgggcgacatgatggcgaaggtccgggaggcgtccgcgagtgctgaccaaggcgtgggaggccgtcttgtcgctcactggcgagaaccgcgtctccggagggaaagggaaaggggagagggaaggtggtgaggaggaggagggagagagtagagccgatggcgagcaggtgaagccagcggcggtcaacagcagtagtggagggttggatcaggtgtgtaggggcttaagtgcaaatatggggccacgctgtacagccacgtaggacggtcaatcctgtcaaatgtgctttggaccgcaatgattcatttaaacaagttcatgg

SEQ ID NO: 22370 - DNA, 1107 bp, Oryza sativa
  ref <308>: DATABASE ACCESSION NUMBER: AK072556
  ref <309>: DATABASE ENTRY DATE: 2001-12-06
gttagagcgacacaagctaaggttgcttatattggacctccaactgacttcaactatgaccatgagcatcttggcactggaccacaaacccttgttgagattgcagagggtcggcatcccttctgttcaactctgcagtctgctaagaatcctgtcatcattgctggggccgggttatttgaccgggaagaccaagatgcccttttctcaacgatagagactgtagccaaaaaattcaatgtggttagaccagactggaacgggcttaatgttctattgctgcatgctgcacaagctgcagcgcttgatcttggtcttgttgctaatcctacagagagcatcaagtccacaaagtttctgtatctgatgggagctgatgatgtagacttggacaaggttccggatgatgcatttgttgtttaccagggacaccatggtgacaaggctgtgtatagggccaatgttatcctgccatcatcagcattcagcgagaaagaaggcacctatgagaacaccgagggatgcactcagtggacaatcccagctgttcctactgttggtgatgctagggatgactggaagatcctccgtgctctctctgaggtggctggggctcaacttccttatgatagcctctcaggtgtgagggaccggattagcatggtagcaccaaaccttgtgcatgtagatgagagggagccgtgcactatttcctctgaagtgaagcctccggtaaagcaacaagtgagctctactccattcaaaactgttgtggagaacttctatatgactgatgcaatcacaagagcctcaaagataatggcccaatgcagtgcaaccttgttgaagaagtgaaatctacacctttcggaagctattcatcggcagaaaagattttagttccttgtttttgctccaaatttccccagttgttgcatgcttggttggaaattggagtataatttggactgcccttagatttgaagagcagcaaaacttggtctgtgaatttttcttgtgtatgagaagcagagcatactcaataagcttgttgtccttctgaatcatgcaacagccacaggcaataattttgttcctttttagttc

SEQ ID NO: 22371 - DNA, 1742 bp, Oryza sativa
  ref <308>: DATABASE ACCESSION NUMBER: AK072557
  ref <309>: DATABASE ENTRY DATE: 2001-12-06
tgggtagaggagaggggattcagtgaggaagggagagagagatagatccctggaggtttgcaggaggggatggaacagctgtgggtgccatcgcttccgattcttggaggaaggatattgcctatgctcaggcactactgtggctttggaagtcatcatcccttaacctggagaagcttacaaattactggaagaaaacagaagcataatgggtgttggattgcatactgcttaccaagccataatggaacttctatttcagacacaaatggtgttcgaaaagacttagctttgcctgacaatttgcttcgtgatgctcatattctctattgtacatctcctgccatgggtcataacaaggaagcgcatccagaaactaacaaaagagttcctgcaatagttgatgctctcgaaaaactggagcttacttcgaagcatcgtggttcacaggttcttgaaattcaagatttccaacctgcttcacttgatgatattgcactagttcattcaagatcatacataactggacttgaaaaggctatgagtagggcttcagatgaaggtttgatattcattgaaggaactggacctacatatgctacccagactactttccaagaatgtctcctttctgctggtgctggaattacattggttgattcagtggttgcagcatcaaagttgggcccgaagccaccgctcggctttgccttagtaaggccaccaggacatcatgctgttcctgaaggtcccatgggcttctgtgtctttgggaacattgcagtggcagctcggtatgctcagaatcaacatggtttaaagcgggtcatgataatagattttgatgttcaccacggtaacggcacatgtgacgccttttatgaggatccggacatattcttcctctcaactcatcagcttggaagctatcctggcaccggtaagatccaccaagttggccagggcaacggcgagggcacgacgctcaacctgccactacccggtggctcaggcgattacgcgatgaggtgcgcgtttgatgaggttattgccccagctgcccagcggttcaaacctgacatcatcctcgtttcagccgggtacgacgcgcacgcgctggacccgctggcggggctgcagttcacgacggggacgttctacatgctggcggcgaggatccgggaggtggcggcggagctgtgcggcgggcggtgcgtcttcttcctggagggcggctacaacctggagtcgctgtccagctcagtggccgacaccttccgtgcgttcctcggcgagcccagcctcgccgcgcggttcgacgacccggcgatgctctacgaggagcccacgcggaagatcagggaggccatcgacaaggccaagcacctccactcgctctaagcgcggcgcccagaagattgcaacagtatctatacttggctgctgaaactgcttgctgatgctggtcaacaactcaagatcatattcatgtcttgttagcttttgcactttccagtgtagcattgtacatcggaaaagcacggcatagtcatttacatcttagttgctgtgaatcagatacattcgatcgcaagcttgtcaatagttcaataccagttgtgtagattaataccagtactactgcgattacttgcatctttctactccagttagtgtccagtggaacctgtcgagctatcagcattttgttttataatacaaaagctgacatttttttcccc

SEQ ID NO: 22372 - DNA, 916 bp, Oryza sativa
  ref <308>: DATABASE ACCESSION NUMBER: AK072558
  ref <309>: DATABASE ENTRY DATE: 2001-12-06
gaccctccctctcaccattgcaaagccactagagatcgagaagaagaagaggaggaggcgagctccgtttggtgcgaggcgccgccgcgcgctgcgggcctctcctcctccccgcgcgctccactccaccatgcttccgagccggcagagaagcatcttccatctcggggaggagggtggcggcgccgccgacgccgagcacctcggcgctgaccacggcgacggccatggcgatcacggtatcatcagtatccaccagcagcgccttcgtgtcgtcgggctgcagatcgtcctcgcccagacgaggcaccaccaccgccagcagcacggccatgtcgtcctcaagcagatgcagatggtgtccccgccgccggcggcgcgtcaccggcggcggcggcgtccttgcggtgacttcttgagcgcgtgctccctgtgcaggctggagctcggccccgacaaggacgtgtacatgtacaggggtgaacaggggttctgcagcgaggagtgcaggtggcagcagatcatgacggacgaggcgagggagcgggacgccatggccaagaaggagcggctaggcctgcatcatcggacgccgcggccgccgccggcggcgatccgcggcggctcgccgaggagactactcgccgtagcctagcacgagcgaagtacagtatgctatacttgatgagaccgtgacccatgcttggatgatatatgatcaaaagaaaattttctactgtactctctgtaaaatatggagaaatcgatgtaattaagaaaaacttgataaggaggaaggagagagagagagagagagagccaggttttgagtaatttgaggcaaatttgaggaaacgtatacgcataactgcatgcagtttcatatttcaaatgaacacgaaatgtttggtggggg

SEQ ID NO: 22373 - DNA, 1274 bp, Oryza sativa
  ref <308>: DATABASE ACCESSION NUMBER: AK072559
  ref <309>: DATABASE ENTRY DATE: 2001-12-06
gcgggtctcctctcctcccccgccgacgcgcactcgatcccccccgcctccgcctccgcctccgcctccgcgtcgcccatctcgagatcccccgcatggcgacgctcaccgtcccctccgccgtcccgcccgtcgccgacgactgcgaccagctccgcaaggccttccaagggtggggcacgaacgaggcgctcatcatctccatcctggcccaccgcgacgcggcgcagcggcgcgccatccgccgcgcctacgccgacacctacggcgaggagctcctccgcagcatcaccgacgagatctccggcgacttcgagagggccgtgatcctgtggacgctggacccggcggagcgcgacgcggtgctcgccaacgaggtcgcgaggaagtggtacccagggagcgggagccgcgtgctggtcgagatcgcgtgcgcgcgcggccccgcgcagctgttcgcggtcaggcaggcctaccacgagcgcttcaagcgctcgctcgaggaggacgtcgcggcgcacgccactggtgacttccgcaagctcttggtgccacttataagtgcttaccgctatgaggggccggaagtcaacacaaagttggcacattcagaagccaaaattctgcatgagaagatccagcataaggcatatggtgatgatgagatcatcagaattctcactactaggagcaaggctcagttgattgcgacattcaatcgttacaatgatgaatatggtcacccaatcaacaaggatctcaaggctgatcccaaggacgagttcctttccacgctgcgtgcaatcatccgctgcttctgttgccctgacaggtacttcgagaaagtcatcaggttggccatcgcaggcatgggaacagacgagaactccctcactaggatcattaccactcgtgccgaggtggatctgaagctgatcacggaggcgtaccagaagaggaacagtgtcccgctggagcgtgcggtcgcaggggacacctccggggactacgagaggatgcttcttgctcttctgggtcaggagcagtgagccatgcctatcttgcccagtcacacacttcatgtgatcatgtcatatcagagaataaacctgttatgcaggggacacagccgtggtgattatgatgttgtttttccagtgtacggtactgtttgctgcagcttgcataacagtgacgatgaaataaatcatagtggaatgcgttggctcatgggacctcacttattttgcaactttttgacaggtcttatttcc

SEQ ID NO: 22374 - DNA, 1512 bp, Oryza sativa
  ref <308>: DATABASE ACCESSION NUMBER: AK072560
  ref <309>: DATABASE ENTRY DATE: 2001-12-06
gggcggcggcgcgggcgcgcgcgcgcgagacgacgacgacgtcgtgcgcactgcgcagcgcagagggggggttttgccgagattttcctaaaaaggggacctcgccaccgtaccgagaaaagaaaaagaatacgaggcgaaaaccaacacctctctctcgtctctccccctccccgactcgactcgactcgactccacccccgtcctccccctcgtcccgtcccttctttggtttcctcctccccaatccgaggggtggctggggccgccgccgccgccgccgccatcgccatggacgggctgcacggtacggacggctgcttctctcccgggcgggccatgtcgccgcaggtcaggccccccgtcccgcccgacgctgccagcggcgggcagtacttggcggagttgttgcaggagcatcagaagctggggccgttcatgcaggtgctcccaatctgcagcaggctgttgaatcaagagataatgcgagtgtctgggatgtttcggcaacccggcgtaggggacttcgagaggtcgcaacctgcaagcccaaatcagatgcatccgtcgcacatcgtgcccaatttctgtggtaatgcttttggtccatggaatgggatgcgtccagagagagtaagtttctctcaaggaccaggttggcaaggagcaccacaaagtccctcttcttacattgtcaagaagatcttgcggttggaaataccgacagatgcttaccctaatttcaattttattggtcgccttcttggaccaaggggaaattcgttgaagaggattgaggcctctacaggttgtcgtgttttcataagaggaaagggctcaattaaagaccctaacaaggaggagcaacttaagggaagggctgggtatgaacacttggatgatcccctgcatatcttgattgaagccgagttacctgccaatgtcattgacgctagactcgcaaaagcacaagaaatcctagaagagttgttgaaaccagtggatgaatcgcaagattactacaagagacagcaactccgagaacttgctttgttgaactcaccacttagagaggaaagcccacatcctggtagtgcttctccattcagtaatggtggcatgaaacggatgaaacaatgactggatgcttgttcctcctcctccttgaccctccaagagaaatcaatcaatccatgccttcacaacttaaatttttcatgagcaaagctttcatgatggtgttggcattcgcgcggcaatctgttactgctagaattttgatctccatgtgacattttaactcataactgacagatgatggatgagtagcgaggcgaaatcctcccctatggttgtataattagaacatttgatttatttattactggtagtgctgagatactgatagtgtgaagaattcttagttactgtgagctagagtaccagggatttgtctgccttgggtgacttgtctgagcaacatgtttgcaagctgctatcgaagcatttgtc

SEQ ID NO: 22375 - DNA, 3521 bp, Oryza sativa
  ref <308>: DATABASE ACCESSION NUMBER: AK072561
  ref <309>: DATABASE ENTRY DATE: 2001-12-06
gtccgtcgtctcgtctcgtctcctccgccgccgcgattcatccgacaccaccggcggcatctccggcgagcggcagcgccgaacacccccaaccccaccgagttctttacggctggtgtctcccctcccatcctcgctaccgcgtcgccggcgcacggggagggtgggggcgtggcggcgaagagattcctgggatctcaggggatagtggactatggggtcggtggatctgatcgccgcctgcctcgactccatccgccagattggagatgagattgcagatgcactagtgtaccttgatgcaggcactctggaggcgtttcagtttattggagctttccccttgcttcttgagcttggtgctcgtgcaatttgcagcttggagaatgcatctccgcttgatgctgctgctgaatggcactcaagttttgcacatccagcaaggaagatagtagtgattacatcacgcctgcttagtgatgcacatcggtatattttgcgctgcctgggaaaccatggaactatttcacattgtactgtgttgacagctatttccgaggttggtcactcagcatatgttgattccccatttggaccagatgccttccgggagtatgagacattacttactcaggaccatgaggaacttctgaagaagtatgaaaagtcagatgagcacaaagataccactttttacacaggaaaagatttcacatcggatggtggtagatactccaattgggaatctggggtgcattatggctctaattctgaatctagcccaacaaaaaaggatttgtttgctgatgagtcaagccagctagaaactaaaggaaaaagattatctgtaactgtgactcactttccgatgattttctctcctatttcctctaggacttttgttttgccatctgaaggcacaatggctgaatcatgtttatcaaaccatcatgaagattcccttagtccagggctacctcccatatctactggtagatcttttgatggtgatgagactccccccggagtgacattgactgcccagttcctttaccatctggccagtaagatggacctaaagctcgatatattttcacttggagatacatcaaaggtcatcgggaagctgatgatggatatgtcaagtctatatgatgttggtcgtaataagagatctgctggcctgctgatcgtagatcgtacacttgatctccttactccttgtttccacggtgactcatttcttgataggatgctgtcctccttgacacgcaaggaagggacttcatcctattttgtgtccaaaaatccacaaactccaagcaagcattctgaagctactgttaaacgtatcccactagatataaaggtcccttttgaaaaggtcttcagcaaggaagaacctaagagtagggccagtatgttacccgaaagtatcatgtcatttgtgtctggatggaactctgctgaagttgaatctgaagtaacctggctacctgattacgcggataaagctcatgatgacaaactcagcagtcaacatggtagtttaaatggttcattcctatccaattatgctggagtgtgctacttggaatcattactcgacagaggagcaaaagatgggttaatgttgattaagaaatggcttatggaagctttacaacatgagaagttatccttcccatccaaaggtcggcaaggagctgcctctgtttcagagcttcattctatggttcaaatgctctctcgagaccagttatccttagtaagaaacagaggggttatccaattggcactgggctgctgaaatggctctccaggagcctcaaagttctcgctgggatgcctttacaagtgcagagagaatattaagtgtaacatctgcagagacaactcaaagtcttgccagtgagcttcgtgattttatcaacactagcacttcagttgaatctcacaagcaagctaataaaactgagtcctctcagggccttctaagtttccaggatgttttgcttctaacaattatcgggtatatcttggctggtgaaaattttcctacatcgattgctggtggtccattctcttgggaagacgagcggtctttgaaagatattgtggtggactctatccttgacaggccatcatctgtgaagctcagatttcttgttggcttggagaatgagcttgaagctaaagctagacctaaagatggtgacaaaagtaatgactccatcgaagcttctaagagtactgatgattttgatgaccaatgggatagctggggtgatgatgatgataatactgatgatcagaaggatgaagcttatggggacatgcaacttaagttggaagtacgagacagagttgaccagctttttaagttctttcacaatttgtccagtatgaggttaaggaaccaaactcttggagaaggcctagcagcactgagcagatttgagactgacatatactcaagaaaaggcttgctctataagttgctattagctgtcttggcaaggtatgacattcctggccttgaatatcactcatcagctgttggacgtttatttaaaagtggactggggaggtttgggctaggacagtctaaaccaagctttggcgaccaaagcattctcatcgtttttgttgtgggaggcatcaatgcccttgaggtccgggaagtcatgaaggcaatatcagacagcagcagacctgatgtggagcttattcttgggggaacaacccttcttaccccagatgacatgtttgagttgatgttgggctcatccagctttagttagtctcaagcttaattgttgagaagctcagtccagttaacaccaatgcatctgccttggacatcttaagaatgatccagatcatttctccggaagttctttctccaaacgtggcagttcagatactgaaactctaaagattgtatcttggtgatgataccaacagcaagcataggcaattcaattcataagctcttcagatttttaatcgcaactgaatgcagcgatacagttcgtcttttgtaggacagccattgaaaacaatgacttttgagaatcatcttctggacattcattcatgctttgctcaaaagctggagtctactgctttggatcagtcactgtatttgcaagtgaagtcaaatatgaagtgaccctgctgactacacagtaaacactcaaaacaaggtgtaattctgtcttaagttctcttgctcctagaagtagctgctcttccgttcagaagccatatgtaaatttaatctatgtaaattgtttgctgttgattcgaaaatctttggtgttcactggtcaggagaactgtcaaattaggtacagcattgtaactgaaagaacatcattactcagttcagtgaactgaagtgtacatgcactatgttgtgacttgtgagtaatatcacaacccccaaaaaaaggcaaataaaattaggaatagtttgttatgttccagaaaaaaaataaacatatcataatgtgtgc

SEQ ID NO: 22376 - DNA, 1000 bp, Oryza sativa
  ref <308>: DATABASE ACCESSION NUMBER: AK072562
  ref <309>: DATABASE ENTRY DATE: 2001-12-06
gagcttacggttaccgtgcccgtctcctcctcgacctcgagagtccacctttccccctccccttccacctcccctctccggccatctccgccgccgccgcgtcggaaggaagaagagggcgccgggtaggtagcagcagcacgcggccatggggaacatcttcgtgaagaagcccaaggtgacggacgtggacagggccatcctcaccctcaagacgcagcgccggaagctcgcgcagttccagcagcagcttgagaaggtgattgaagcagaaaaggaagctgcacggcagctagttcaacaaaggaagaaagacagagctttgattgcactgaagaagaagaaagcacaggaagagctgctgaaacaagttgacacatggcaaatgaatgtcgaacaacagctgtcagacattgaactagcaagtaaacagaaggctgtatttgacagcctaaaagctggaaatgctgctcttaagtctatccagaatgagataaatattgatgatgtccaaaagttgatggacgacacagctgaggccaaggcttaccaagatgagataaatgctgctctgggtgagcagctatctgctgaggatgaggaggctgttatggctgaatttgagaacttggaagcacagcttgccgttgagtctctaccagatgctccagttactgaagtacggcctgaggagaaatcagaaacacctgctgtcactgaggctgcagaagacattgacgaggttattgagcttcctgatgtacccactaaggcaccagagagaccagaagctgcagaaaaaacaaaagttttggaagaacccctacctgcatagggggatggaactgagttggatagggacctccaggttgccaaatctgcaggagttgtaaattatctgccatttcattgtaataccacacccgcaagttgtctcagaattttaatgtgtacagcatctaaatatgtttgcttcaaattttcagttatcaattcttgg

SEQ ID NO: 22377 - DNA, 735 bp, Oryza sativa
  ref <308>: DATABASE ACCESSION NUMBER: AK072563
  ref <309>: DATABASE ENTRY DATE: 2001-12-06
gtctcccctcctctctctcgcacacccgccgccgccgctctcccctcctctctctcgcacacccgccgccggcgccgccggcggcgtcgatccgacgtcgattcccatcttcagatcgacgccaccggcgccccctcacgccgcttctactcacgccgcaagaacgctatcgcctcgcctcatcgatctccgacaacaccgccgcgcgccgccgccgatctccgccgcaagaacaacgtcgctccgcctcaccgatctcctccgacgatattccgcgtcaattaatcttcagatcaataaggcagtggaggccgaggaggccgccatccacaaccgacaacgacaacgcgatgctgctgccgcctcaagatccaccgctgcctatccgtactcacgccaccgttcctcctccgccgaaaggttcagggcacccttcgccacccctaccccatccctaatatgtctcctctctcccgataagtatccctgatgtcgatcttatgtaaaagcatgatttatgctcaatatatattcaatgtaatttgtgctggaaattgggaatcatggatgacattttctgtatatctacatccaaagccaactgtgaacagttgtattttcctctgataagcactttcaaactcttgaatatgtaccatactgctgatttcagtatggtggggaattgatgtggctggaataagaaaaaacattctcacaccctgtgtttcttcc

SEQ ID NO: 22378 - DNA, 2077 bp, Oryza sativa
  ref <308>: DATABASE ACCESSION NUMBER: AK072564
  ref <309>: DATABASE ENTRY DATE: 2001-12-06
ggtttccctcctaatgcttctcctctctaccccgaatctgttggtagctaaacagcttcccttctgcagcaacgcgaacaccatcacacacatgccagagggcacctacaagaccaacctgctccagctcgccaaaaacctgatcaccaatgtcaaccagacgcagctgcactctgccaacggcacagccggggcggccggtcctgacacagtatacggcgccgtgctctgccggggggactcctccgccgagagctgcgctacccgcctccagagagtgcttgacacggccagcatcaatggaactagtggcgatgactctggctactttcagaaccagaagaatgtcaccttgtacgaccatgatttccaggccctgctaagcttctccgacaaggatttcatctccagcttcagcaacgcgccggagtgcactgtgagcgcttacctgaaccctccgccggatgctgatcgcgcgcagttcagccagcttttctctgagctcatggagaagatcgctgcagccgtggtgagtagacggccggtcaactacttgacgggcagggggtggttcgacctcaagagccagacggtgtatgcgctggcgcagtgcacggacggcatgccgccggagaattgccggagttgcctggacggcatcatcgacgaagggaagaagatggtcggcggtggcctgacgggtggcgcggtgctcgggatgcgatgcagcctgtggtaccagacggatgtcaagttcttcgccggcgacccagaggtgtcgctgcacatgcctacaccaagcaagttttggatctgggttgtaattggatcgttctccctcatggtatctatttcatggttgcttgttcatatttggatcaaacgagagagaaaaagagataaaagaagctacacaaaacttctcaagggaaaacaaacttgggcaaggtggttttggagctgtttataagggcttgttgccgggtggtcttgaagtagcagtcaaaagactttcagcatgttctgtacaaggtttattggagttcaaaaatgaaattcagctgatagcaaagcttcaacacaaaaatcttgtcaagttactcggctgttgtattgagggagagcatgaaaagatgctcgtctacgaatacttgcaaaacagaagcttggacgtcttcatatttgactttgtgaaaggagcacaattaacctggtcaaagcgtctacgcataattgatgggatagctcaagggattctatatcttcacaatcattcacgagtatgtgttgttcatagggatttaaaagcaagcaatattctcttggacagtgacatgactccaaaaatttcggattttgggatggccagaatatttggttcaaatatgattgaatcaaacaccaccagaatagtaggcacacatggttacatatctcccgaatatgctttcgatggggtttgctcgatcaagtcagacgtcttcagtttcggcgtcttggtcttggaaatcataagtggaaagaggactgctggtttctatccctatgatggcaaactttgcaatctcatttcatacgcttggcaactctggagatctggacaggggcatgagctggtctgttgccgtataggaaacaaccataaagtgatacaaaggtgcattcaggtggcactattatgtgttcaagagagggcagatgataggccttctatcgatcaggtggtcacgatgctaaacagcgaggaaatgacattgcccaaaccaaaccaaccagcttacttctatgtccgatccagtggctcagatgattcatcatgcaataacagtataagtatcacattggcaaggtagagtagtggattcccatcatagccattcaatagaatgatccaaaaactacggatcgacaatgtcatttgtgggtgcaagcgacggtccaatgcagttgcttctctgttatccgatttatttgtctttgtttaggcgtttaacccaaatgtgtttcagatctttttttctgtttcataatgtagattagtgtgattttgtactgctatatatgatgttctcttttc

SEQ ID NO: 22379 - DNA, 1182 bp, Oryza sativa
  ref <308>: DATABASE ACCESSION NUMBER: AK072565
  ref <309>: DATABASE ENTRY DATE: 2001-12-06
gaagcgccgccattcatcgctgctgcgtggtcgtcgtcgtcgccgccgccgtcgtccgccattacagccgactgatccctcctgctcggctccttcctgtaggactgaggagcaagcgaatccggtgagcaagtgcgtcgagaaccaagaggagagatgggggacaccgagaggagctctatactggtccacatcttggtcatcgccctctgcctcaccgcattcggcttcgccatcgccgcggagcgccgccgcagcacgggctcaattgttacagacagcttcaattccacattttgtgtttatgactctgatattgctactggctatggtgttggtgcattcctgtttctcctctctggtcagtcacttcttatggtagttaccaaatgcatgtgttttggcaagccacttgcacctggaggaagtagagcttggtcaatcatatactttgcatcttcatgggtcacattcatgatcgcggagtcgtgcctgatagctggagcaacaaagaacgcgtaccacaccaggtataggcatatggtatacgtggggagctggacttgcgagtccctgcgcaaaggagtttttatcgcgggagcggtcttcgtggtgttcactatgattctgaacgtgtacttctacatgtactacacgaaatcgacaagccaggctgccaaaaagatcaacaagactacccccaatgtcggtatgactggctacgcatgacaattggatttcggtgcatcctgggcagaagattagtttttggataacttggctacggtgtcattgtactatcagatgcttccgaagaagcatgtggtgcagggttgtgcaggttttggcctgtcagagctaattctagtcagtttatggctgggtgcctgggccaagccctatattgctaggatgggagtgattcgtttttgttttgtgctggttagggttaagcacatcatgttctgtttgtaactggtgaagctgccgcctagagcagcttggcaggctagcaatttggtgtgtgttgtagtctgttgtaagtcgattgcctgtattttatttgtgtgcgctagagaagagatgaatctgctggtttcagtaatttcctggccaaggacatcaatttatttgctttgggggatctgagccaatctataaaaatcctatattagtgtgacc

SEQ ID NO: 22380 - DNA, 2725 bp, Oryza sativa
  ref <308>: DATABASE ACCESSION NUMBER: AK072566
  ref <309>: DATABASE ENTRY DATE: 2001-12-06
ggtcttcgtctccgcctcctgcgacgaagcgaagcgagacgcctccgcctcgcgcgagccaccacgagcacctcgacacgggagtccgaatcctcctcctcccccctccattggaggcctccgaggtgatggattcagtgtcattgtcactactcgatagtatttcaaatttccgggtgctgtcttcaagcaatgcctcgaaaacagagctagttaagaaatattgccaaacgatggatggcatccttgatcacttggaggtggccctaaacagagcttttcctcagattactccagatggtgaactaagtaaagtgcttgaagaacttggcgctaccatcaatgaagcgactgagctagttggaggctggaatcaaatgatgagcaagatttattttgttattcaggctgattcaattattgccaagatgcagatatatgtattcgaattatgccaaattgtcaattctctcatgcagattgagtcaatgcatttggaggatcttgaacacgatagctgtggaaaaatttcagatgtcattagggaggcttccagggctttagcaggggaagttatgccaaattcagaggaatttggaaagattcaaactactttgagcttatccacaaatcaggagttgctgatggaatatgttgcacttgttaaggttaaaacaaaaggtaatcatgaagataacaaagaaatggatgatattaacgatattgttgaattagtcaaccatatgcttgacaaacatgtggaagaaaagcaaacacgtagcattaatggagtgaccattcctgctgatttttgttgtcctctttcccttgaactaatgtcggatccagtgattgtggcatctggtcaaacgtatgagcatgtttttatcagaaaatggtttgatctgggatacaacatttgtccaaagacacgccaaatattgggacacaccaaattgattcctaacttcactgtcaaacagttgattgaaaattggtgtgaggtacatggtataatgctaccagatcctgttaaactcttgagtttgtgcttccctgtttccctcaacatcacagatggaagtgcaagtgcagacaagtctggatcaccagaacactgccaattggtagctgcattgcatccaaaagcacagtgcgcatcggatgatagtcatcattataatttgatacatgaaaactctgattcagatgatagagtgtcatcatttggagacacagatgattctgaacctgattctttaagattatcaacagaaactactgcagcaaacaaatctctacttgatgaaaaaactgatcgttctgatggtcttaagcaattgagagacaatggttttcaagtttctgatgaggaacagtatctcgaaaggaatggtaaaagtcatatcagcagccatcatcaacttgaagttgatggagagaatgtcagggtacaagcatcaagtgacatcaatgcatctgaagttatgcaagatgatccggtcaccacatgttcaaaggtatcagataaccctcctagattgggtggtgttcgttctcgaaatcagccaaactggtggagacagtctaataaaactattcctaggatcggattgtcatcttcgacagattcaaaaccagatttttctggcaatgatgctaaagtgcgtaatcttatcgaggaactgaaaagtgattctgctgaggtccaaaggtcagcaacaggagagctccgcattctttctagacacagcttggagaatagaattgccatcgcaaactgcggagcaatccccttcttggtgagtctacttcattctacagaccccagcacacaagaaaatgctgtgacaattctcctgaatttgtcattggatgacaataacaagattgccatagcaagtgctgaggccattgagcctctcatcttcgttcttcaggtgggaaaccccgaagcgaaagccaactcagctgcaactttattcagcctctcagtcattgaagagaacaagatcaagattggacgttccggtgccatcgaaccattagtagatttactgggagaaggtaccccgcaagggaagaaggatgcagctactgcactcttcaatctgtcgatatttcatgaacacaagacccgcattgttcaggctggggctgtcaaccacctggtggagctgatggatccagctgctgggatggttgataaagctgttgctgttctggcaaaccttgcgactgtgcatgatggaaggaatgccattgctcaggcaggaggcatccgagtactggttgaggttgttgagctgggttctgcacgttcaaaggagaatgccgctgctgccctgctacaactctgcacaaacagtaacaggttttgcaccctggttcttcaagaaggcgtcgtgccacctttggttgcattgtcgcaatcaggcacagcccgtgcaagagagaaggctcaggttcttctaagctattttcgcaaccagcgccacgtcagggttgggagagggtaagtctacgcaattaagcagcaatgcggcggtctgattattgttccatgatcccgttggccgggcaattaagagatgtatattccatcctagtcgtagcatattttttctggtagtgattccaaatgattgatgtcacaagttgcttcctgtaaagaagacccatctattgtgtatacatggttttcacgatatttagttcacttctg

SEQ ID NO: 22381 - DNA, 1572 bp, Oryza sativa
  ref <308>: DATABASE ACCESSION NUMBER: AK072567
  ref <309>: DATABASE ENTRY DATE: 2001-12-06
gctcgtgggcatcgtcccaagtcgccgggatccagaagccgcgccaaatccggccggaatccccacctccaccaccaccaccaccggccggtctcctttctgcttgcctcgctctctcgcatcgtcgcattggtacatcaacatcctgcaaacatggccgccatggccaccgccccgtgtttcccggccaccccgggactcccagcgcgcggcgccgtcgctgctaggagcaggatggccgccggaggaagcaggagccaacggcggcggagttcctctggggttttcctgtgccgctcctccacgacgggaagcagtaggatggaggactacaacaccgccatgaagagaatgatgcgcaatccctacgaataccaccacgatttaggtatgaattatgctatcataagtgatagcttgattgttggctcacaacctcaaaagccagaggatattgatcacttaaaagatgaggagaaagtagcctttattctttgcttacagcaggacaaggacattgaatattggggcattgatttccaaactgttgtcaataggtgcaaagaacttggcataaaacacatcagaagaccggcagtggacttcgatccagattcgttgaggactcaattgcccaaagcagtctcatcactagaatgggctatatcggaaggcaaagggcgggtctatgtccattgcactgctggacttgggagagcacctgcagttgccattgcttacatgttttggttcgagaatatggatcttaggacagcttatgagaagctaacttccaaaaggccctgcggacccaataagagagcgatccgtgctgcaacttatgatcttgctaagaatgatccacataaagagtcttttgacagtctgccagagcatgcttttgagggcattgctggctcggagaggagtttaattcaagaacgggtccgtgctcttcgggaggcttgagaagtaaatgaaaacttctccacatccttctattcaagcctacaggtcaggaaatgcagtaaacatatgatagaactaaataaacaaatctgcgcaaattgaattcattatggaacagacaacagcagaaccttagctcctctagtagtattcttctttgctgccagattgctagctggtgcagatgaagaggttctgattcacctatcctcagaataaagctcagacaagatctaatttagtaggtatctggtaataataagaatgaaaaaataaggaggtgccagaagatggcattgctgctctggatgatcttggttcttggctgcaattgcatagtcttaatggcgaccagttgtgtaattgggaaactcacacgtacatagtgcctcgtatattcagagtatcttgagactgtcactttgctcatgtgtacggctattgctgttgaaagtgaaacacatactattgctgaaagtgaaaattcatcatatcatcgccaaatgtgatgtatgcatgttcagaggttgactgcggatgtttaagtttactgatatttatgttttcctgtcaatttgattattataacaagtaatgttgtag

SEQ ID NO: 22382 - DNA, 1174 bp, Oryza sativa
  ref <308>: DATABASE ACCESSION NUMBER: AK072568
  ref <309>: DATABASE ENTRY DATE: 2001-12-06
gcccgcgtttcatttccatttccacctcttcttctccttcgcgcgagcgacaagcgcactagccgcggcggagatgtggagctcggattccgaggcagacctcaccgccgccgcggccgccatgaccaccaccaccacaacctcctcctcctcctcctcatcctcctctccttcctcctcccctcccccgcctcgccgtcgccatcgccaccaccgccgcgccgcccgcaggacccacccggtggaggcggaggccgaggaggtgtggcgcggggcacagtgggaggcggcgtggccgcggcggacgaagccggtggtggtcgccgaggacgagccgccgagcggcggcgtcatcgtcggcgcgtgcacggcggggggcggcgaagagggcggcggcgtggggcgcgcgcggagcctgaccgacgacgacctggaggagctcaaggggtgcgtggatctcgggttcgggttcagctacgacgagatccccgagctctgcggcacgcttccggctctcgagctctgctactccatgagccagcgcttcctcgacgaccacccccagtcgcaccactcgccgccgcctccgccgccgccgatgccctcgccgtcgattcccaactggaagatctccagccccggagacagcccggacgaggtgaaggctcggctcaagtactgggcgcaggccgtcgcgtgcaccgtcaggctctgcagctgaacaccaccacaccaccatgatcattccaccaacacattttacagccaagcccaagaacatgagcatcaacaaaccatgtcaagaacatgatcgattcctccaatcggctgcgcggatgatcaatcgatggatggatggatggggaatgcagtgaagatgacattgatgatcattgtggttggatcttgcttgggaggagaaggtgaccagatcagctagtagctgtatgtgtgagcgacgagcgtacatgcagttgagagagtgtggttcagattagttgggaataattgtgtctggttgctggttctctctctctcttctgtgccaggctgccagaatcaagctacagcttgtcatctccagcaactaaatgtaatcaaaataatgtaatcctagttgccaattgggagaacaaagtaaatatggatggatgaataaataaatgtgttcatc

SEQ ID NO: 22383 - DNA, 1142 bp, Oryza sativa
  ref <308>: DATABASE ACCESSION NUMBER: AK072569
  ref <309>: DATABASE ENTRY DATE: 2001-12-06
tggtgaagcatttcggctcaaaggggaaataaaaaggggaagattttttttgcatctcatcctctcgctctcgccgtctctcgccgctcccccccctttccaggctccaatcccgccgccgcgtaggatggccaagacgcggcagccgcagaagcgggtgctggagtcgttcaccatcaaggggcccgacggggtcatcaagcctggggatactgtgctaatgatggcacctgactcatcaaagaaaccatatgtggcaagggttgaggaaattgaggcaacaggacctcaagcctctcaagtgaagatcaaggtgcggtggtactaccgcccagaagagtccattggtggccggcggccattccatggttcgaaggaagtatttctttctgaccactatgattcgcagagtgctgacaccatagagggcaagtgttatgtccacacctttcgagattacaccaagcttcgatctgtcagcgctgaggacttcttttgccgctttgagtacaaatctgccacaggcagctttgtgcctgaccgtatagctgtgttttgcaaatgtgagatgccatacaatcctgataaccttatgatccaatgtgaggattgctctgactggtttcatccttcctgtgttgaaataaccatcaaagaagcgaagaaactagagcatttttactgtaaaagctgtattgctgaaaatggaaaggatctacaaaagtccaatggtgctactgtgcaatctgaagaaaaggtgcagtccaaacgacggcggaggtgatgccatggagacagaatctcaatacctccaaagtggatgtaacaattctgtggggagcaaagcctcatcactcctctagatcttctctcttctcttcctgtgcaaggctgcttgcagccagtgaccagtgtactgtgtacatatttaccagtgttttctttttgcatcgtttgcatggtcgtcgtagcgtcgtcgcatgtactagcttggagtcagtcagtcagttagctcgagcaaagggatcaaactccctcttggtcataaactcataagcgatgatgatagatgaaactgggcactacctaccgtggttgtgttgttgtccatcaataataccttgacgacttgctacctgcct

SEQ ID NO: 22384 - DNA, 711 bp, Oryza sativa
  ref <308>: DATABASE ACCESSION NUMBER: AK072570
  ref <309>: DATABASE ENTRY DATE: 2001-12-06
tttgaagaggatgatgatgagaagtttaatggatctgatttgtcaaatgatggaaatcgattttggggtgatgtgttcacgataacataccagaaggctgatagccaggctgagaaggtatcccaaggtggttccacctcgttgaactcaaaatcagatccttcaagatctatatctgaattgaaaggtgtttctctccttgatagcatcttacaggcagaactcccatgtgatctagagagaacaaactcaacttacaacattttagcactattgcgtgtattagaggggctcaatcagttgtcccctcgtttaagagtacatgctgcttctgatgattttgctgagggaaaaatcaccacactggatgagctatatagaactggagccaaggtaccgtcagaagagtttgttaatagtaagttgacaccaaagcttgctcggcaaatgcaggatgttcttgccctctgtagtggcagtttaccttcttggtgttaccagatgaccaaagcctgccctttcttgtttccctttgaaacaaggagacagtacttttactccacagcatttgggttgtcccgtgctttgaatcgacttcagcaacaacagggtgacaaccaaaatgctggtggcgaaagggagatccgatttggaaggctacaacgtcaaaaagttcgtgtttcccgtaaccgtattctggattctgctgct

SEQ ID NO: 22385 - DNA, 1705 bp, Oryza sativa
  ref <308>: DATABASE ACCESSION NUMBER: AK072571
  ref <309>: DATABASE ENTRY DATE: 2001-12-06
gtctagtacaccagacgacaacacacacacaaaaaaaaaaaagaagagaaaaaccgaacgaaaatcccctcgcgcagacgactactacatccttctcgtctcatcccgtcgacccgccgccgcctcaatctcgaagcctcggcgaggctagggtttctgcgtctccatgggctctaagaagcggtcgcctcagcatccggccgccgcggcgccccctcccgccgtcggcggcggcggcggcggcgaggtctccggcgatggtggcgcctcgacggcgaacgggccggtggtgccgaagccgtcggaggtggcgccgttcctgacgaaggtgtacgacatggtatcggaccccgcgaccgacaacgttatctcgtgggccgagggcggcggcagcttcgtgatctgggactcgcacgccttcgagcgcgacctccacaggcacttcaagcacagcaatttcaccagcttcatacgccagctcaacacctatggatttcgtaaagttcaccctgatagatgggagtgggccaatgaaggttttattatgggccaaaaacatcttctgaagaccattaagaggaggaagaagtcttctcaggaatcacctagcgagatacagaaggcgcctgtcaaaactgcacctggtactgaaaatattgagataggaaaatatggtggccttgaaaaggaggttgaaacccttaagagggataaagctcttctcatgcagcagcttgtagatctcaggcactaccagcaaacatctaaccttgaagtgcagaatttaattgaacggcttcaagtaatggaacagaaccagcagcagatgatggcacttctagcaatcgttgtccagaatcctagttttctcaaccagcttgtgcagcaacagcagcagcagcgcagatccaactggtggagtcctgatggaagcaagaaaaggagatttcatgctcttgagcagggccctgtaactgatcaggagacctctggccgtggggcacatattgttgaatatctcccacctgtcccagaaacatcaggtcaagtaaatccagtggaaggagccatttgttcggccaactcacaaccagttccaagtcctgcagttgccacacccatggacatgcaaacgtctaacgttgctgatactctcggttcatctgaggagcctttcgctgataactctactctacatgaatgggatgataacgacatgcagcttctgtttgatgataacctagacccaatacttccaccatttgagaatgatggtcaaatgggccctcctttgagtgttcaagattatgattttccgcagttagagcaggattgtctgatggaagcacaatataactccaacaatcctcaatatgctgatgtcattaccgaagcttgattggtggtccaggagcatacttgcagtaacattagttcttcggtgaccaacctccgggcgcatctgcaccattggcatcccgaaatggcgtcctcagggtgtaccgatgaattatgctaacacagaagaagatataactctaatctggttgaccatacagaactacctttcttgttcaaggcactttttggggacaggggacgccttttcgcagttctcgtcgtcttacactagcgatggttgctaccatcgaattcatttggtgtatatactgttgttcgtcttataaaacatgagcagttttgt

SEQ ID NO: 22386 - DNA, 2531 bp, Oryza sativa
  ref <308>: DATABASE ACCESSION NUMBER: AK072572
  ref <309>: DATABASE ENTRY DATE: 2001-12-06
gtctgctcctgaatctcctcctattgcccttctgtctcacatccctgtctcataattaaagtcataattaaggagcttctctaaggtgattgggacttgttgcagggatcaggaggaaaacaacaaggataacttaaattttggattaacaacaagaggaagtggatcaaccagacaagaggaaaacgtgcaaacaagacaggcttgcaacatcaccttgagtccaaagccaagaaagatggggctgtcaatctcatacccaccagacgactacctgccagcaatggaggacaacatgggcaggctgttcatccggtccctcagcttcgacgacgacatggaggccgccgccgatgactcgccgtcgacatcaccgatgccatcaccgtcggcgacattgctgccggcattcggctccggggggaagctgatcatagagggctccctgagcttcaagagaagagaggctgacccggttcagatggagaccatgatatccatcaggagtcccaagtctgacaaggagagctgcagcagcaagccaaatgctactgctggtgcatcgagatttgcgcttgccggagaccagacaccggaggattctccggtgatcgccggagttgccagccccaagcaccaggcagcggctgtcaggctgcagaaggtgtacaagagcttcaggacaagaaggcagctcgcagattgcgccgttcttgtcgagcagagctggtggaaattgctcgatttcgcactgctcaagcggaattcggtgtcgttcttcgacattgagaagcccgaaacggccatctcgagatggtctcgggcaagaatgagggctgccaaggttggcaaaggtctgtccaaagatgagaaggcccagaaacttgctctacagcattggcttgaggcgatcgatcctcgacatcggtatgggcacaatctgcactactactaccaccgttggctccattgtgagatcaaccagccattcttctactggttggatgttggtgaagggaaagatgtcaacttggaagagcattgccctagatggaagctgcataagcaatgcatcaagtaccttggccctaaagagagggaatcctatgaagtgatcgtcgaggattcgaggctgatatacaaactgagccgtcagatcgtcaacacgaccaaaagccgaaagggctcaaaatggatctttgtgctgagcacatgcaagactctgtatattggtcagaaacagaagggcacattccagcactccagcttccttgcagggggagctacatcagctgcagggagactgattgtagaggatggaattttgaaggcagtctggcctcacagtgggcattaccggccaacagagcagaactttcaggagttcatgaatttcctgaaggagagaaatgtggatctgactgatgttatgttgaacccttcggaaggtgaagatgatgccgaattcagcctcaagagcagccattctaggcaggacttgaccgaactctgtgaacctgacatgcaagaacatgaggaacaagtcacacaacaccatggcgctgacgaaaccaagaccagcagtgatgcacccaccatgacatccaccgaaaccatggcgagcacaccggcaatcaggaaatccacctcagccaacaagctgcaagggaagcggcctccgaggctgctgatcagttccaacaacacagaactacccgcaacacattgcaacggaaggccatcaccggttcacaaggacatcgacgaggattccaccatgttcggagagtgcctcgccttctgcaagaagaacctgtttgcagaggaaggcaatgaagaagatgagctggtggaagtaccagaggagatgatcatgaaccgtatcaactgcaagaaggccacgaagtcataccagctggggaagcaactgtccttccaatggagcactggagcaggtcctcggatcgggtgcgttcgcgactacccatcggagctccagttccgagcattggaggaggtcagcctgtcaccccggggaactaggtcgacgaggttttcgtcgccgaggcgaaagcccttgacaccaaatagcattccagttgcaagatttggttgtagccctacagcccaaggtgacaacatggggctgaagccaaggcagaggtgtgctacttggactgctttctaatgttgatatggcatgcaaattgcaaaggcaatgctgcttttcttctccttaactggaggacgatgcaaagtgtatagtgagtgagggaaacatgagaatgtcattctttggttttgtagatgtgtagagcaaacacaccatggcttccaaggaacaagcaataagatgtaccttccgaagaagtaataacaagtaataagatgtatttttagatatgacacatttgacactcgcaaggtgcaagcaaaaatagagattacaggttttcagggaggaaaagaaacagatgccagaatttgtaccacaaaagatgatcaagctaaggaatttgatgtctccaacc

SEQ ID NO: 22387 - DNA, 1293 bp, Oryza sativa
  ref <308>: DATABASE ACCESSION NUMBER: AK072573
  ref <309>: DATABASE ENTRY DATE: 2001-12-06
ttcggccacaagcaattcaacgagttacaccttccaccgtcaaccgaggagctttcagttgttgccggccatggcggcgaagctctccttgctacttcccgtcacctgcttcatcctcttcgttctgcatgctgttcatgtggaggcgcgtcccgatcctgccgctttcggcgactccgacaacgggttctacacgctgttcgtgttcggcgattcgttcgccgacaccggcaatctccccaagcgccgactgagcgagcagtcgcgcgaatggtactacccctacggccgtgaccgtggcaacaaccgcccaaccggccgcttctccaacgccatggtccagtccgatctcatcgcacggatgctggggcgtcatgaggcgcctccgacgtacaggagggtggacaactacgtgcacccgcacggcatgaacttcgccgccggcggctccggcgtgttcaagctgccgagcggcgcgccgacgctcgacaagcaggtcgaccacttcagggacctggtgcaggacggcaccatcacccgccggaacctccgtaactccatcgccctcgtcgccgtctccggcaacgactacgcccgcctcgccaacgtcaacgacactagcaagatgatcaagtttgtcgatgaggtgacgagcgagatcgcgaagcaggtgcacaggctgaagaacaacggggcgaggaagatcctggtgaacaacctgcaccccgtcggctgcacgccgtgggtaaccaggccgggcaactactccggctgcagctccaccggcaacatgggcgcctacctccacggcagcaacctccaacagaagctctcgcacctcgactacgtccaccatgtcgacctcaacactgccttctccaacatcgtcaatcccgaccaaggttcgaagcacaaggtgtcgagccagttcgagcacaagatgcagccgtgctgcgagagcttggacccgaacggcttctgcgggcagaagggacacgatggcaaggacctgttcagcgtgtgcaacgatccggagaagtacttctactgggacgatgtgcaccccacggaggctggatggaaggccgtcatgcagcagctggaaggtccaatcaagaaattccttcgaatcaactagaaattgagatgggcgttaattaggtttagagtgttttggtttagggttaattttttactatcagtttgtgagagttagttatatatgttagtaaattaggtaaagatcccgattggcttgatcggtggatattttgtttagctcgtgttttattg

SEQ ID NO: 22388 - DNA, 2913 bp, Oryza sativa
  ref <308>: DATABASE ACCESSION NUMBER: AK072574
  ref <309>: DATABASE ENTRY DATE: 2001-12-06
gatttttcagtggtaattggctatttcgtaaatgtattttgatgattttctattccttaagcattccgattgtgatcacaaacgttgagtaccgcgtctttgttacaaccgtcatttccgagtgagattcacgtggtgtgctccgacgttcgttctcgatccacttcgcctttgctttgccaactacagacggtggattgccgcgggttaccgactttgcagtactgcagctccacacattcatctcaagctaaaccactgttgtcgctgaaacttgcctcgacccgcaagctttgacgacggattccaaaaaaataataaaaaataatcaatgatataaaaaggatttagatgtgcgtgtagcagatcgacatgactgcgtgactgatctcgtacgcagcgcagcgagcgtagtagcggtccggtcgagtcaatggcgacgacggccaaggctccagccacggcttcggccgcggctccagcagccacggctccggccgccacggccacggccacggccacgacggccacggcctctgccacggctgccacaggcaatgccactgccacggccccgccgccgccctatgtgcccgtcagccagtggtacgccgaccggtccgtgttcgtgacggggggcacgggctttatgggcaaagtgttggtggagaagctgttgcgatcgtgcccgggaatcagcaacatctacctgctgatgcggcccaagcgcgggcaggacgtgtcggcgcgcctcgccgagcctgctgagctcgccgctgttcgagaccctgaggcgggagcggccgcacgagttcaacaagatcatccccatccagggcgacgtgacggagccggagctgggcatctcggcctcggaccaaaagcttcttacggacagcgtgtcggtggtgttccactcggcggccaccgtcaaattcgacgaggccctcaagctgtccgtcaccatcaacatgctgggcaccaagcggctggtggagctgtgccagaagatgatgaagctggacgcgctggtgcacgtgtcgacggcctactgcaactgcgaccgcaccgaggtgtcggaggtgatctacccgccgccctacgagcccaagcacatcatccagtgcatggagtggatgggcgacgacctgatccaggccgtgacgccgcgcctgctgggcggccgccccaacacgtacaccttcaccaaggccatggccgagaagatgctgctggacgaggcgggcgacctgccggtggccatcgtgcggccctccatcgtgctgtcgtcactccgggagcctgtcgagggctgggtggacaactggaacgggcccacgggcatcatcgccgccgtgggcaagggcttcttccggtccatgctgtgccacgagagcaaggtggcggacctggtgcccgtggacatcgtcatcaacctgatgatcacggcggcctggcgcacgggcaccacgccccgctccacaaacggcatcgccgtgtacaactgcgccaccggccagcagaaccccatcacgtggaaggagtttgtagacaactcgctgctgttcgtgcggaagcacccgctgtccaacatgctgtggtacccggacgggcagatgcacacgagctggctgctgaaccgcgtctcgacgacggcgctgcacatggtcccggcgctggcgctggacgcgtgtgcgcgcctcgcgggccgcaagccctacatcatgcgcgtgcaggccaagctggataaggcggcgcgctgcctcgagtacttctccacgcagcagtggcgtttccgcgacgacaacgtgcgcagcctggacgcccagctcagcctggccgaccgggccaccttccccttcgatgtcaagcagatcaactggcctgcttacatcgagaactatgtcctcggcattcgccagtttatcttcaaggagcacccctcatcggaggccaagtgccgacgccagcttaacaagctcctgtggatacaccggtgcgcgcaattggcggtagtgatgttggcgtggcgcgtgttgatgcgacgctctcaggccgtgcggcgcctctggttcttactgctagacactgtactccgggtagctcgaatggtgccgtctctggtttagttcccagtttagtgtcgttggttcgttcgtacgttcgttgctaaccaaaccaacagagcaagcaggtctactcgacctccacccgcttcaacccacgcaatccagctctgagtcaggcgacggcctcgggcgacggcgacatcgggaggggacgagcgacgccgaagagtgacaccaggcgtcccggcgtcccggcgtgccgcaccccaacagtcggccagtgttgttgccaagataagagtgaaattcggatggaggaaaagaaatgacctgcttgtcactcacagttattgcattcaattacaaaatacgaaaaattccaaaaaaacgccaaaaaaagattacaaactgttgtgcgcttaagcagtcgatcgggccgaagaggtaactttttattctgctcagccaagtgtgtatcgtatgtgttgtttatgagagtttccatgtttgaaaatgtacattaggaagatagcgataggatttttttatttattgtgtaatgaacatgtttatgcattcacttgttgcaatggaagcatgttgattcaacagtaaaagtatggtctatttatgaccaaacgtaacgtacggtattcaaatattgtaataagtcatcgctagccggattggtgttccctttttcgcgctatgttcgcgctttggaatggcggccgattcggatttcgaatcgtcttgtcctgtcctacagttagaagggtgtttaggtcactttgagtcagtctttgaatcagagatcgtctaaaaaataaaataaataaaaggg

SEQ ID NO: 22389 - DNA, 2854 bp, Oryza sativa
  ref <308>: DATABASE ACCESSION NUMBER: AK072575
  ref <309>: DATABASE ENTRY DATE: 2001-12-06
gattttatccatatacaaatatcgtccttaattatatttttttatctaaaaaaaatcaaaagaatagcttctcctcgagtccacctcgacgccgccgccgtcgaaaaccaataaaaaatcctctccacgcccgcaaaccccagccccccactccccccacctcaccgccggcgaaccctagggggggatcaccggagtcggcgaccggcggcggcggcggtggcgatggcggagtacgcgacggcgaagacgtcggtgtggtgggacatcgagaactgccaggtcccccgcgcctgcgaccccaacctcatcgcccagaacatgagctccgccctcgccgccgccggctacaccggccccgtctccatctccgcctacggcgacatcggccgcatcggcaacgccgtcacccacgccctctccagcaccggcatctccctcaaccacgtccccgccggtattaaagatgcaagtgataagaagatcttagttgacatgctgttctgggctattgacaaccctccaccagcaaactatttgttaatttctggtgatcgggatttctctaatgcccttcataagcttacaatgagacggtacaatattctactagcacagcctccaaatgtgtctcaggcccttactgctgcagcgaaaagtgtttggctctggaaaagccttgtagctggagaaccacctctagcagagtcgccatatgttagtagcacagcaagtggcaatatggttgagttagataagtctaagaacattaattcagattcttcagacactactacagacacaaaccctcagaatggtctccagtctgatcatcaaaagggtggtaatggcaaggcagataagcaatctaaagtgaagcaacctcgaagaaaccagtcagacaatgtatctaaaccagcaagcaacgaagaaaattcagttgaagttgctgataattctaaagaatgcactactgaccatccaactcagtcttctatgccatcgtcatcttcatcatcaagctctgaatcacaggatggggcaaaggtgaaccagtcaagtaaaccaaaagttcagcccttttccctgcctaaaaagcctgcaaaatctgctcattgccatcaaaagactgctccacatgacttcaatagtaagaagtctggtgcctcagcggaatctgctgcgaagaatggtactcctgactctggcaacggtggtggctataatccaaaacatcataaacctcatacctcccagtctccaagaccacaaaattcaattactcatcctcatagtggatctgagatttttcatcatacattgagttcacaaagaaccaactcatgctcaccatcagctgggcataatggcgctcctactgcaccactgcaatcctggccaagtgcccctccctatcacagcccaccagttaattatcctgatttgaatcggataaatatttctggataccccagaggaattcatgacaaccaaggtgtgaacatgaactaccaccctaaccattctggctctcctcataatgttcagcctgcttataatagttacagacctccaacaccacctagtatgcccagcaacatgcaaaatgctggacaatggggagtgaacccaggatatccacagccatcttctgaccctcaaggtcttataagaaatatattaggtgctttggaagtattgaagacagagaagattccaccaatagaacagcatatttcagattgtatacgttatggagaagctaacttaccaaattttgatgttaagaaggctcttgaacttgccattcagcatcaagccatcgtcttgaaaatgttaggtcctatgtcattctatttggggaagaaccaaaatctttggaaatgtgtgaatataatggatataaatgcaaaatatccaaaagatacgtttgatgctgttcataggttcatatcttccacctctggcagctctgctataaagaattctagatccaagtatcaagctgcaattgtcttaaagaatcaatgcttgaaacatcttgcccttggtgaagttcttcagattttgtatatcataatcaatacaaagaagtggtttgtgccgcattcttcagggtggcagccgttgtcgtttaacattatagtggttgatgccacgacaggtgctggtgggaaagcttagccttggtacatttgtctgctcatgtcagatggataatttgaggccctggtggtttcttcaaatgctatgctctggtgaaagttattagtatgatggtgcatctacagtatgccaaacctttcttctaaagatgaaatagttactagtttaagcttagtggttagttgggaacttgggatcaaactgtcactggtttttcttccagtactccaggaacagcataggtggtggttaatggtatgataaggatagtccagtggttcttcaatcagcaaaatggatgcagaacaacgatcttttgttcaggcagtataatagtgcctgatattgggaggttatgatctgctcaaaatattattgtctattttgtggaaatctgccatagtggcaccagaatttgctaactattcaagctgttcagttcaatggagtaccgaagttgaagccccttcgtcttaacacgaatggatcgatgaatgaaccatgtgatgttcagagatcctttgctgtccatttaatcaatgtgtctgagtcttcgagtggatacaaagctacccctgctatggcttgtggtacatgtcaatattgtcagtaatgcattagaggcttagagctgccttggtaaccttgccagcgtgccatggaactataaacttgctatgatttatgt

SEQ ID NO: 22390 - DNA, 2272 bp, Oryza sativa
  ref <308>: DATABASE ACCESSION NUMBER: AK072576
  ref <309>: DATABASE ENTRY DATE: 2001-12-06
ggtcctgctcctaatcctcgcggcagcttgcttggcgctcgcctccctcggccgcacttctttcttcctgattcctgacgtcttggatggtgcgctttattatgacacacgacctgcactagtgtttacagctccaagtatgggttccagagaacccttcctgagtgccatcttcttcttcttcttcttgcttttgttctgcctcggctgcaagtgtatagcttcagagttacacttacacacgacccagactgcggtcctcaaggttgatgcctcactgcaacatgctcgacagatccccgacacgctatttggaatattttttgaggaaatcaaccatgcaggagctggtggaatatgggctgaacttgttagtaacagaggttttgaagctggaggccctcataccccatcaaacattgatccatggtccataattggagatgactcttccatatttgtggcgactgatcgaacgtcatgtttcagtcggaatactgttgctctaaggatggaggttctctgtgacaattgcccagctggtggtgttggcatttataacccaggattctggggcatgaacatagaagatggaaagacctacaatttagtgatgtatgttaaatcaccagaaactgtggagttgacagtttccttgacaagttctgatgggtcgcaaaatctggcttcaagtaccataccggtttctggtgcgtcgaattggacaaaactggagcagaagttggttgctaaaggaacaaatagaacctcaaggcttcaaataacaactaccaagaagggagttgtatggtttgatcaagtctctctcatgtctgcagacacttacaagggacatggttttcgcacagaactaatatctatgatgttggacttaaaaccacgattcttgagattccctggaggttgcttcgtggagggtgaatggttaagaaacgcattcaggtggagggaatctattggtccatgggaagagaggcctggacactttggggatgtttggcattactggactgatgatggccttggatattatgagtttctccagctttctgaggacctgggcgctgccccaatctgggtgtttaacaatggaatcagccataatgatgaagttgatgctgctgcaattgctccttttgtaaaagacgtattggacagtctagaatttgcaagggggagtgcagattcgacatggggttctgttagagctgcaatggggcaccctgaaccattccctgtcaaatacgttgcaattggaaatgaagattgtgggaaaaaattttaccgcggtaattacctcaagttttataatgctataagggaggcctatccggacattcaaatgatttcaattgtgatgcttcatcaagaccacttgaccatcctgctgatttatatgacttccacgtctatactgattctaagactttgttttcgatgaagagtgcatttgatagatcatctcgtaatgggcccaaggcttttgtcagtgaatatgctgtttggagaagtgatgcaggtagaggaagtctacttgcttcattggcagaagctgctttccttactggactggagaagaatagtgatgttgttcagatggcaagttatgcaccactgttcgtgaacaacaatgatcaaacgtggaacccagacgccattgtatttaactcctggcaacaatacggaactcctagttactggatgcagactcttttccgtgaatctagcggtgctatgtttcatccaattacaatcacttccagctactctggttctctggcagcatctgcaattacttggcaggattctgaaaatagcttcttaagagtaaagattataaactttgggtctgatccagtgagcctcacgatctctgcaactgggcttcaggcccgtgttaacgcactgggatcaactgccactgttatcacatccagcaatgtgatggatgagaactcttttagtaacccgaataaggttgttcctgtcaaaagccagctttccaatgcagcagagcagatgcaagtcacgcttgctcctcactctttctcctcattcgatcttgcgcttgcccagtccaaactcgtggcagagatgtgaagcaggaacacaaggttagcgacagaaacacaagaaatacacgagatgtgatatgcgaataccagaatgcagtccatatatgtgcatgtatcttgaagcactactgtatagtgtaatacacaggaaatgatgaataaaattcactccaggc

SEQ ID NO: 22391 - DNA, 2572 bp, Oryza sativa
  ref <308>: DATABASE ACCESSION NUMBER: AK072577
  ref <309>: DATABASE ENTRY DATE: 2001-12-06
gggagccgccggcgaacggcgccgacactttccaccactctgtcgtcgttgcttctcctactggcgacgacgacgaccaaattgtgccggagctgcagcgacggcgagcgtcacgccctcctacgccgcatccagccgctcatcggccctgagttctcctccagcggacggttggattgggacgaggccgtggactgctgccgctgggagggcgtcacatgcagcgtcgccggccgacgacgagaagcagcagctggtggccgccgtgtcgtgtcgctgtcgctccctggagtcggcatcgccggcgccgtggatgccgccgtgcttgcgccgttcacggcgcttgagaagctcgacctgtccggcaatcaaatcactagcttttcagctgctaatcgctcagacatggttgtcggtgctgttctcaacaacttaaccgcacttacggagctgcacctagccgggaatgagatcaccaccacaggctggatttccaatttgacgtccctgcaggttattgacatgtccagcaataaagtacatgagctcaacggtatttgtggcctccatcaactaaaatatctaagccttggttttaacatgatacaaggagtaattaatccatgcttggggaaattgcagtacctggtatacttggacatgggatcaaattttctcacaggtgagattggacaatatttactaagcaacttaacccaagtagaagaagtacatcttggggacaacaatcttactggcacatttgacttctcgtctttggctaacaactctgagctccacagcatcgtcctctcgaacaactgcaaactagaaatcgaaacggagcttgtaaggtggacaccgttgttccagctcgaatacttgaatctaagcaatagtattgtcaacaagagaagcaacgggatcatcccaacttttctgtcagcccaagtgagcctctctgggattgatctctccatatgttcactccaggggaggatcccatcttggatgttgttgtataacgtttctttaggtttcctcttgctgcgcggtaatagcatggatttcctcgacactggcaatctcggagccaacgttacgtcatcaatggaggtgcttgatctgtctgacaacaggatatcaatgaaaatgccatacaactttggaagtctatttccatatctaaagtaccttgacatgtcttccaacatgctgaatggcggagttccatcactagcagaagccgcgtcatcgttgcagtttcttgacttgtcatttaacatgctcaatggggagatatcgccggaattaatagggaatgcatgcattttgacatcccttctgctctcacacaatgacctaactgggcctatgccacccttccattggagcctagggcagttgactcacctgagcgttgaaaacaaccaactatctggtcgtttgccgcctctacttacgaactgcaccaaccttgagaatctcaatgtgaggaataaccgtttatctggtgtaatcccagtaggcctcctcagctttgagaagcttggtgctctcctccttggaggaaaccagtttcatggtgtcattccttgggatatttgcctcaacaaccatatccacttcatagatctttccaataattggttctctggtgagatacaggttgcttatacagtgttttctggtcagagctgccaatgaactctgaggatgacccatttggcaacatcacacagagaagacagacatatgtcgaattcacgacgaaaggggagagcttgacatacatgggaatgcctttagagctcatgataggcatagatttgtcgatgactcggctatctggacccatccctagctctgttgggttcttgctgcagctcaaatcgctcaacctatcacacaacaagcttgttggttcgatacctgacacgttcatgtacctgcatgaaatggagagcatggatctctcacacaaccatctcaatgggagtgtcccagtggagctagccaacctctccttcctgagcttcttcagtgttgcatacaacaatctctccggtgagattccctttgaatcacagttttgtacgttgaacggaacggcattcgaagggaatgagaacctctgtggagaaattgttgacaagatttgtccaatgaactcgaactgctcacatgatagcgatgatgagatgcatcagttgttgtcaacggataccatggacacgccgctgatctactggtccttcgttgctgggtccttcgccattggcttttggggcatcattgcattacttatatggaatacagccttcaggagcaggctctgcagcttcatggatggatgcatgtctaagatgggctggtttcttgtgccttgatttaaagccacttgtgccctcaactacaatatcaatcaatttttgctctgtttctattccaatacagtattccgcattaaacagatttttgtaagaggagttgaatttacagaattccttttgatggaaaagctagtaactccttattcactcaacattggaaactggttgttttgaagtcc

SEQ ID NO: 22392 - DNA, 3035 bp, Oryza sativa
  ref <308>: DATABASE ACCESSION NUMBER: AK099285
  ref <309>: DATABASE ENTRY DATE: 2002-08-28
ggccgatccccatccgccccgcgagcgagcagaggcggcgctgccgctcgtcctgctgcttccgccgcatccacatccttcgccgccgccgccgccgcctgcgccgatccccccatccatcccgcgagcgagcatcctgctgcttccgccgcatcctgaaatttggcttaaccttgatgtttgtttgttcccaaaaagtttgggggtgttgaactgaaccccccatgccccatgttagatccgcccatgaatggatcatgattcactccaaaacactatggagcatcctgttcctggagaggagcatgaggaggataacagcatgaaagtggatgtggcatttgatggagtgcacagcccgttccggtacaggcacaagaaaaggtccaaggtttgggaggagtacaagcccatctttctgaatgggaaggttcagtttgcggagtgtctctactgccataatcgcctcagctgcaaagattccaacggcacaagccatctatggcggcatcagaaaatctgccctggcaaggaggaagcggcgcagaggcgacagaaggattcctacttcccatgcgttttggtgaatgagaacgatccagtttcaccccacgatccggtcaatgatgttattacagagacgcttagtgatataaactcggtaacacccagcggtaacagattcacgtcaaaggtgtggaaggagtttacacctgtctatattgaggggaaactccaggctgcagattgcattcactgccagaagcgcctcagtgcgaataagttcggggggagaagccatctgagtcgacatcttataacctgtgcaggacgacgtggacgtggagggggccaaattcatcagaagggtttattttatccttctagcgtgcctagtttgaagtccagggtgcaagatgagctctcacctgccttgacaaatgggaaggttcagatcgcagaatactctagcaagcttctgagggcaagtagctctggtgactcgacccctaagcccattcgagtggtaccagcagagcattccgtgccgactccagattatacaagcctgatgaaacagaggacctcatttgtgaccactccagctggtcaggaaacatctgatccagacctagtcgggatgatagctttgcatggttatcctttgtcaattgtggagcacgaagaaatgatgagatttgtaaagaaactcaaccctgtggtcaatttagtctctcgcaatgctatggaagaacattgcttgacactatttcagaaggaaaaggaaaatataaagggtaaaattgcacatttttcccgacgtgtctctctgtcagcaagcatctggactcctgatggacctgagacaacagtaaattacctctgtttgacagcacattatattgatgaagactggaaagttcataggataataataaaatttggaatgttttggtccgcgcctgctgatttggaaaggatgatacattgtatggaagcctgtgtcccagagtctgagagcggatcatataatgtcatattggatgccattagagattggaatcttgatcagaagcttttaagcttgacttctgttggtgaagttaggggtgacaccaatacttcattgctaaaggaaatgcttatagagaagaagtgccttcctattggagggacgctattcaatgttgcctgtgtggactatgtcctcaacagtattgttttcaaagtgcaagcagatatacttcgtcttgttggtgacatagtaatggattttttagtgtcattgacccagcagcagcttctggaagttatttcacagacgggtctaaagtgtccacaagaagatgctaagtggtggcacaaactttattttagacttgaagtgcttttgcatttcaagaagtcatttccttctgaagaaagggtgtccccagaagatacaaaaactgctgagtccgtttgcaagattttgaggacaatttatcgtgtcattgaagttatttccagccctagctctccgacagcaaatatatattttaacgagatatggaaagtcaggacagttttgcaagaagaagcattaaatgatcacagagaaatagctacagtggctatggtgatgcaggaagcattcaatgagtattggcaaaattcatatttgtggttggccatacctgttgtgctagaccctagattcaaattcagtttcattgagtttcgtctgaaacgagcttttggaacagattcggcaagctacctatctgtaatacgtgaaacagtccgggaactcttcaatgaatactgccattctttgaatcaggcaagtgatgttgtttcaaacagtgaagctttgtgtgcagatgataatgattcgttggaagattgggatcagcatctccatgaacaagcaagtcgtcagctatcttcggagcttgatgattaccttgaagatggtttagttcctagaaaggatgattttgatattttaaactggtggatgactcatagtactaagtacccaacacttgcaactattgcacgggacatcttagccatgccagcatctgctgttcaatctgaagcagcattcagtagcagtggaccagtaattccaaagcaccagagtacattaaacatcagaacaatcgaggcacttgtttgtactcgagattggatgagataaaactgtgaactgttgagatgggttgcatgcagctttcgccggtggaagatttcaggcagtgtatgatggtgcttctgaccaaggataaccgctctgatgatcgagccccaacatggtgtatcaagcatttgggagctgttaaacttcatttcagtcgagatgtgtatgcatataaatgttactcccatcaccccatgcatttgcctggtgtagtgcagatgtatgccgttgtttagccaaagttcaggtcagcccagagccttaggtcaagtaggaactaggagttgtacgacgagaatgttgcaaatatcctctgttatgagcaattaatctgtgttatgtgcagcct

SEQ ID NO: 22393 - DNA, 1786 bp, Oryza sativa
  ref <308>: DATABASE ACCESSION NUMBER: AK072578
  ref <309>: DATABASE ENTRY DATE: 2001-12-06
ggcgggggcttcgcctctttggctcctcgcccgccggcggcggcggcgatcgagttccgccgagtccaccaccactccgcgccgctagctacccacttgttccaccgaccacatcgcgcgcccacctacgaactccgcccgccggcatcgatgggggtttcgacgaacgcccgcgagcgcgccatcgctggccgcagtacgatccgcacgccggagaagcgttcttcagttgccagttcgtgcagatctgtctctcaggcaagctagatttatgcagcatgttgatccagattattacaggagaaacttccacattcctgaagtcatggtacaattggtatttggatggaagataaggaaatgtgatggcactcaatgctgagaagaaacttttttttcatgcgatggactggttggccttggctgctggatacaatgaactcttcatctgcctcatctccagtgatgatatgaagggaatcccactgccaatgtccatcaagcaaactgatatggagttcacctctgcgacaacgatcacctcagcgatttgttgcaggagataaggtgtagcagtttcgacctccagtggggaaacttctgaggttcaggtagctggagccactggaaagcccacaatcgatgcttataaatccttcatctacaaggggagggagtcagctgagccatttgcactccacatgttaattcgcaggttagccaatagaattataattatagtcatggaagaataatccttcccataaaacgtattggcaccaaaaatatgaaaatttatcaggtacaacttggcaaaatgaaaatgatacggtaggtttgtttgagtctgaaaatggttccatgctatgagatgtatattgtagttggaataattctgtgctttgcaaggggcttacagtatggatttttttttaaatatggaggaaattcattgcatacgttactctaaaggagatgattcccaaaatatgtaatgggctcatggctttgtactgaagtctcaaatttaatggagggcaattaagaagtatttcctggaaagtatattagggaaaaaccacgacacaatactctgctgctggtatgatgtctcagcagtatcacagaggtatgatgcctcgaagtattatgataccttgagggtatcatgaagatggcaccgatgtttcttggtggtattactaaagttttttgaaggtaccatgcttgggtattgtcatgtggggccgcacctatacaaggaagggccgcaagatcaggggcgctgaaggcgcgccgtcgacgctgtatacgcgatcacgcgcggctgagcaggattagcgcgtggatttgaaaacagaaggatcaatcagatccttagtaataggaataattagttacaatgatttgattagcgccaagaattaaggcccgagtgcctacttaagttttgtattcagaatttggaaggtaacgagttgatcacaaactttctattcttcctctttgcctctgtctatcggtgctgagggggaaaaccttgcccaacatcacggcgcgcggctacgaactccgtagccgagggccagctaccgtatcacacgaagcgcttgacaggtatcgtcaatgttttgtgaagggatcatgggtacagtagaaactagaaaggtaaattttatcagctcatcttatatgtttagggtattaatattacatgacaaaatatggtgtatgacactgtggatgtataaaaacgaaaagagtatgggagacgattttaagtcct

SEQ ID NO: 22394 - DNA, 1979 bp, Oryza sativa
  ref <308>: DATABASE ACCESSION NUMBER: AK072579
  ref <309>: DATABASE ENTRY DATE: 2001-12-06
ttggggcggagaaaatcctgagcatcacaagtcgcgacctcacagggaggggcggcggcgctcgccgtgaggcgcgggagggggcgcgctcgcggtggtccacggtgaagtgcggcttgctcgccgtggggagtgcggtgaagagtggctcctcctcatctagcagtctctgctccagtcgtctggttccccccgccagccgccactcgcgcatttcgtcgaacgccttcgcctccatcccctcccaccaatcaatccacgtgctccagaaccctaaccctcgtgggggcgacgggggagaggttggcatctggcgatggcgtgttgctgcctccgtgccagcacggcgccccgcttcctcctcttccgcgccgccgcgcggcgagccccattgccggtcgcggtttccaggaagggtttctcggaacagtccgtattgccaatcacagacatgatcgagaattttcaaggaccatccatggagaacattccacgaattccattatatgatgatagcttgccctcaagcttgttgacaacttctccgaatcctagtgatagtgtagctcatgctgacccttcaaagagtagaataatgcttgttgatggaacctcagtaatgtacagatcctactacaagatattggcacagctgcagcatggtcaattggagcatgctgatggaaatggagactgggttttaactatatttaaagctctgtcactggttctagatatgctggagttcattccatctcatgcagcggtggtgtttgaccatgatggagtcccttatggtcattatactgccatgccatccaaagaatgtcacatggcaaaaggaatgacttttcgtcacatgttatacccttcctacaagagcaaccgcatcccgacaccagacaccattgtccagggcatgcaatacttgaaggcatctattaaagcgatgtcaatcaaagtgattgaggttcctggtgtcgaagctgatgatgttattggcacactagctgtcagcagtgtatctgcaggctacaaggtacggattgtctcccctgataaagacttcttccaaattctttcaccttctttacgtttgctgaggattgctcctcgtggttctgggatggtttcatttggagttgaagactttgtcaagagatatggagcactgaaaccatcacagtttgttgacgttgttgcgctttctggagataaagccgacaatataccaggagttgaagggattggagatattaatgcggtaaaactgataactaagtttggttccttggagaatctgttgaaatctgtggatgaagttgaggaagaacgaattaaacaggctttgatatctcaatctgaacaagcaatgctttgcaaaagcctggccacattacgttctgaccttccatcctatatggttccttttaagacatcggatcttgtgtttcagaagccaaaggatgatggagccaaattcataaaactcttgcgagctttggaagcatatgcagaaggctcgtcagcagacctaatcataagaagagccgcctatctttggaacaaacttaactcatgactatgctgatgtttccagcagtgacaacatacgaacttttcaagcacaaaagttccacctgagaagataggtgccttggtgctatgtttctgtcaaatttggtgcgagcggctcgctgtgctttctggcacaaaaggtggacggtgcatgtttagacaggctgtgcataccatgaaactgataattagttagttttgtagataaaagcacgtcatggctcatgcaatctacagaacatgatattttttacactctaatgaatggtggctgctggctggaaggtggaagaatggcatgtaggtacctgaaagcttaatcattcgattatgtgcaacttcgtagaaatattatctagtgacatgtcactattcatatgcacaatgataccaagttggtc

SEQ ID NO: 22395 - DNA, 601 bp, Oryza sativa
  ref <308>: DATABASE ACCESSION NUMBER: AK072580
  ref <309>: DATABASE ENTRY DATE: 2001-12-06
gtatcgtgcacatccatatccacgcgcacacgcagccggctggaaggaagaaaaaatgctgcggttctggaggacgcagaggagcgtcacgtcgtcagacgccttgtctgtgagtaaaacatatcgtggagatgaacgtccacatggactgcgagggctgcgagaagcgcgtgaggaaggccatgtcccggctcgaaggcgtgagcacggtggagatcgacatggacacgcagaaggtgacggtgacggggtacgtggaccggcgggaggtgctccgggcggcgcggcggacggggagggcggcggagttctggccgtggccgtacgacggcgagtactacccgttcgcgatccagtacctggaggacgacacctacatggcgacgcacaagtactacgtccacggctacaacgccccggtgatcggctcctaccccaaccacgccttcacccacatcgtcgacgaccacgccctcgccttcttccacgacgacaacgtccacgcctgctccatcatgtgacctaaaatataatcttatttaaaatcctacatgccagcgacagatacatatctgaccaaatcgaacaagctaagtgacct

SEQ ID NO: 22396 - DNA, 2361 bp, Oryza sativa
  ref <308>: DATABASE ACCESSION NUMBER: AK072581
  ref <309>: DATABASE ENTRY DATE: 2001-12-06
gatttgttccaaaccagtggaaagctagggttccgccgactcgcgagtggcgggagggccggtcgtccgtcagcactgcatcctccctctctttcgctagccgccatcgctctcttccactggttcgctctctccgtctctctgctatgcccctctctttcgtcgactctttccgttgagctctctggtaagggctaggttgtcttctcctcccttccttcgattttagccgatttgtttggattagaccgaccgtgtccccttcataaatatgctagatctactaaaagctgacatctttcttggttgatttcgatggaatgaaatgtctagtggcttgcttttcatttttcctacacttattcctatttttcctgttgatttgtgttatgccattgtatctttggctacaaatacaagttactgataaggccggatacaatagtgccttcttttaaattgatactgacagatacacacttgattaatagtgcttatttgtgatgcataagaacagatatgcccgcacttgaccttattcgataaggtcaggcaaccaaacatgccctttctaagtttctgtctttctgtgatctttctcagtattttatagttcaaatgatcttagcagaactgaggccacctctacacttgaactgagcagaatttataagagtacatgaacagatttttctacacttgttctttttttcgtgctgttaggctgggaaagatgaccaatgatgatatatgctgctgtttgtgatgcatgtgaatagatttttgctctacacttgttctcattttcttgcggtttcttttttcctacacttggtcttattttccttttccttgtactttttcttttgctacatttgatagatactggaaagaacagataccaatgacagtagctacttcacattcttcatatatctgaggccattgttctgcatttatttacctgctggaaatgaggctcaatgatgtcaaatttctgcacatatttgctacattttcgagttattgatgtcaggcaaatactatcaagttccttgttcatcttttgatatcaactgatgtactcatttttttaggtaaccacacttgattttgacatgatcaagtttttatatgaaaccgatacactctgcacttgctcttttggtaaagatcatactactattaagtgttgatgctcttggaacctgatctctgcaactcagatcctgtactatttcaaaggttttcattttgcaagtcatagcagaggttgactccacattactcccaaatggatcaaggggtggataagaatgttattgataattcgctagtttcaaactgtgacttccctgttgtaaaaaagttggacaagtgtgtaaatgaagaagcttctgtgcaatctccctttgaaaataaggacacaagatcccttggcatggtatgtgatcatgaaaataacaagagtggtgttgctgaggtgattacaccaccagagaatgaagcgattgaatcatatatctcaaaaagtgttgcagatgaagatccttcatatggatgtcagacaccgcgcgaaagcatctttgatccttttgctccaggaccagaggagttagcttgtgcaccaaagaagaaggtgaccaaggcaccagaacttccttcgcgaaggcagctaagttttgattcaggtgattaccctgttaaaaggttaagttttgaattcgatgatgctgaggaggaggatcagtttctcgaacggatctgcatgatgtttattgatctgattatctcaaatcaagcactagagacgactggaaaggatctgataggttctaattcacctagaagctgtgagaccccttcttcagagcctctacttacaggcattgcagacacctgcccagatgcgccactgaggcgacctcttaaagcggtacagctcagcccaagcatttgtcgaaagctcgactttgattcagtcagtccaaggtgtttattcgttaaagagaataagtgatatcttgacacccttttgatctgcccaggaacagcattttggggcagtttttggctaccaatttcagttgccctgtgccaatatggtaactttgctaactgaaacatgtaggtagtgatgctaaaggagtaggaggcagtttaataagttatacatgtaagctttaatcagtcttccttttgggtgggttagtcatatacaattaggagttgtggtctgtgaccacgtaccttttgtaagtcttaaaatggatagctgtgtctggttgaactagtgagtctgttgcaggttcatgatgtggatcgtctgaatgctgctcaatagtagttcatttttctttc

SEQ ID NO: 22397 - DNA, 1245 bp, Oryza sativa
  ref <308>: DATABASE ACCESSION NUMBER: AK072582
  ref <309>: DATABASE ENTRY DATE: 2001-12-06
gagctagagagaagcatgcagcgagaattaaggtaggaggagtagttgcttgcctccgtcctgatctccactgattcattgtgttatatatgcataagcataacgcaattaattaggaggccggtcagctcgatcatatcgcagggagtacgtagcaaattaatggcggccgtcgggctgttggtactagttggcctgcaggtggtggtcgggtcgatggcggcgcaagaagcaggtgatgccccggcgagcatcacggggccatgctcgcgtacaggagacaagaaggcgtgcgtggagttgttgtcgggcatcccggaggcccggaaggcgacgacggtgggccccctcgcggagctgtacctgcaggcaatcgccaaccacacgacggaggccaaggcgatggctaccaagctgctagccaccatgaaggggaagggcgtgccacccgtgtgcctccagcagtgcaccgccagcgtcgacaccctctccagcgccctcgccgccttcttctctgcctccgccgacgtcaacaaaaagtacagggacttggacggttttctcgtgggctttcttaaacaaccgcccatctgcatgagcgcgtgccccatccggtcgtgcgatatggaagaggtcactatcgccgacaagttccaccaagcctggaagatgttgggtgtcgcacacgacctcatcacgcagatcctaggcacaaagtcctagatacattaaggggcggatccataacaagatttaaggggaggactcgtgatctctttcttccttgttcagtcctctctacttttcattttctctctatttttccccctttcatttccccttctaccaatggtggtccagcgggataggggggactcgagtccccctagcacccacgttggatccgcccctggatacgttctatatgttggacattttgatttgccatcctactaccagaatttacctattaaataaatctttctaggttagcaacccaaatacttccttacaactgttttttttatttattttgacgggtgcgcatgtgtctgttcccacctccaatcgaggaataggaatttttatcataccagtgtgggtattattgttatatactcctatgttgttgaaataactgagatcgttatttttaagatgtgcacattgtaactatttctatggggagaatgatttctatatattgacttgcactaataatatgtagcggcttttgattctctt

SEQ ID NO: 22398 - DNA, 2078 bp, Oryza sativa
  ref <308>: DATABASE ACCESSION NUMBER: AK072583
  ref <309>: DATABASE ENTRY DATE: 2001-12-06
ggcacaggccgagcaatggagctcatcgtcctaccttcacacagctgaaaaaattccctcatatacaagataaaggtaggaggagggccgggagctcgacggatttcgatcaattgtggtttttttttgtggtaaccgtataagagaggagattttgtttaacgtagctagatcatatctgagttgagttttagcaatggaggtgctgatccggtggagcaagctgccggcggccggctccttggtgctgtacgccgtcttcttattgctgtcggcggcagccacatcggaggccaacatcggggagtacgatgagtactggcagaagcgcaagctcatggctgatgccgccgccgaggctacctacaagcgtgaccccttcgaggtcaccaacagcttcaaccgcgccgtccacagatcggaggaggagagcgggaggagggagctggcgatgacgaagaggaagaagttcgcggggccgtgcaaggcgacgaacccgatcgaccggtgctggaggtgccgcgccgactgggtgacggacaggaagcggctggcgcggtgcgcgcaggggttcggccggaacaccaccggagggctggccgggaagttctacctggtgacggacggcaccgacgacgacgtggagaacccgcgcccggggacgctccggtggggtgtcatccaggacgagccactgtggatcatcttcgccaaggacatgatcatcaacctcaaggaggagatgatgatcaacagcgacaagacgatcgacgggcggggagcgcaggtgcggatcaccaatggcgcgcaggtgacggtgcagaactccaacaacgtgatcatccacaacatccacatccacgacatcttgcaaggcaagggcgggatgatccgcgactcgccggagcacttcggcttccgcacccagtccgacggcgacggcatcagcatcttcggctccaccaacgtctggctcgaccacctctccctctccaactgccaggacggcctcatcgacgtcatcgccaagtccaccggagtcaccatctccaactgccacctcaccaaccacaacgacgtcatgctcttcggctccagcgactccttcagcgaggaccagatcatgcagatcaccgtcgctttcaaccacttcggccgcggcctcgtccaaagaatgcccagatgccgatggggatttttccacgtggtgaacaacgactacacgcactggctcatgtatgccatcggagggagcaagaacccgacgatcatcagccaggggaacaggtacatcgcgccgccaaacctagcggcgaagcggatcacgaagcagctcggggcgacggaggaggagtggaagaactgggtgtggcactctgaggaggacctgttcatggagggggcctacttcaccacgtccggtggcccgatccagaagcagttcagcaacaaggatctgatcaagcccaagcccggatcctacgtcacgaggctcacccgcttcgctggctccatcccatgcgtggccggcaagccgtgctagagcgcggtggccggcccccaccggatccacggctagccggagatgattcttattttgtagttgtgtgagcttattttttcttctacacatacgtacttactcaagaaatcttgatctgtggccggccgggttctggtcaatgtgatcctataggttctacatataaaaaagttgtattaattaaaagcatttttggaagcggtggcgatgcaaatttagagggcgatagggcgaggagcatgcatgtttgtgcgtataggtctacttgttgatggtgatcacgaaagagccaatgcattgtcatgatagaggacatgcgcatttatgcagaaggccctagggcaggaattatttttttttcattgattgttttaaatgtattgtactgaaactacattgttgtttcattaactgcacgcatctccaatgcaaagtgctaatgtaaggtgtttaatatatagtgctaatgtaaagtgcaatgaagcatctcactactatagaagatgacttcagtgtcgggtcgtaacccctcacc

SEQ ID NO: 22399 - DNA, 2445 bp, Oryza sativa
  ref <308>: DATABASE ACCESSION NUMBER: AK072584
  ref <309>: DATABASE ENTRY DATE: 2001-12-06
ggctaagccaaagccaagccacgcgcgacccaatcccccgatccctcctccccctccctccctccctccctccatggcgtcggagatcgaggtgctcgaggacaccaccgccgccgccgccgccccggccgccaccatcggaggcggagaggtcgcgggcgcgggcgcgggggaggagggggaggcggcggcggatgcggaggcgctcaaggacgacgtgtacacgggcgcggcgtacggggacctcgagaagctgcaccgcctcgtggagcgggagggccggccggtgacggagcccgacgccctcggctaccacgcgctccagtgggccgccctcaacaaccgcgtcgccgccgcccagtacatcctcgagcatggagcagatgtaaatgctatagaccatacagggcaaacagcactccactggagtgcggtacgtggtcatattcaagttgcagaactacttctgaaagaaggagctaaggtggatgccgctgatttatatggatatcagactacacatgttgcagcacagtatggtcaaacatcatatctttatcatattgttgcaaaatggaatgctgatcctgatgtccctgataatgatggaagaagtcctctccactgggctgcttataaaggatttgcagattctgtacgcctccttttgtttttgggtgcatatagggggcggcaagataaagaaggttgcactcctttgcattgggctgctatccgcgggaatttggagtcatgcactgtgctggttcaggctggtaaaaaggaggatcttatggtgcaagacaataccggcttaactccagcccaacttgctgctgataaaaatcatcggcaagttgcctttttccttgggaatgctagaagagtacatgagagaggatgtggtgggaacagttattttgggaaactatcaaaattaggactcgcccctcttctttggtgtattattattggcttaatttatatatatgtatattcagttatctcaggacaatatagcagtaatatgacattactatttgggttattttcatggttgggaattttccttgctactgccggattggttatgttctataagtgtagcagaaaagatcctggctacattgacaagaatacaagagatgcccaaaatcaaagagatgatgaacctttgttgaagaggggtctagacaaccctgaacttctggctggcaattggtctcagctatgtataacctgcaaaattgttaggcctgtacgctcaaaacattgctctacatgcgatcgctgtgttgagcaatttgaccatcactgcccttgggtgtctaattgcattggaaagaagaacaaatgggaattttttatgttcctgatcctagaagtttctgcaatgattattactggtgtgacggccgtcataagagtagtaggagacccagattctcctgcatcatttggtggatggcttaattattcagccactaaccatccttgggtggtgtcttttgttgtgatggatctctttcttttctttggcgttataactctaactgtagttcaagcatcacagatatccaggaatttaacaacaaatgagatggcaaatgccatgaggtatagttatctcagaggcccaggtggccgattcagaaatccatttgaccatggggtgcgtaaaaactgttctgacttcttgctgaaagggtacaatgaggatattgagagggtagaacagacattacaacctgatgaggaattgggaatgattcaaatgacaagaagtgcagtctcacagaatggcgagagcatgtcacttcatgctaatggcacagaccatggttgtgctgatccacaagggaactcaaaatcccatcgtcactcgcacggttcatcacaatgttgcagtcacagtaagagacctgacaagacccccttggggctaggattgggccttggtcgtaacaacccatctagccgctacacacgttcacttccttccattcattcggagagtagtgcttatttgcccttgtgattcttttggagaaggcgagctagatcgtatttcaacttgtaggtgtttattgcacaaccacagctttcttttggctatttcttcctgcagtatttgtcgcttggatctggtctcatcgacattgccagggtgtggtatatttggaggcccaatcaaccgactactgaaattgagaatatgaaggagatgcaagttttatgaaggcttcatgaacatccttagcctctcaggaacaccagcgaatgtctgtctaggcgtagcaatattttttgtgcaaaagtgcatctttgtacaatgtctcaacatcttgtatgtacaagagggttagctgtccagatactatgatgttttcaagtacagctgtatattggaagaactgtaaatttatatagcgaaaccaaatgctg

SEQ ID NO: 22400 - DNA, 2523 bp, Oryza sativa
  ref <308>: DATABASE ACCESSION NUMBER: AK072585
  ref <309>: DATABASE ENTRY DATE: 2001-12-06
gagaccgcacctctcctcctcgctcgctcctcctcctccccgcgtcctggcaggagctcctccccgctgccgccgctcctccgcgccatgccgtagccgccgccgggtccttcttctttcccacctccgggtcttgcttcttccccatccccaccgacacggccgacctcttcgctcatgcctcctcctccctgctgccgccgctctgccgcatccttgccggagctctgccggagctccgccggactcttactcggagccgccgccggagcaggcctcggcccctcatcaaacctcaatcgcgatctccctcgctcgatgcaaagcagcggacttcagcgatcaacgcttgattgccaaatggcccgatccagccgctccgctgccaaggccaccaccccgagatcgtgtggatctggctgctccgccgccgaggccctccaaccctgagcccttctgccatgagtctgcagcaggctccattgttgtgttcaccacctgagcccctcaccgccagatcgcagtccactccaccgtgtagtcgctgtcctgtgcccctttgcagcttcactgccgaggccaacatccaggttgccagaccaccaccttcttcaacaccatattgtggcccttgacttctgcctgattgccgtcacagagacgttcatcaaccctaggtggccatggtaccacgatgctgcggtgattgctgatactattcctgttatgtcatgcttgatgctgaatcacgagggattctccaagagttggaagctgtcaaacagcactaggcagtcaagttgtagaaatggtgaaaagtatggagaagctgcagtcaagttgcttgccgctacattacgagtaacatgtgatttttcatctgaagaccaatccagaaatattgggacaatttgactgaataactgctaattataaccaatgttttgctcgaagtgttattggatgttttcattagtggtacaggttgcttacgtaatctatgatcaatgggcgcttgctgataaaagaatgcatataaataacaattggtggaggcagaaaaggaggctggtcaagtcagcctcctgcaattatgtcactggtattatgctttcctatagctgatcttttccctcttcggtcatgttctgttctgttctgcttaccacacctctcctcctccccaaaaaaaagatatggaacatcatcatgtagaaactaaaatttaagttgactcaaattaagtagaaaacatgctagaacgaagtatccctccctcactgctgacaaaaggaatgagtgcttcaaaagaattgagagtacatgtagcggtcctagcagaagaaaggaagcatatggagcaataaattggtctgcctctattactattagaggtaagctgaaaatgattataatctcatttggatacagttagcataaatatgtaagtcataaactcacagtggtgcagtataaatttttttatatgaattttgaatagcaacccgatatgacacccatgcacattacatttacagagagcatatgacatgcttgcaatgatcaaaattccgaagaaatgtgcggttgttgtcgttatgagctgtgaggcccagcaagcagagcagattagtgtgatttattgattctatatgttaaaattgatatactacatcatgtttctatgttttgtagtgcagactttttctagagataatttgtgtatccattcaataatatttttttctacagctaattcaggcaaacaacaatgctgggatgatttttataagtaggacatgaacgctagaaagctaaattgacaccctggtgcctcccgtttatagatgtcaccaacaagaaatttatttgcaaagcactcaatttactgctctgcaattgcttcacaggtaacattcatgctttcaagtatgtactgttcattcatctatgcacatataaatgtgaattttatactgcagaaatagctcaccattcagtttcaatagtttatgttaatgtttccgtataacattggaaccatggcccatgcatccttttattagcaatattaactgctcagatcgggccggggggtgttatcttcagagggaggaaagtgtgaggaaaaagttttcatggcatcgttagttgttcccctgagaaaaacatatgtatccacctggatatttacaattttttgtttaccagaaagtaaatgatgagtataaccctaatcctctcattttagtcttcattttagataagtattccttattgaatgtaaaactgaagttacactgatgcatgaatacataattattctatgggattggttgttatttgtactactgagtactgaccattctctcatgatatatgaacagagcatatgctcctagcaagaaatgtggcatgggtgagtttattgtcttgctttcaccatgtatggaatgtggcatgtgagtttatactctttctttcaccatgttgactttttgcacatttatagaatcttttggt

SEQ ID NO: 22401 - DNA, 987 bp, Oryza sativa
  ref <308>: DATABASE ACCESSION NUMBER: AK072586
  ref <309>: DATABASE ENTRY DATE: 2001-12-06
ggatcgcccaccgacgagcggttcttgcatttcaccgagcgcgtgcgcgcggcagccagtcacccgcgggaatcgatcgacgatccatggccagcggctacccggcgggaggcgaacaaccctccggtcgcctcgtggtcctccggcctctgcgactgctacgacgacgtcggcggctgctgcctgaccttcttctgcccgtgcgtcgccttcgggaggatcgcggagatcgtcgaccagggagccacatcgtgctgcgcgagagggacgctgtatatgttgctggcgatggcgacggggttcgcgtgcgcctactcctgctgctaccgctccaggctgcaccagcagtacgggctccaggagaagccctgcggcgactgctgcgtccactggtgctgcgggccctgcgccctctgccaggagtaccgcgagctcaagagccgcggcttcgacatgtccctcggatggcaggggaacatggagaggatggggaagggcgtcgcgactgccccgccgcagatgcacccggggatgactcgctagtgcgcgtctgcgtccgcgggcatgtgggcttgcgttgcgccgatcaagctagcgcgtgcgtaggaagcgtagcaagcagtaggcagggcatgcctacgtgcaaggtcgacgtcaaacttgtttttagcttctgctatatttcatcttgtcgcgagagccatgagctctgatgtgtgcgtttccattggcaatattgtgtcgtcatcgccctcggccgggcacccaccatgtgttgtctatatatatgtgcctttgcaacagtgtcagccagatttgcgtgggtgtaaaaattgcaaagaggttatgtctttcatctgatgagtagtagcagtagtatgatgcaggcaatgtattaagactactggatcaatatgtagtatgttttatgatttcagttaataagatgctggaggcttttagcgtgaggcttactctcgcgtgtgt

SEQ ID NO: 22402 - DNA, 3683 bp, Oryza sativa
  ref <308>: DATABASE ACCESSION NUMBER: AK072587
  ref <309>: DATABASE ENTRY DATE: 2001-12-06
ggcactgcgctgcagccgcggctgctactgctacacgcaaccaaccccctcacacacacagtcaccgcaacgcaaggagaaaaaagcagcgaagcggaggaagagagaaagaaagcgacgctgctttttcttctttctttcttccaaccactccgggatcggggagcgaatcaaatatcattcgccgagggtgctggaggagagagaggccaacggtctcacaatgcaggggcagcatctaaacagccagactgtggatcttgcccgcaatcttcgggaaaaccagctaggaggagtgatatttggttgcaagcacaatacaatcgaggaatgcttcgaaaaacagctatttggtctgccttcagtccactattcatatgtgagaaatgtgaaacctggactacctttattcctattcaattatagtgacagaaagcttcatggcattttcgaggctgcaagtcctgggcagatgtgtattgatccatatgcgtggagtcatgatggttctttgaggacttcttttcctgcacaggttcgtatctgcacgaagactcgttatccaccattgatggagagccaattcagaacagtgcttggtgacaactattataaccaccaccacttctattttgagctagaccatgcccaaacaaaagctttgattgctgtgttcaaatcacttgctcctgccaatttcacgcaagttccagcggtttcgagcaaaaggactattgcacctttaccatcaactaaaaggcaggcacctgttatccctgaccaaaagaaagggtcagccagtccaaaggacatcaatccgtttagtgttctgtcacaatcaggtggtgctgttaaagataactgggctgattctgatgtggagaatggcagtattagcagaagttcagatgagaaggaatctagggagctagtttctgattgggaggatttggatgacaatgttcttcacggccaacttggtctttgttcaaatccagatgagatcagtcaaaactcctcatacaacagtgttgctaagggagcggagtttgtggaatgcagtcatttggttgtcaatcctgtgaatggaggaatccaaagttctgatggagacatgcttgtgatctcagatgatgtgcattcaggtgctgtgggtgttgatgggatagagagtgggggtcagaatgaaccagatgatgtctcgatacagcctgaaagactgtccatcctgcaaaaacttaaggagttgtttgttctacgacaacaggcagtgctatctgatcaaaatcttgcatattctaattcagatgaatatgcacctgaagaaacacaggccaatgtgagcctttcttgtccagagcaatgtgcacctgaagaaccacaggccaatacaaccccttcttgtccagagctacatgtacttgaagaaacacaggccaatgtgagccttctttgtccagagcaatatgtacctgaagaaccacaggccaatgcaagcctttcttgtccagagcaacatgtacctgaagaaccacaggccaatgcaagcctttcttgtccagagcaacatgtgcttgaagaaacacagcccaatgtgagccttccttgtccagggcaatatgtacctgaagaaccacaggccaatgcaagcctttcttgtccagagcaacatatacctgaagaaatacaagccaatgcaagccttccttgtccagatcagcatgtacctgaagaaccacaggatgatgcaagtttttcttgtccagagcaacatgtacctgaagaaacacagaccaatgcaagccttccttgtccagatcagcatgtacctgaagaaacacaggatgatgcaagcttttcttgtccagagcaacatgtacctgaagaaacacaggccaatgcaagccttccttgtcctggccagcatgtacctgacaatgcaagccttccttgtccagagcaacatgtgcctgaagaaacacagatcaatgcaggtctttcttgtccagatcagcatcttcccgaagaaacaaagttcaatgtcagtcttgcctatccagatcagcatgtaccagaggaaacacaggtcactgcaggcatttcttgcccagatcagcatgttcctgaagaaacacaggtcaatgcaagccttccctctccaaatcagcatgtaccagaagaaacaaaggccaccgcagccatttcttgtccagatcaacatgtaacacaggccaatgcaagcctttctcaacacgagttcggtgctaaggtggaagataatacatctcttgagcaaaatcaaggaaatgctgagctgataaaaatcgtccttggcttaatcaagaagactgattcattggatatgagacagaacaagtcccatgaagaaatactttctctgaaggaagtagttaaagactcgggaacaaaagtaaagcaactggaataccgtatagatgagttacaattcaaacttgactcttcactgtctcttgtcggagatgcatgtgatactctggacaagccatcgatattcctgataggtggttataatggtgtgtcctggttgtcatctcttgatgctttttcacctgagaaagacatactggtgcctctcgcaccattgagttctgctcgttcatatgcatctgttgctacattggagggttgcatattcgtctgtggtggtggggttggcgattcatttggtaacacagtggaatgctataatacaatgtgtaacgagtggatggcgtgcccctgtttgaacaataaaaagggaagtctcgctgcagtaagtctggatggaaaagtatatgctattggtggaggagatggaattgtaacttattcagatgttgagatgtttgatccttttcttgggaagtggatatgcagcccgtctatgatgaactctcgatttgctcttggtgcggcagaaatgaacagtgtcatctatgctactggtggatttgatggtttcagctacttacaatcagcagaaaggtatggcccaagggagggtttctgggcccggcttccaagtatgaatgtaaggagaggatgccacactgtagctgcccttggaggagtcctgtatgccattggagggtataatggggatagaatggtgtctagcgtagagatctttggcccacgtcgcaactcctggagggtgggtgatcccatgaactttccaagaggatacgcctctacagttaccctgggtgacaatgtgtttgtcattggcggtctacagtcgagtgaaaagtttatggattctgtggaagtttacaatgtgaaatgcggctggtcagttcctggtttcagctcgattggggtgaggtgcttcgcgtctgctgctgtcgtttaagcgtgttagaagtacagtgcttgtcccatctcatcagttctaacaattttgtgccatgcaaggaaacaaaccctaatcgtgttttccgacattttgagggtaaaaattgcccttctgctgtgattccagtttcgtgtacagcgaaagtcagcatagtatggagctctaggtagtcagtcacttgtccaaagtttagatcctcatttatatacctgaatattcacctactgttgagaaacaccctgttttatcaggtaccatgtaaatctcttggaatgcattccggctaaaaattctgaacttattaatc

SEQ ID NO: 22403 - DNA, 1910 bp, Oryza sativa
  ref <308>: DATABASE ACCESSION NUMBER: AK072588
  ref <309>: DATABASE ENTRY DATE: 2001-12-06
gagcagccacagctcgctttgcaattccaccaactaaaatcaaaccaccaaaacacaacacagggacgtatcgcacagccagtgagcgggtctagttcgagcagcatggcggcctccgcgatgagggtggccatcgccaccggggcgtcgttggcggtgcatttgttcgtcaagtcgttcgtgcaggcgcagcatcctgctctcaccttgctgctgccagtggctgtgtttgtcggcattgcggtgggcgcgaagggcgggagcggtggtgacgggaaggcgccgccggggccggcggccgtgccggtgttcggcaactggctgcaggtgggcaacgacctgaaccaccggttcctcgcggcgatgtcggcacggtacggtcccgtgttccgtctgcggctgggcgtgcgcaacctggtggtggtgtcggacccgaagctggcgacggaggtgctgcacacgcagggcgtggagttcggctcccgcccgcgcaacgtcgtcttcgacatcttcaccgccaacggcgccgacatggtgttcaccgagtacggcgaccactggcgacgcatgcgccgcgtcatgacgctgccgttcttcacggcgcgcgtcgtgcagcagtacaaggccatgtgggaggccgagatggacgccgtcgtggacgacgtgcgcggcgacgcggtggcgcagggcaccggcttcgtggtgcgacgcaggctgcagctcatgctgtacaacatcatgtaccggatgatgttcgacgcgcggttcgagtcggtggacgaccccatgttcatcgaggccaccaggttcaactccgagcgcagccgcctcgcgcagagcttcgagtacaactacggcgacttcatccccatcctccgtcccttcttgcgggggctacctcaacaagtgccgtgacctccagagcaggaggctcgccttcttcaacaacaactacgtcgagaagagaaggaaggtgatggacactccgggagacaggaacaagctccggtgcgcgatcgaccatatccttgaggcggagaagaacggcgagctgacggcggagaacgtgatctacatcgtggagaacatcaacgtggccgccatcgagacgacgctctggtccatcgagtgggcgctggccgaggtcgtcaaccacccggcggtgcagagcaaggtccgcgccgagatcaacgacgtgctcggcgacgacgagcccatcaccgagtccagcatccacaagctgacttacctgcaggccgtgatcaaggagacgctgcggctgcactccccgatcccgctgctggtgccgcacatgaacctggaggaggccaagctcggcgggtacaccatccccaagggatccaaggtggtggtgaacgcgtggtggctggccaacaacccggcgctgtgggagaaccccgaggagttccggcctgagcggttcttggagaaggagagcggcgtggacgccaccgtcgccgggaaggtggacttcaggttcctgcccttcggcgtgggccgccgcagctgcccggggatcatcctggcgctgcccatcctggcgctcatcgtcgggaagctggtgaggagcttcgagatggtgccgccgccgggcgtggagaagctggacgtgagcgagaaaggcgggcagttcagcctccacatcgccaagcactccgtcgtcgccttccaccccatctctgcctgaactcatcgaatcccttgaatcaagttcgtgccatcagtcgataaatccaattaaaatttttgtttgtttataaaattgcagaagaataggttataaatgacagcttacagcatgttttcagttttgtttcctaaagagtgtaatttgaaaagtgaaatggaattgtcatccaactagtgtgagaaagtgctctgctttgcgt

SEQ ID NO: 22404 - DNA, 2307 bp, Oryza sativa
  ref <308>: DATABASE ACCESSION NUMBER: AK072589
  ref <309>: DATABASE ENTRY DATE: 2001-12-06
ggagttctcacttctcacacaactcgcaaccctaataaagcgcaaaaaaggaaaaagaaaaatcgccacggaaaaatcctcgctgccccccatcgggcaggagcaaccgccgcatcggcccccgatccggtcgccgccgcctctagcccggttcatccgccgcttgccaacccctccgctcccagcaaccctagtcccccaccccaacgccgccgccagctcagctcgcctcgcgcggggcgcagccgactctctacttgtggcctcggcggctcgggccctctccggattccacgatgtctgaagatgcgtctgtcggggccagcagttcaacagtaaaagctggcgatgatccagaggctaccattgagatcaacatcaaaaccctggattcacaagttcataagctccgtgttaagaagaatgtacctgttctggtccttaaagagaagatagtagaggcaaccggggttcctgtggaccaacagcggttgatttttagaggaagagtcttaaaggacgatcacctgctatcagaatatcatttggaagatgggtacacattgcatttggttgctcggcgtgcagctgctgaaggccaacattcttctggtacttctgatgaaaacacccatgctaatgttaatgttgctggaaatggactgttaggagatatctccagggaaattatagaggctatgcattctgaggggatgatagatgacctggctaggagtgttcgggatatccttggctccctaggtcttgcgacgcctggtggcatgacaaacactacattttcggtgcctttaaccactgcaccagaaggggccaataatgtcaatggaagaactcaaccagggaatcatgcacaaccagggttttcaattctgaatcatcaaatccaagtatcacaactacaaccagcaggctctattcctcgcaacatggttattcctgattctctcacaactcttttggagtatatcaaccgcatggatcaagtactacagaataacggcacaccatctgttgatacaaatacccagcagccaccaagatcggatgatgcttatctaaatcaaagatttccaagtcctgaggttctggtgtcagtcattgaaagagcccaacaacttcttggtggcagtgctgcttctgctctttcacatctcgcacaacgaatccagagagattctggcaccagtgatgcatctatacgtagccagatccagaatgaatcagctcagctgggagtagcaatgcagcatttgggtgcaatgtttttggagcttggtcgaacaatgatgatgcttcggatggggccatcccctgctgatgcttttgtcaatgctggatcttctgtttatataaactctgcaggaccgaatccaatcatggttcagccatcttttcaaaatactcctccttttggagtttcgagcataccagtcctcggtggaatttctggtgcctttggtattgttgatccttctcgtacatctgctgtcaatacccatggtacttctacaacaagtgggtcatctgctggtatgaccactgcttctgcaggcgctgtcaatgaaggtcgtcaaaatgtggaaagaactcaaggaggtaacccatctgctacctcaatgcatggattgccagcaaggacagttattgcggctattcctgcacggtccacggctgaggctccaaaccatgtcctgagtgttatcctgcctgttcaagtgaggagtcaagtagcaatgcctaatcaatcaacagtttctcaaggttctcagactgcagtgggcggtggatctcaaccacaagcctctgtaggtggtgttgctagcattccttctatagtggcacaggtaactgcacaagtagccaatgcattgagtgcaaatcaacaaggccaggtttcatcatctgcgcagaacacagtagatcagggatctcgctcggtcacaactaatggagttgacaatgtggattctctggtatcagcaagtacgcaactgcaaaatgagctgtcagattctaacaatggacgcacttcactaaatgcacaatctcttgtagctggagcaggtatttctccttcaaacacatctgatcccaatttagcatcggaagacagcagcgctgaaaatgctcccaacatcggcagtattcaacaacatccagagatggaagggatccatgcagatgatgtcagaaaaccttctgaggaatcaacaacagccaacttagcggggcagatcacaaccacctgtacagatgatatttctgtgaacagatcagcagaaaatt

SEQ ID NO: 22405 - DNA, 1754 bp, Oryza sativa
  ref <308>: DATABASE ACCESSION NUMBER: AK072590
  ref <309>: DATABASE ENTRY DATE: 2001-12-06
gactcttcctcgtcttggggcacaactccgatttagggttagctcctcctcctcctcatcgctgattaggattcgattcgaccggatccctcgccgccttcgccatggatgatggtgatgagcccgtcccctacgtcatggatgagggtgtgctactacccttgctgtttccgccgccgctgccggccgacgacgacgccaccgccggcgtgagcccaagctgggtgtacctcgaagacagagcttacgtctcccccgatgccgtctccaactccaccaccgccttctccaccaccaccaccggcgtaagcatccatgtctccttctgcctcgcccgcccgccgcgcctctcctacctctgcgtccactgcccccgccccggcgacggcgagggcgcctaccggttcactgtcgatccccgagtcctcggcacgcacaccgatgtagccctcctccgcgtcccgcaccccaacgacgggctccaccgcggaatcaaatcctacgactacttcgtctacacggcccgcccaggcccgggcgcctccttgctccggctgctgccgaacccgcgggtctcccccttccgcaacgaggaggtcgccatcgtccgctgctccggcggcgcccgctacgtcatcgcctgcctcatgccaaccatcaggcgccccatggagttcaaggttatgcgcttcgactccgacgtcggccgctggaaatccacagctgtgtccatcagtgagccggtcgagagggacagggtgctccccatccctgacacggccagccagatggtcttccactgcaccaccaaggtcatcacgctcggcggcaccatcggctgggtggatctctggagagggatcctgctgtgtgacgacgtgcttgaccaacacctggtgctccgcgacgtgccactgcccaagccagcgagaagcaaccgcaaatccttctgcagagggccgccgcatcattaccgggacatcaccgttgtcgtgcaggactctgttcccacctgcatcaagtacgttgagatggtgacccgtcccggtgatcggccacctcctcgacaacgacagccgccgcaacattctgatgactctgactctgatgaggaagaggacgttgcttactactggaaggctaacatatggagcatgccgataccagttggttcatgggaggattggcagatggagtgcacggtggatgtcactgacatcgccgtcgacaatgtcaggttcagtgagctgctgccaaagattggcaatgatccagaggagacattgaggaggctggtcacaggtttccccacattgggtatggatggggatgtcatttctttcctgtccaagatcaatcgcttggatgataagggatgggttatctctgttgatctgaggagtaagacgctgcaaggcgtggctgagcttgatgagaggaagaatttcctcttcaagcgctactacaacaccagtgagatctccaaatatcttatcaaggctacaggtgaggcaggaactcttgtaaaaactggggttaatagtagagtctcaaaaaagaagaagtaggaattaattaatgaatcacgtaggctacctgggttgaagaaatgaaacgagctgcagagactgggcgattcatgagctactttctgtaatgagctattatcagagttgttctgtgcaagacatgctactttctgtaatggatttggttttcgtctgtttatcccaagttaaactgctatcttcccc

SEQ ID NO: 22406 - DNA, 2346 bp, Oryza sativa
  ref <308>: DATABASE ACCESSION NUMBER: AK072591
  ref <309>: DATABASE ENTRY DATE: 2001-12-06
ggtctcgctgctctgagtcgcgtcgcgtctccctcccgcgcgacggatccgagagccctaaaccctagaactccctcgccctcgcgtcggcgccatggaggacgaggagatggagaagaaggtgcagcagtacctgcagcggaaggggttccgcctcaccgagctcgcgttgcaggaggagcgcaaccgcatctccacctcctccgtctccgacgtcgcgctcgccaggtcggaaaatgatccggcaagatactatgatggttatagtaaactaagaacatgggcatacagttctctcgatcagtacaagcatgaattactccgtgtcctttacccagtgtttatccattccttcatggatctagtggcagagggacatacacaggaagctcggtcctttttccacacgttccatgaagaccatgaactgatgcattctagggatctccagaaactggaaggcattctttctccttcacatttggaggaaatggaactggccagatctttaaggaaaaatcaattcagaattaagttatgtgagtattcatatgagttactcctccagtatctccagaaaacacaagctcttgtggttcttggaataataaatgaacgcacaacttttgacgtatcccctggtcagccatctttaatctctgatgacacggatgttgttgctctagttggaacaaagaaggatttggcaaaacaaataaatctgaaggaggtgcattgggggttgcttgaagattcagttgaagagcgcatggagaaaacacttttagaatcagataaaactgaagcagaaagcaaggatgcagatgccgaagataacaataagagaaaatcttcggaaggtggaaagcagggaggttctgttaaaaaggtcaaaaaagataagattgcaggagccacagggagaaccaataaatctgaaacaagcatagtttcggtggcacctcgtgtgaaaccagagcttacacttccagtgattcctgttgaagtcgagcagtcaattcttgaggatttgcgaaaccgtgcacagttgaatagcctggcattgccatctgttagcttctacacattccttaatactcataatgggctaaattgctcatcaatttcacatgacggctctttggttgtgggtggattctctgactcatcagtgaaggtttgggatatgtcaaagattggccaaccgccgaaaacatctagtccacaaggagagaatggactttcccagggtgagcgcacatcagcatcagattatggaaaaagaccttatacattattccaaggtcattctggaccagtttattccgctgcatttagcccattcggagattttctcttgtcatcatcctcagactcaacaattcgactatggagtaccaagttgaatgctaatcttgtttgctacaaaggacacaactaccctgtttgggatgtacaatttagcccagttggtcattattttgctagcgcttctcatgacaggactgctagaatttggtcaatggataaaatccagcctttgcggataatggctggacatctctctgatgttgattgtgtgcagtggcatgttaactgtaactacattgccaccggctctagtgacaaaactgtaagattatgggatgttcaaactggtgaatgtatacggatgttcattggccataggagtatggttttatcattggctatgtctcctgatgggcgatacatggcctccggagatgaagatggaaccatcatgatgtgggatctctcttctggtcggtgcgtttcaccacttgggggacacagctcttgtgtgtggtcacttgcttacagttgtgaaggggcattgcttgcatctggatcagccgactgcactgtgaaactctgggatgttgcctccagcacgaaggtccttaagacagatgatacctcaactaaccggctgaggatgctcaaaactctccgtacaaaatcaactcctgtttatactctgcggttttctcggcgaaatcttttatttgcggctggtgctctctcacttggctcctaagcttctgtatgttctgtagaatacaactaccaaacattctttcagttttatctcaagtgaagttagtgcctagtgagtagtgagcctgcttttaaggttaatctgtagcacgcgcgtattgtaattcgttccaatgtttgttgtcttgtgactttgtaagttgtaacaatcgccttatttaaatcatgtaattctttttctggcggtgaaaaaccaaaaggaggtgatgggtactgctggaaggaagaattataaagaggtaaacaacgtggctaattttttttgtc

SEQ ID NO: 22407 - DNA, 1238 bp, Oryza sativa
  ref <308>: DATABASE ACCESSION NUMBER: AK072592
  ref <309>: DATABASE ENTRY DATE: 2001-12-06
gaacaaaaacaagaatggctgccatcttcatattcatatggttgttcgcctccgttttatccatttcatcagcttcttctcctttgctgatcaatggtagtactgctgatgctgcaccggactgcggtaccggcaacccgatcgacgactgctggcgttgcgaccccggctgggccgacaaccggcagcggctcgccgactgcgccgtcgggttcggccgccgcgccgtcggcgggaaggggggcagggtgtatgtcgtgaacgacaccggcgacgacgcagcccgcccggcacccggcacgctccggtacggcctcgtccaggacgagcccctctggatcgtgttcgccggcgacatgaccatcagccccgcccacgagctggtcgttagctcgcgcaagaccgtggacggcaggggcgcccgcgtggtggttggcgacggcggcgcgtgcttcgcggtgaggggcgcgagcgacgtcgtcatccacgggcttaccatacgccggtgcaggccggcacccaagctggaggccggcatgtcggacggcgacggcgtccacaactcgagcgacgtgtgggtcgaccactgcacggtggaggcctgcgccgacgggctgatcgacgtggtcgtaggttccacccgcgtgacgctttccaacaacctcctgcgcaaccatgacaaggcaattctcctcggccacaacgacgactacaccgacgacaaggccatgcaggtcaccgttgccttcaatcgctttggaccaggcctcgtccaaagaatgccaaggtgtcggtttggtcttttccacgtcatcaacaacgattacatagcatggcaaaagtacgccattgggggcagtgcttcaccgaccataattagccacggcaacagattctatgctgatatggccaaagaggtgacgaagcgcgatgacgatgtgccggagagcgtgtggcaccactggaactgggtatccgacggcgacctgatgctcaacggcgcgttcttcagggcatcaggcgaagcaaggacagataatttgaaagcccctagctttgcaaggtctgccccctccgtgccgtcgatgacttcctcggcaggcgccctctcctgcaaggagggctcgcactgctgagatcagctactgctgcattcgatgatttttctttctggatgtaatagttgcataggatcgaacaagattaaacaagcctatcagaagatgtgaatggcagcg

SEQ ID NO: 22408 - DNA, 1996 bp, Oryza sativa
  ref <308>: DATABASE ACCESSION NUMBER: AK072593
  ref <309>: DATABASE ENTRY DATE: 2001-12-06
gaccgcacagtgaggccacgtcgtagggtttttgcttgcttctcccggctgcaaagcggagccgcggcgcggcccggggacgaggagggaggggagccatggagatcgggcagcatccggcgagcggctactccaaggagcaccagaagacctaccaggagtggttcgccttcgccgactcagatggcgacgggcgcatcacggggcccgacgccatcaagttcttcgccatgtccaagctcccccgcgccgacctcaagcaggtttgggcaatcgcggactccaagcggcaggggtacttaggtttcagcgaattcgtcacggcaatgcagcttgtctctctggcgcaagcgggggatgagatcactcaagacagccttaagcgcgatgacttgggcagcctgaatcctccaacgatggatggtttggatgctctacttgtgaaatcaaagcatcatgctaagagagttgatccagatatcgatggatttcctcaggctcaatctcctgcaacgagccaatggttcagctcaaagtcctcaaagaagatacccctgaatgctgttacttctgtcattgatgggttaaaaaaactatacatcgaaaaattaaagcctttggaagttacatacaaattcaatgattttgtatctccattactgacaaatagtgattttgatgcaaagccaatggttatgcttttaggtcaatattctacagggaaaacaacttttataaaacatctgctcagaacaagctatccaggtgcccatattggaccagagccaacaactgacagatttgttgttgtcatgtcaggaccagatgaaaggactattcctgggaataccatagctgtgcaagcagacatgcctttcagtggtcttacaacatttggaactgcttttttatccaagttcgaatgctctcagatgccacatccactactagagcatatcacctttgtcgacacacctggtgttctctcaggcgagaagcaacggacgcaacgtagctatgatttcactggtgtcacatcatggtttgcggccaagtgtgatcttattcttcttctgtttgatccacataagcttgatatcagtgatgagttcaaacgtgtcattggatctttacgcggacatgatgacaaaatacgtgtagtgctaaacaaggcagaccaagttgacactcagcagcttatgagagtctatggtgcattgatgtggtctcttgggaaagtattgaatacccctgaggttgcacgtgtttatattggatcatttaatgacaaaccagtaaatgaatcagctgttggtccaattggaaaggaactatttgagagagagcaagatgatctactttctgatctgaaagatataccgaagaaagcttgtgaccgtcgaatcaatgaatttgttaaacgtgcaagagcagccaagattcatgcccatataattggtcatttgaagaaggagatgcctgcgatgatgggcaaagccaaagctcagcagcgacttatagacaatttggagaatgagttcgcaaaggtccaaagggaacaacatcttccagctggagatttcccttatgtggagcatttcagagatgtcctgggtgggtatagcattgacaagtttgagaaaatcaagcccaagatggtgcaggcggtggatgatatgcttggatacgacattccagaactcctcaagaacttcaggaacccatacgagtgaatgaacacctttaaattatgaccatggttttcaactttttatcatgatgagagactagtcatattcggagggaatagggatgcgctgcattccatagttttgcaactgtcagaaatctgggattgctgaggtttaggtcttgtaactcttgtagggcgtttattgtggcatactttaccttgttgtataactgcatgcataagaatctgagagccattgctcaattcttttcaacgaagatgtgaactgttggaaggcaatgt

SEQ ID NO: 22409 - DNA, 1023 bp, Oryza sativa
  ref <308>: DATABASE ACCESSION NUMBER: AK072594
  ref <309>: DATABASE ENTRY DATE: 2001-12-06
gcgagaggcaatccgccgccgccgcctgcgccgatccccatccgccccgcgagcgagcagaggcggcgctgccgctcgtcctgctgcttccgccgcatccacatccttcgccgccgccgccgccgcctgcgccgatccccccatccatcccgcgagcgagcatcctgctgcttccgccgcatcctgtttgggggtgttgaactgaaccccccatgccccatgttagatccgcccatgaatggatcatgattcactccaaaacactatggagcatcctgttcctggagaggagcatgaggaggataacagcatgaaagtggatgtggcatttgatggagtgcacagcccgttccggtacaggcacaagaaaaggtccaaggtttgggaggagtacaagcccatctttctgaatgggaaggttcagtttgcggagtgtctctactgccataatcgcctcagctgcaaagattccaacggcacaagccatctatggcggcatcagaaaatctgccctggcaaggaggaagcggcgcagaggcgacagaaggattcctacttcccatgcgttttggtgaatgagaacgatccagtttcaccccacgatccggtcaatgatgttattacagagacgcttagtgatataaactcggtaacacccagcggtaacagattcacgtcaaaggtgtggaaggagtttacacctgtctatattgaggggaaactccaggctgcagattgcattcactgccagaagcgcctcagtgcgaataagttcggggggagaagccatctgagtcgacatcttataacctgtgcaggacgacgtggacgtggagggggccaaattcatcagaagggtttattttatccttctagcgtgcctagtttgaagtccagggtgcaagatgagctctcacctgccttgacaaatgggaaggttcagatcgcagaatactctagcaagcttctgagggcaagtagctctggtgactcgacccctaagcccattcgagtggtaccagc

SEQ ID NO: 22410 - DNA, 1373 bp, Oryza sativa
  ref <308>: DATABASE ACCESSION NUMBER: AK072595
  ref <309>: DATABASE ENTRY DATE: 2001-12-06
gatcccatccatccaagcacacgcgcgcacacgcacgcacgcacgtacatcgcgcgcgccacgccacgccacgccgcggtcacaccgttccaagccactctcacacgcacgcgcgtcgccgccactacactctcatggctttcacggtcaaggcgtcgtcgccgtcgtcgccggctgcttcttcttcttcttcctcggcgccagctaagctcggagcggcgccggggagggtcgcggtcaggaagctcaccgcggcggcgacgtcgcttaggctcgatcgggcgcccgcggcgccggcgacggagcgcgggctgtcgtcggtgtcgcggaccatgtcgaggctgatggagaaggggaagacggcgttcatcccgtacatcaccgccggcgacccggacatggggacgacggcggaggcgctgcggctgctcgacgcgtgcggcgccgacgtcatcgagctcggcgtgcccttctccgacccctacaacgacggccccgtcatccaggcctccgccgcgcgggcgctctccgccggcgccacgatggacgggatcatgtcgatgctcgcggaggtgacgccggagctgtcatgcccggtggtgctcttctcctatctcggccccatcgtccggcgaggtccggccaacttcaccgccgcagccaaagaagccggcgtacaaggtctaatagtacctgatcttccttacctagaggcatgctctttcaggagtgaagttatcaagaacaacctagagctggtgctgcttactacaccaactacaccaccagacaggatgaaggcaatcacagccgcctcaggaggatttgtttacctggttagtgtcaatggagttacaggatctcgccaagacgtgaacccgcgtgttgagcatctccttcaggagattaagcaggtcactgacaaagctgtgtgtgttggctatggcatatcaacccctgatcatgttagacagatagcagagtggggtgcagatggggtgatcattggcagtgcaatggtgaggcagctgggtgaagcagcttctcccaagcaaggggctgaaaaggctggagaagtatgctaggagcctgaagaatgcacttccatagaagctataaaaacaagttgctaaataatggcatgagagattaattaattaatctcttggtgatgactagctacatgcataaaagggaagctgaagctgcctttctcatagtctcatagttaactgtaccgcaaattagcactagaaagtgttatagataataagtgatgtataggcatccagatccttggggactgtaaaacacctcgtctgtgtagaggtcggatgttaattcttcggttgttcgaagaaaataattgctgc

SEQ ID NO: 22411 - DNA, 1295 bp, Oryza sativa
  ref <308>: DATABASE ACCESSION NUMBER: AK072596
  ref <309>: DATABASE ENTRY DATE: 2001-12-06
gatcggactcggagcaaaacacaatagaggagcagagcagagcacagtgagctagtagcagaggccacactagcgttgagatggcgcgcgaggcggagaaggacgcggcggcggcggcggagatcccgctgctgacgccgtacaagatggggcggttcgagctctcccaccgtgtggtgctcgcgccgctcacgcggaaccgctcctacggcaacgtgctgtactacacgcagcgcgccaccagcggcggcctcctcgtcacggaggccaccggcgtctccgacaccgcgcagggctacccggacacccccggcatctggacgcagcagcaggtcgaggcgtggaagcccatcgtcgacgccgtccaccgcaagggcgccctcttcatctgccagctctggcacgtcggcagggtctccaccaacgaataccaacctgacgggcaggcgcccatctcaagcacagacaggcagatcacaccggacgattcaggcatcgtctactcgaaaccccgacggctgaggacggaggagatccctcagatcatcgacgacttcaggcgagccgcgcggaacgccatcgaggccgggttcgacggcgtggagatccacggcgcgcacggctacctcctggagcagttcatgaaggacagcgccaacgaccgcagcgacgagtacggtggcagcctcgagaaccggtgccgcttcgttgtcgaggtgatcgacgccatcgtcgccgaggttggagcgcaccgtgtggggatcaggctgtcaccgttcatcgactatatggactgcgtcgactccgacccggtggctctcggctcgtacatggtgcagcagctcaacaagcacccggggtttctctactgccacatggtggagccaagaatggccatcgtggaaggacgcaggaagatcacccatggcctcctgccattccggaagctgttcaatggcactttcatcgctgccggaggatacgatcgggaggaaggaaacaaggtgatagccgatggatatgctgacctcgtcgcctacgggaggcacttcttggccaatccggacttgcccaagaggttcgcgatcaacgcaccattgaacaagtataataggtccaccttttacatacaggatcctgttgttggctacacggactatcctttccttgatgagaaagacgagggcgctgctacttatgcttaatcctcaattaaattgtcaaattgaaatgttcggtttagtaatgtgcactatatttgtgatacactcataagtgaccctcacttccatccg

SEQ ID NO: 22412 - DNA, 2349 bp, Oryza sativa
  ref <308>: DATABASE ACCESSION NUMBER: AK072597
  ref <309>: DATABASE ENTRY DATE: 2001-12-06
gggtggcgatctgcgatggtcgtctcgtccgcgacaccccggccccaattccaacacgcgtgcccagcagccgcagatctctctccaaattccccaatccaaatccgccctcgcctcgccccgatcgatcccctcgattcgattcgatcccgcccgatgcgagtggaggcggcggcggcggcggcggaggccgtggcggcgtgcgcgcgagcttagggtttctagggtttgcgctagggtttgggggcgcgcccgcgatgggccggtctcgcggggtgcccaattccggcgacgatgaaacgaaccacaggtcgaagcggaggagggtcgcgtcgagcggcgatgcgccggactcgctctcggcggcctgcgggggagccggagagggtggtgggaagaaggcgctgtaccactgcaactactgcaataaggatatttccgggaagatccggatcaagtgctccaagtgccccgacttcgacctctgcgtcgagtgcttctcggtcggcgccgaggtcaccccgcaccgcagcaaccatccttacagggtcatggacaacctgtctttccctcttatttgtccagattggaatgcagacgaggaaatccttcttctagagggaattgaaatgtatggtctgggaaattgggctgaagttgcggagcatgttggcaccaagaccaaggcacaatgcattgatcattatacaactgcatacatgaactcaccttgttatccccttccggatatgtctcatgttaacggtaagaacaggaaggaattgcttgctatggctaaagtacaaggcgagagtaaaaaagtgttaccaggggatttgacccctaaggacgagtctccattttctcccccaagggtcaaggtggaagatgcacttggagaaggtttagctggtcgatcaccttcacacatagctgggggtgcaaataagaaagcatcaaatgttggacaattcaaagatggtgctaatgtagcaaaagttgaagatggtcatgtggatagaagtataggtgtgaaaaaaccccgatattctgcagatgaagggccttctttgactgaactgagtggatacaattcaaagagacatgaatttgacccagagtatgataacgatgctgaacaggcactcgctgagatggagtttaaagaaactgattcggaaactgatcgtgaactgaagctaagggtattgcgtatttacttgtcaaggcttgatgaaagaaaaaggagaaaagagttcatactggaaagaaacttactatttcctaatcctttggagaaggatctcacaaatgaagacaaggaagtttaccatcgctataaggtgttcatgcgtttcctttctaaggaggaacatgaagcacttgttaggagtgttcttgaggaacggaaaattcgaaggaggattcaagagcttcaggaatgtcgttctgctggatgccgtacattggctgaagcaaagattcacatagagcaaaagaggaaaaaggaacatgaggtgaatgcccaaaaagctaaggaaagtggtcagctcttatccaacactaaagtggtgcataagacgaatcgacctatgaaaatcgagtcagatggtaatttggatcagaagaaaggtggtgccagcttggattctactggcagggattctccaaaaaccacagggcatgcaggcactaaacattgggatgactgggatattgttggttttcctggggcagagctattaagcaccagtgaaaaaaatctatgctgtcagaacagattgctacccaaccattacctgaaaatgcaggaggttttgatgcaggaaatattcaagggtagtgtcgccaagaaggaagatgcccatgtattatttaaggttgaccctgccaaagtagataacgtttatgatatggtgacgaaaaagttgggtaccaatgaggaggccccgactgtttagccatgtttttgagttcctcaatcagcgcgtggtttctgatttgcagcatgactactgagacagctaaaatggaggctatacttgaattaaattggctgtagttgaaatttgtgtgaggtgtctgaagaagcacaataaggcatttcagccaaattgtaaaattatcgccccgattggaatgtgtagcatgagtttaccataccattactctccattttaagaggatggtttgccctcgttcgaagtgtaacgtgtaacgtgttgcagagccactaaaagggccttgacagtatagtgcctgaaatgatgtatgtaaacattgccacctttttcatatgtgacatcgttccgataccagacgctatttaattgttgtatttcactgcct

SEQ ID NO: 22413 - DNA, 2035 bp, Oryza sativa
  ref <308>: DATABASE ACCESSION NUMBER: AK072598
  ref <309>: DATABASE ENTRY DATE: 2001-12-06
gacggccaatctctgccccttgctacctcccgcggcgccgccgccgccgatcagcaccagccgaagtccaggcaggcggctcgcaggagcagctcagcagcggcgaggaccaagtcgtcaagtcgacgcggaggcaatgcactaatgcagaggccaaatcgaaggaggcggcggggtaggtcctgccgtggaggtcgaatccccggaggggaacgagccggcgaggtgggattcggccggccgcatacacgcgcctccaagtccactttacaggaaaaagacttgatggcacttggtttgcatccaccagagaagatggtgtgcctctgacttttatattaggacaagagaatgtgatgcgaggcttcagtatggctgttagctcaatgcaagcaggggagaaagctgtgttcaccatccctccagaattagcaggcaccaagtctcggtgtccagttgatatcccagggaatattgcccccaatgaagcactgcggtttgatattgagctcatctctcttgtcaccataactgacatcctcgatgatgaaggcatactgaaaaagatcatcaagcgtggactggggagcgataagccttgtgatttggatgaagcacttgtgaactacaatgcttgcctggaggatgggatgtcagtgtccatgtctgaaggtattgagttcaaccttgcggaaggcttcttttgtcctgcatttgcacgtgctgtggagactatgacagaaggagaggaagctgttctcattgttaaacctgaatatggttttggtgaacggggtagaccatccataggggatgaagccggtgtgccacctgatgcaactctctatgtgtaccttcaattgatgtcatggaaaacagtgaggcacattggagagaatgggacaatcctcaagaaaaccctttgtagaggaaatttggaaggacagcagacagagaatgaagcagtggtcggagttcgactgattggtaaactgcaagatggggctgtatttgatcagaggggccacgaaggagatgagccgttcaagttcatggttgacgaagagcaggttagcgaaggcctagaggaagctgttcttacaatgcgggagggagaggtctccttgttcaccattcccccccatcgtgtgcaggatcaacttttggttgtccctgttggctcttccgtgacctacgaaatcgagcttgtctcagttgtaaatgacaagcctccccggctcatgagtcaagcagagaccatcgaagctgcagctgaaaaggaaaaggagggagacaaactgttcagctcaagcaaatttttgagagcttacaggagatattacaaggccaggcagatcatactcctgcgctttggacgaggagaaacagatgaagaaattaaacaaatgttgatttcccttaccttcaaagctgctgagtgcgcgaatcagcttcaacgctatgaacaagcataccaccgctatcgtgagatattggagtatgaccctggaaatgtgaaagcacgggaaatgacagggcgggcattccctgaagcatctcttggaatagacactgccgcaatgcataggggcttggatcagccatttaggccgaaagaagagtttcgcgtgtgcggcggctacatgaccccggagttctctgagatgagactgaagcaagggcataaataccatggaagtataaatatttttgtccctcctatcccaagaccagagaccaatgcaaatcaagctgttccagctgctcctacaggccacaggctcacacacagccctactacacctccaggtccaaataatgagaaaagaaacagaagcagtcgtgttccagtcgctgccaggaaggggctagcttcttgcttcagatgcatctcttcagattgtaactgaagacatgttccctgaaagcaataaagaaaaaaaatcttgaccagcaacagggctgtactaacactagtttattttttttcgaactaataatttaacttaggtcgaaattaatgacgattctatgg

SEQ ID NO: 22414 - DNA, 1235 bp, Oryza sativa
  ref <308>: DATABASE ACCESSION NUMBER: AK072599
  ref <309>: DATABASE ENTRY DATE: 2001-12-06
gttaatattgctagagagcgcgggccgatggttgagccgtccaagagcggcggcggcgcggcgctccggcgagcggcggccggagtcgctctcccggttggcgttgtgtatgtgatagaaggccaggaacccgcgccattgctcttctcaacaggagcaggtgagatctctgacctgtcaacggcaaggtcgtcttcctcgtcatggaccttctctccctcccatggcgtcgcccacctccgaggtctgtacactccataaaccaacctctcctcctcccataacgcagcgttgccggatctacgccctccagagtctgaacccctccgaatcctctccgttgcgtgtctctggggtaaagtaggctatggaggagcaacttgctttctatttacttcggatgctaagattgttcatctcaaattgctaatacatttcgcataaagaaattgctaatacatgcctccagatgccttttttttctcaagtcatcctactgagttggcgactagtaggtgttaattgctgctagttttcctactgaacatacctaacaatactgttatgggtgaatttttgtaggctcagattttcttactgaagaaataacagaagcaatcgatggaataactcaacaacatctcagcaatggccaacccaaggccgaatcccaatccagaaaagaggaacaacacaatatctacggatttcttcttggaagggatcacattcagaattgtcatgttgatgcaacctttagatagcggaggaccacacaaatcattattccccagaaatgagctgttggtgaatgtcaagaaatgaagtgattcagatagatccaaagcttccagctgcttcagcccaccaagttgagatggaattggcccagtgaggaagttatgtgacatatttatcccatgagttaaaacaagttccccaacaatttctgggatgctaccattgaatgcattattggagaaatcaatgaatacaagggttcttagtatttgagcaagtgtggtgtcatgacctttgtatgtgagtgaggctttatatctatatactagtcctacacttggcacagcatgatccatgaccaatgatgtatttgagtctatatgtagcatcgactccaacttcttaaaccacttgtctttgggcaacggaccagagaagttatttgaggatatgtcaataattattgcatttggaaatgcacatgtgctttcttc

SEQ ID NO: 22415 - DNA, 2854 bp, Oryza sativa
  ref <308>: DATABASE ACCESSION NUMBER: AK072600
  ref <309>: DATABASE ENTRY DATE: 2001-12-06
ggaggagaggcagtcgctccttctgcttggcggctggactggagaacgaacggccgccgcatcgtcgcgaggtttttaggggagggagccgccggagaagggggaggagaggaggagcgcgccgaggtcggagggaggaaggaggaggagagagatggccgccatggttggagcacgcagggccctcctagctgcccgttactcgcctcgcggcgcgctcgcttcgcccgtccgtcgcgtggattcgccgcccagtcttccagctgacagaggttgtctgtggcctttggttccacatcgaggcgctggcaatttcgcatcagaacagatcgatggggactatcaccgcgaatggggagcacgtaatgatgggaactacagggagccccatcgaactgatagtctcagccaccaagttcaggcaaatctcccttcaactgattcctctgtaggagctgatagaattagaggtgtgagtggtgatggaagtgtcaatgctaattacagacgcaatcctgggcaaccggagtttccaaatcgtcatgagccgtacagtagtgcaagggtgaataatggagcatctggatataatgacaggcaaccctatggcagtgccaatgcacagtacagaagcaattctgcgcagccttcccaaacaggtggaccatatggatttgcgaatcgtaatgagccatatactagtgcaagagtgaattatgaagcacctggatacaatgacaagcaaccttatggtggtggtactacatacaaccagcaaatcgctaatggggatctaccaaattcccagtatagccgcagacaaggtaataatagtggcgtttctggatatggtacagggcatcattatcatggatctgacacatacagatctggctacaacacccaaaataaccagcaggcatatgatagtaggcagtatggatatggcccttcaggacaatcatatcaagaatcaactggaaatgatcagcaagtctttcaacaacaggaagttgatcaaagatctgctggcaattatgcaaataggcctggttctacctcagaatatccaaatccaagtagattcaataaggaacatgctgcaaattttcagcaaggctacaatggtggtattggacataatgtttcacatgcacctcagagcccttacgtcagtagcaaaattgatgcacaaggtaattttccagggcaacccatgaatgtaaacagatctgtgcaacacaatactcatgcacctgcactgtatcaagatggcatataccgcaatccactaactgatagcccgtcaattgatgggttaccttctggagcatctgatgtaaccagtggagaatccaaagttactgttgaagagatggataagttatgtgaagatggcaaagtaaaagaagctgtggaacttctggctttgctacaggaagaaggaactgtagtgcatgctcctcaatattttaaattgatgcaagcatgtggtgatgcaacttctcttgcagaagcaagaaaaatacataatcaaatatctcaatcagcacttgctgttgacacagatattaacaacaaaattttggagatgtatgctaaatgtgggtcaatggaagatgcgaagaagctattcaatactatagctcaacgtaatttggcatcatggaacactataatctcaggttttgtgtataatggtcttggtgacgaagcaactgatttttttgatcagtttaagcagacaggtaataagccagattcaaccatgttcacacatgttttcttggcatgtggaattttgggttctgttgatgaggggatgttgcattttgaatcaatgcaaaaggactttggtgtaactcccaccatggaacattatgtcagcattgttaatatgcttgggcagtctggctatattgatgaagcttgtgaatttgttgaacaaatgcctgtggaaccgagcattgatgtctgggaaagtttgatgaatatgtgtcgactaaatggctttttggagctaggaaatcgctgtgctcaaattgtagagcgattggattcttctaggctaaatgaccagtctaaaattggtcttttccctgttgatgcttcagaacttgcaaaggagaaagaaagaaaaaaggctaatgctgttgaagctaggagcaaagttcatgaatacagagcaggagataggtcccatcctgaacatcttaagatctatgaagagctgagatacttagcagctcatatgaaagaggctggctatattgcagatactcgatttgtgcttcatgatgttgatcaagaaactaaagaggatgctttactagctcatagtgagaggctagctgtcagttatggtcttataactagtgctgctcggtcacctattcgggttataaagaatctacgctcatgtggagattgtcatacagctttgaagataatctctaaactcgttggtcgtttgatcattgcaagggatgcaaagagatttcaccattttgagaatggtgtatgctcttgcaaagactattggtaaacacaatatagcaaacctacattgttcaattttgaggtacaaaaccacaataggttgtgtaaatccagaaggtaggctgttgcctaacacttagctagccactagtttcatgtcaggcacatgtatgctttttctttgaatgctcattctcttttgcttttcttttggtgatttattattcaggaaatcaagcgtttgaacttgaacaatcttacatgctgcctttcagtggcacttcttctctaggaggccatctaaattcgctgtatgtgtcactgcaaaatggttctataaacatgcttttgtgct

SEQ ID NO: 22416 - DNA, 800 bp, Oryza sativa
  ref <308>: DATABASE ACCESSION NUMBER: AK072601
  ref <309>: DATABASE ENTRY DATE: 2001-12-06
tttcgtagcatgatttatttcgtccagaggatgcaagaggcagggttccctgtttctctggaggcgtacaactgtatgctggatgcttacggtaaggcaggacagttggaggagtttgctgctgttctgcaaaaaatggagagagcaggatgcgagtttgatcactatacttacaacattatgatcaatatatacgggagaaagggttggatcgaaggagttgcaaacgttcttgcggagctaaagagccgtggtggcgagccagatctgtacagttacaacaccttgataaaagcatacgggatagcaggaatgcctgaagatgctgttaaactgatgcaggagatgaggattaaaggcattgccgctgaccgagtaacctatactaaccttatagctgctctacagaggaatgagaatttcctggaagcagttaagtggtctctctggatgaagcaaactggagttgctgcaactcgaacatgatgtgcctaagaattcagagttttggttgcatgcaaattctggcatccgcacacgtttatatttcatctttcagtagagtacatacatacatgtgagtgacattgtacagagaactatttctgattgttctacacatcctatgggtaccggagattcagaaaaacctcctacctttccattctcttacaagatgaaactcaatcagtggatagcaagataggaacttttatcataccaatcatacaattgtaatttttttaccagaactggtttgaacttctgataataatgatcaaagattcattgagaaaccc

SEQ ID NO: 22417 - DNA, 1523 bp, Oryza sativa
  ref <308>: DATABASE ACCESSION NUMBER: AK072602
  ref <309>: DATABASE ENTRY DATE: 2001-12-06
gatagcgaagtatcattagccttggtctaatgcgtccagggttccaggtccagcggaaagcagtcttctccccagtccccacccagtacatggcacccgcttgtcctcgctagaacaccaccacgcctccagcctccagctgtgccgccgccgcgccctcctcccccgcccgccgcccgcacgcacgctttcctccccgacggcgtcggcgctcggcggaagcagcagcagcggcgtccgactgaacgatcccctgtcgcttacctccagccgcccggatcggacgccctccacaccctagcgtctcgcgccgcattccgccgtttcctctttcacgtgtccggacggatcatgtgtgaagaagatggatgccactaggagtgcacaatcaatccatggccaagatgaacaaaaattgtatgatgaactaaaaagtgcagtctgggtaattcatgtagagagtgatgaaagtagtgggacagggactggtttctgcattgatcagcgtgggttaattatgacgtgtgcacattgtgtgagtggcaaaacctgttttgtagcaaggcaaaacgacaagaagttccaaaaggcttatgttttacacaaaattgaatcttgggacattgcaattctgtgttttgtgcctaatggctcagatgcttatccagctgtttctctggcaaatgatgggaccttagttcctggccaagatgtatatgctatttcaaaccagcattctcttatgtactccttctgtagtggaaaggttagttatccctgcagtgatacagtaagaacttttgacaggacgccaaggtcttttgggaaagaaccaaccgaccatataccctcagagacatctgaataccgtacacagaaagaaacatcttttactctgccatttaatgaagatctaccaataattgaaatgaggaatattcatcttggccatggtggatcaggaggcccaatttttcttcacataggaaaagttgttgggatgatgtcatcaggagatttctcaaagagttatgcagtgcatgtgtcagcattacgaatagcttttgaggaagcaaagaaattatacagcaagctggtgaatcatttggcagcctccgaaaagcaatcaagagacaaaaatgaaggcaaaaatgaatccaacaaatcgaatgaaaagtgaaggaaaaaaatgatgttaaggaagtagattggagcaaacaatggtgaaataagcaattcgatccattgtcgtggattgtcaatttgggatttgacgagataattagctggccagaatttttcattgttgcacaaaatgcatgcttcatgacattcatgctctggattctggtaaaatacagtaacataaatttaaacatcaaaagcatggtgccttggactatgtaggttgatccccttgtttcctgctgttatattaaacttgcttgtataatttttttttttagaaaatgggataaacccaacctctacatccaatgtacacggccaaacttgcttgtctt

SEQ ID NO: 22418 - DNA, 943 bp, Oryza sativa
  ref <308>: DATABASE ACCESSION NUMBER: AK072603
  ref <309>: DATABASE ENTRY DATE: 2001-12-06
gggtatgtataaatcaattcatcgctactatcacagcgtcagaaacttgcagaagagcaaaccacaaacacttacaggaaatggagggcagcagcagtagcagcaagcatttcatccttgtccatggcctctgccacggagcatggtgctggtacaaggtggtcaccatgctccgctccgaggggcaccgcgtgacggcgctcgacctcgccgcgtccggcgtccacccagcacgggttgacgaggtgcactccttcgaggagtactcgcagccgctcctcgatgcagtggctgaggctccggccggcgagaggctgatcctcgtcgggcacagcttcggtggcctcagcatcgccctcgccatggaaaggttcccggagaagattgctgtggccgtgttcgtcgccgcggccgtgccgtgcgtcggcaagcgcatcatccccgagttgataagggaaaaagctcccaaagatatgctcctggatagcaaaatgataccgatcaacaacaaacaaggtccaggaactgcaatcctcctaggcccaaatttcttggcggagaagggttatccactaagtccagctgaggacttgacactggcgaaattattggtgagacctaccagccagttcgtggatgatccaacgatgaaggatgacaggctgcttaccagtgccaactacggttcggtaaagagggtgtgcctgatggccatggaggatgacttgaaggaggtgcaccgttacatgattacgttgagcccgggcgtggaagtcgaagagattgccggggccgaccacgccgtcatgtgctccaggccgagggagctctctgatcttcttgctaagataggtagcaagtatgactaattgattggttagaaattgggcaagaaaaaaatgatgaataaatcctgtccagagctaatgcaggctctgcttgg

SEQ ID NO: 22419 - DNA, 1136 bp, Oryza sativa
  ref <308>: DATABASE ACCESSION NUMBER: AK072604
  ref <309>: DATABASE ENTRY DATE: 2001-12-06
gcagaggcacctctaattgagcaagcttttcaaaaacgccttgaagtagagaaaatccttcatgagcaagagcagctgagagagattgagctcagcaagcaacaccatgcaggtgacctgcaggagaagaacagactttctcgaatgttggagcataagaacattttccaggaaagaattgtccaacgtcgtgaagctgagtttagtcgtcttaagaaagagagggatgaaaggactagtcaattgatatcatcaaggaagcgtgaaagggatacagtgcggaagttaatgtactatcttaacttagaagagcagcgcctccaaaggctccgtgaggaagaggaagctagaaaacgtgaagaggaagagaggagaaagagggaagagactgagaggaaggctaagctggatgcaattgcagccaagcagctgcagagagagagggaactagaagagaagaaggaaaaacagagaatggaagctctcatgggaagaggagctggagctgctgagcctgcacgcactcctgatgctgctccggttgcacagccagctcagccggtagctgcaccggctgctgctgctgccgctgctgcaccagctgctggtaagtatgtcccgaagtttaaacgaggtggtgatggtggcagtagtgctggcggccagagacctgctgtggcacctgagcaagaccgttggggttcacgggatgatcgcccacgtcctgatatgcgtccgctccgccaagaggcaccccctgctcgcgatgctgctcccccagcccgccaagatggtcctccaggcacatggcgaccttcaagatactcaagttcatcatcttcctcaacctggagcagcaggcgcaactgaagccgtctgctttcagatgtggactgctagggtgagattttttgctgtccagggccattgctgagataagcctgtgaaacatggttgaatgtttgactgtttgcgcatcaaatgctcgtaaaattttggagttaggacctgcttcagggcaatagcacctttcctaagttatgtcaaatgttatttcgttgttgcagttactccattgcacactggattgctactcgttaagtttgtccaaactttggcgctgttagtaatactgg

SEQ ID NO: 22420 - DNA, 1849 bp, Oryza sativa
  ref <308>: DATABASE ACCESSION NUMBER: AK072605
  ref <309>: DATABASE ENTRY DATE: 2001-12-06
gtggcagggcgcaccccccaccacgttatcctcatgtcctgttccttccgcttccactcctccgccctacccgcagccgctgcacggctccacctctcccgcggactccggccgccaccgtcacgccgtcgcctgcacaacacattctcacccaccctttccatctccccgccctcccgtcacgccgccatcgccgccgccgccgcttctcccctcggcgcatctcaggaggcatcggcgatggcggtgtccgcgtcggagggcgttggccagtacgatctgctgattgttgggcctggcgtgcttggccggattgtggcggagagatggcagcaggagcatccaggttgcaaaatttttggtcatactgcaaccacagatcatcacagtgaattgactcaacttgggatcattccctccttgaaaggaccagctgttcagaaagttccgtacgttattttctgcgctcctccttatcgggcagatgattacccaggagatctgagagtggcagcatcaaactggaatggacaaggctttttcctgtttacatcgagcactgctgtgtatgactgcagtgacaatggattgtgtagtgaggattctccttgtgtgccaattggtaggagccctcgtactggtgtgctcctaaaagctgaaaatgccgtccttgaggcaggaggaagtgttctccggcttgtaggactttatatatccttactaagaggcgactttgtttcaaaacttaatgcaaaaatattattaaatatacctgtgcccccatacacttctgtaatagaatggacataactgttatatctccttgacataccacacaagagtgataaaggtcctcacattttttggttatcgaagggaacttttgattcacgtccagatcacatactcaatctgatacactatgaagtaagacctgatacttatctatgtttggataataacataaatgagtcacaaaagaatgtcattttgtaatttgtgcagtccacacaagctaacttgttcattatataggtcttttgatatatgaaaaatgacatagcaaagtttgttatagccaaagcttttacaatattacacttacgcaactattttagatttatgcagaagaattaagtggtaaaagttatgtttattgacttgaaaagtttaaaatgaccactgtgaccagagggagtagtttagaattcatttagattttgtggagtcaaaataaggtttcactacctggttagaactaagccacttgttgcagtatttctctctccataatatatgatacaaataacagagaatctgaagtttgattgaacagtaaatacaaattgaagcatcaagcaatattaagagcggtccaatttaataaaactgggagaattaacaaagaaaatattttagagatccattttataattcttacataggcaggcaataaagattgctgcatgcatgcggtctacatattccaagtatttgtaagtatgtgctttttcaattgttattatttgtaggatgctgcttctcttgcaattgccattatgaaaaggagactacgtgctcgtgtttttgttggttgtgacaatcagcctctatctaggcaagaaataatggaccttgttaatagaagtgggaaatttgatacgaagtttcaaggcttcacaggactgatggtcctttagggaagaggatggagaattccaaaactcgtgctgagattgggtggcaaccgaagtatccaagcttcacagaattccttggtttgagcaattagtatccatgtatatcacaacattttacggtttcaattcaatattaaagcattgatgtg

SEQ ID NO: 22421 - DNA, 1108 bp, Oryza sativa
  ref <308>: DATABASE ACCESSION NUMBER: AK072606
  ref <309>: DATABASE ENTRY DATE: 2001-12-06
gacctttcccaaaattagcacccgcctccctccgccaatccccaccaccgccaccgacctcaagccaaatccaccgccgcctcctcctcctccgcctcgcttcccccccttcccccttcccttcccttcctcggcgtcccctccgcaccggcttgtgggggaggagtaggaggaggagatggccgcagcggctgtcgcgtgcaggcgcgggctgctcctgcagcagctgcagcagcagctgtggcaggcgcaccggtgggttggccccgcgcggagcatctcgcagctcgtcaagaccaacggccgccgcgccttcctcgtcgacaccctcgccctggtgaggaagctggagtcgcagggcgtgcccacgaagcaggcggaggcgatcacctccgcgatcacggaggtcctcaacgacagcctcgagagcatctccgagtccttcgtctccaaggccgagatgcagaaggctgagatgctgcaggagtccaatatctccaagttcaagtcgcaagtgcagagctcgcaggaaaaccatttctctttgttgcagcgtgagactgagaaactccgtggagatattgataagatgaggagtgaactgaagtatgagattgacaaggtcactgcaggtcagcggctggatctaaacctcgaaagagggcgcatccgtgatgaactcgccaagcagaatgaggaaactacagaactcaccacaaagctagacaaggaaattcactcactgaaagcccagctcgaggcagcaaagtatgatgtcatcaagtactgcataggtaccattgtttcgatatcagctgttggactcgccgtgctccgcattgtgatgtgaagcacagatacgttctttcctttacccattcatccatggaaactgcaagaaagaggataggttgtgattctgttcctagtttttttggaggggacaaaacgtggtcaggggaaatgttgtaccatcatcctattagggaggagaaaagaggtggttcctcaaaacttgtaaaaatagatcgacccgcaggagaaatgcagcaaccaaaaatgattcttttacctttgtgtttgttggagcttctgatatttggtcagc

SEQ ID NO: 22422 - DNA, 2636 bp, Oryza sativa
  ref <308>: DATABASE ACCESSION NUMBER: AK072607
  ref <309>: DATABASE ENTRY DATE: 2001-12-06
gtttagttccctcatgttgtcaacgtcgtcgacgagattgagatattctgagcgcacatatctttgagttgtaggacatatgaaggatccaattgagaaaagaataaatctttgaatgaagtggtcatcgtagctcaaggagttgattattgcttcccgtaatgcttgtaaagtaattgttgtttggccttccttttttacaggttgaacaattctggtttattgatttttggtgcctcaaatatgtcatctctttctgatggcagtccaagcaaacaatcaacatcatcgagtgtcatcgttacgaaagtaccattaatattgaatgctttcttctccttgtcatagcttcttgcaatctcattgcacaagtttcggtcaatatgtatgttgtcaatctttagcaagttgccaagacctgaaccctcgatagcttccttttgacgtagacttagatggagtattacctcgtacatggcatgtggagagcaaactagagttccctaattaacagaaaagataataagagtttagtccatgtgaaaatttatgcaagtgctcatatatatgattgcacattaccaaacctagagatcaattaatcctgctagaaatcaattagaaatcaaaggaaataattaatcctgctctggccatgttactcgtctgacatgttgaagtgatgtcctccatcactgttctggcagtctatatggccctctctataatttgttcaatgttcattcttatgtgcaggattcagtgaggttgaggagtttgaggggagcaacatgagtgaggtcttcgagggcaacatagtactgtcaggtttgtgccaccttcacccatgaccacatccctcactttggtttgaaagtttgaaagtgtgaaattctgaacatatagtggctaatatagatcggtcgtcgaggcgtggtaattatattgaaatttcccatcaattctaacatattcagtataattcataagatctccattgggttgaacattccaccaatataattaagattgtctggatggaatatcatgcatgatggtgtttctaaggtagatggtcacagggtgttcctgtgtgtgggcgtagccctgctattttacttctttaatcatgaggccaacatttccggattcaacataaatatgcactgcatgtttcctatttcattgctcatgaggcccagcaccatatttcagacagtaaaaaagataggctcagaaagcagtataaccgtttctaagagttttgaattgttgtagtattaacaaaattaacaaacagtaggtgctaatgaagtgctgtagtgccattgagtttacatcatctccgcacattgttggctgaaatttaaacttgtaatcttggaagaacaggcatgcaacccattataaccagtatctgaaaagttggtttcttatattacagagtaaatccattttcttggtggtaggagattacatatcatggaacctgtgctttcagacatctgtgtataccctgacagtgaccaggattagatcttcatttttagacagtctaaaactaaactaggtcaccaacggaaacacatatgaaaacattgagcctctctgaatatgctacatctaagttttacctctttagattggtggagaacaccatgagttttggaattaaaaaaatataagaaatcctgattccccttaatgggttgtagataaattattttatacttaagtcagggatgacccctattggttaaggccagatcttcgacacgaatcttacacttggttttggttatgccatctatataaattctcatcataatatggctatgataattacttgtatgataatggcttcgttatgattctcagaaatcctaactaatttttcactaatcaataatatatatcccaatacatcagcacacatgaatcttggctactgcagggcgtcgccagcgccattgtcagcttcccccccccaacgcctctggatctcaaatccaccacgtcgaagccaggggtgggtcaggccggcagaccatctacggctgcgcctaacactccccgcaggtacattgcttcatccccttgctcccataggcttttagttttttttttttttttggcaaaaagtcgagacaaaaagttatatgccctaatggcatgtggatgtcgtgtaattactaaatttttagcatgctgaatatataacatggatatgttgctttggattaatatcactgtcttctcaaaaattaggtgccattctgttcgttttttgtatggagtatgacaagtatataaaatagttgtatggagtaggacaggtatataaattaggtgccattctctttttttttatggagttgtacaagtatattttttgggatatcttgccgtgctgtgtactctgtgtggctgctacatcctctatacaattgctccagagactagccagagcttaaaagaggcacacagtaaaatcaggggagagactatattcgttaataatctaatcatatgtgctgtaattatcgttgcgccttagacctattgcaactttggcttgaggagtctaagatttcgacaactgatgtatacaagagctgaaagtgaatgttgtatgt

SEQ ID NO: 22423 - DNA, 2599 bp, Oryza sativa
  ref <308>: DATABASE ACCESSION NUMBER: AK072608
  ref <309>: DATABASE ENTRY DATE: 2001-12-06
gagcaaggcgagcagaatttcagaagctgacgaggaaaacagaacaaaacaggggagaaacaagcctacagatgatggctcggtctatcccgccggagtccggtgacgagaacgtctcggcttctgccgatggcggcctattttagggacagaagatgacaaaagaacatcaaggaagagggcgtacgtgtagagaaagacggtgaaatattttgccagccagccggccggccggagtccgacgatcgagcacattccgatggacactgcaggcggtacaacaaaccacgcctaaaacctcctttacttaggagggcatggaggaggaggtgaacgaccacccgatcgaggaggtccggaacacggtgccggtgaccgacgacccgtcggagccgtgcctgacgttccgggtgtgggtgctggggctctcgtcgtgcgtgttcctcgccttcgtcaacgagttcttcatgtaccggaccacgcagctgagcatcggcacggtggtggtgcaaatcatcacgctgcccatcggccgcctcatggcgtcgacgctgccggcgaggcgcctccgcgtcggcggctggtccttctccctcaacccggggcccttcagcctcaaggagcattgcctcatcatcatcttcgccggcgccggcgccagcggcgtctatgccatgaacatcatcgccatcgtcaaggtgttctacaagcgccagatcagcccctacgccgccatgctgctcgcccagaccacccagttgcttgggtatggatgggccggattgttcaggaagtacctggttgactcagcctacatgtggtggccgtcaaacctcgtccaagtcaccctcttcagggcgatgcacgaggaggagaagaggaacaaggggcagctgacgcggctgcagttcttcatcatggtgatgacgtgcagcttcgcctactatatcgtacccagctacctgttcccggcgatcagcaccatctcggtgctgtgctggctgtacagggactcggtgacggcgcagcagatcggctccggcgcctcgggcctcggcgtcggctccttcggcctcgactggaacaccgtggtgggcttcctcggcaacccgctggcgtcgccggcgttcgccatcttcaacgtcatggccggcttcgcgctcagcacctacgtcgccgtgccgatcctctactggaccgacacctacaacgccaaacgcttcccgctcgtgtcgtcgcacgtcttcaacgccgccggcggccgctacgacaccgcccgcatcctcgacccggccaccttcacgctcaacctcagggagtacgacgcctacggccgcatcaacctcagcatcctcttcgccatcaactacggcatcggcttcgcgggcctcatgtccacgctctcccacgtcgcgctctaccacgggacatttggggcttgtggcggaaggcaacggcggagcaggcgaacggcggcggcaaggagcgccaagacgtgcacacgagaatcatgaagaggaactacaaggccgtgccacagtggtggtttcacttgatgctggccatcgtgatggcattgtcgctgtacacctgtgaggggtttggccggcagcttcagctgccatactggggtctcctccttgcctgtgccatcgccttcaccttcacgttgcccatcggcgtcatctctgccacgaccaacatgcaaccagggttaaacatcatcacagagctcatcatcgggtacctgtacccggggaagccattggcgaatgtggtgttcaagacctacggctacataagcatgactcaggcgctgacgtttgtgtcggatttcaagctggggcactacatgaagataccgcccaggtccatgttcatggtgcagctggcagggacggtggtggcgtcgacggtgcacttcgcgacggcgtggtggctgctgacgacggtgaggaacatctgcgacgtggacagcctgccgctggggagcccgtggacgtgccccggcgaggacgtcttctacaacgcctccatcatctggggcgtcgtcggaccgctccggatgtttggccgtctcggcaactactggcagatgaactacttcttcctcgtcggcgtcctcgcgccggtgcccgtctggctgctgtcgcgccggtacccgcgcagcgcgttgctccgggacatcaacctgccgctcgtcctcgccggcgccagcgggctgctcccggcgaggtccgtcaacttcgtcatgtgggggctcgtcgggttcgtgttcaaccacgtcgtgtaccgccggtgcagggcgtggtggatgcggcataactacgtgctcgccgcggggctcgacgccggcgtcgccttcatgggcgtgctcaccttcgtctcgctaggatacttcgacatatacggggtgcagtggtggggtggcgccgccgatgatcactgccccttggcgtcgtgccccacagcacctggggtgtttgccaggggatgcccgcctgtaccttcttgattgatcaggacaccgcatctacatgtatatactccatatgacagatggttactcaaatgtatatattatatcctcttgtcttcc

SEQ ID NO: 22424 - DNA, 945 bp, Oryza sativa
  ref <308>: DATABASE ACCESSION NUMBER: AK072609
  ref <309>: DATABASE ENTRY DATE: 2001-12-06
ggtacgactctctcggcctcccctttcttccttccaccgcccaaaccctagatcggcgccgccgccgccacgcagggccggccagcaccgtgtgggggagcgtccggccgccgccggggtgccttggagatcgatctcctcgccgccgacgacagcttttcttcgccggatgcgttccgtggcggttatcaggactctttttctctcgagatagagaggaaaagctccctctcgatctgctgttggatcggaagaacagcagagagagagaaagcttagcgggatgatggtgcagatcgcgtggatctgtcgccgggaggtgacctggatcggtgtcgtgctctcgccgtgtgggtgagattcaccggcgccggtgcctcggatcctcttcggcggcggcgttgggcccccgatgcgcgaagacctggggctctgaggtcatgaggaggactttattttggggagaggatttgatgagcatggaggatgtgcagtgctccaagtcggaaagctttttttttaccattactgctgccgaggaagctcaatctctgtcgggatggtaattacggaaggggttatcttagtatggtgtggtttatgaaattcagagatcggttatcttattatggtgtggtttataaagtcagagatccataatttcgtcgcttcaggaggataaaggaacacacatcgttttgggtgtccggtaccaaatattgttcatttcaccctctgggttgtctttcaaaaggtgtcagagtgatggtttttttttttccttcttcaatcactggtgatatatagttttgcaaactgagctaaaatgcacggccattccaatattccaattgttctgtatttatgtggactcacacgaggattttgaaagacttctactattgtggattaacacgaggattttgaaagattgttactatgcgt

SEQ ID NO: 22425 - DNA, 1323 bp, Oryza sativa
  ref <308>: DATABASE ACCESSION NUMBER: AK072610
  ref <309>: DATABASE ENTRY DATE: 2001-12-06
gtattataggcgcgtgcgcgtctctcggttctgtgaattgtgagagattgcctccgcttccgttgctattttatcgtcttcaattttcttcccccccttggagagataaggccgtggcatcattgccgccatcaccaatcccatcatcacctctcctcatccagaggcagaggaggcattttctgttcgtcttcttgacccttcttctgcttcctttataagattgcaatgtcgtcgccggacaaggtggtggccaggacgggccgcctcaggcagcgctacgacaacgagtaccgcctcgtcgcaggctgcgtgccgtaccgggtgaagaaagacgaggccaaccctcgcatcctcggcgacgttccgggccaggtggaggtgctcatggtctccacccccaaccgcgccgacatggtcttccccaagggtggatgggaggacgacgaggaggtgtacgaggcggcgtcccgcgaggccatggaggaggccggcgtcaagggcatcgtcaataggactaccttgggacactgggtgttcaagagcaagagcagccagaacagcagcagcccaaggggagcttgcaagggctacatcttcgccatggaggtcactgaggagctcgagtcgtggccggagcaggcgacccatggccgtcgatgggtctcccccggtgaagcctaccagctctgccggtacgaatggatgcgcgaggcgctcaccgctctgctggagcggttgtcgatgatcgagccggtgccgtctgcgcaggaactgtctgatcaaactagcatgtacatgatgctgcaggcatcatctgatagcgcggtcgcgctgtgctgattgatgatgatgatgatgctgatgctgtggataaaactgatgaacgcagaggcgtgcaactagtatagctgtcaatccccttcaaccgcaaacatggctaccagaaaattcagaatctctaatcacttctttagaatctttcttttttttttcttgagcagctagtgatgagtctgtaatacctgcagttgttgccctgcttgaacaactgcacattgtctaagaaagattctatgacctgaacccctcagctccaggcacttccatccacaactttggtattggttggcttcggaggttaaggcaaaaaactgtttcataggtgactgaaactttaacctctgtggatgcatattgcagtgtccatttgcatgatcaatccaatgtctgctgatgactggggtctcctgtgtaattcttctgtgtaatattcaaaaattagtaaggtatataacatgtttgcatgtgttcatgtgttgt

SEQ ID NO: 22426 - DNA, 1576 bp, Oryza sativa
  ref <308>: DATABASE ACCESSION NUMBER: AK099286
  ref <309>: DATABASE ENTRY DATE: 2002-08-28
gagccgccgccgccgacgagcaggaggagcgatctgactagtaagccggagcacatggagagctcgtcgccgtcggtgccgttcccgctgctgcaggcgccggtggagagcacgtacagggcctgcaccatcccctaccgcttcgcctccgacaacccgcgaaaggccacccccgtcgagatccagtggatcgacctcttcctcaactccgtcccctccttcaggcagcgcgcggagaacgaccccacggtgcccgatgcgcccgccaaggccgagaagtttgcccagaggtacactgcaatgctcgaggagttgaagaagaacccagagagtaatggagggccaccagattgcattcttctttgcaggcttcgtgagctagtccttagagaactgggatttagggatatattcaagaaggttaaggatgaggagaatgctaaggctatgtcactctttgagggcgttgttcagcgaaatgatgagattgaagatgatggaaaacgagcagagaacttgatccgtggaatcttagcaggaaacatatttgacttaggatctgcacagcttgcagaagtttttgctaaagacggtatgtccttcttagcgagttgccagaatcttgtatctcgaccttgggttatcgatgacctggatgcatttcaaaataaatggactaagaaatcttgggaaaaggctgttatttttgttgataattctggcgctgatatcatcttgggcatattaccatttgcaagggaattgctccgacatggcacaaaggtgattcttgctgccaatgacatgccatcaatcaatgatgtcacttacccagagcttgttgaaattataaacaagctcaaggatgaaaatggaaagcttgcaggtgtggatgcatctgacctactcgttgccaactccggtaacgatttgccagtaattgatttgtccagtgtgtcaccagaactagcttatttggcaaatgatgctgacttggtcgttctagaaggcatgggaagagcaattgaaaccaacctatatgcacaaatgaaatgtgactcgattaagatcggaatggtaaaacatcctgaagtggcgcaatttttgggtgggaggctttatgattgcgtcttcaaattcaatgaggcctaaactttgataacatcagacacacatgcggttgctttatttcgttttcaactggtgcgaggctacactgaacatatcacatgtgctcgtccctttcatattaatagcaaggaaaataagttagatcatggcatttttagggaatgcaattacggaacttttaattcgtattgcactacgtgccttttcatctaggtagcggaatagtaaaaaggaaaaaaaaatcccttctgcgattcagattaataataacagttcaactaaagtacctccgtgttttatcatgttatttaattcgaacattgtttgataccggttctgcttctgataaaagtgccattgaagatcagttgtgttctgtattatactagcctaactacttcgcagaaaaatgggtgtatagtgtagcctttacttcggatttggg

SEQ ID NO: 22427 - DNA, 2030 bp, Oryza sativa
  ref <308>: DATABASE ACCESSION NUMBER: AK072611
  ref <309>: DATABASE ENTRY DATE: 2001-12-06
gaagctgcatgccatggcgaggacgtcgatgacgacgacatccagggccctcgcgctggtgctcctctcgtcttgctgcctcctcgtcgccgtcgacgcggcctacgccaagaagccgaatctgtccaagaatgacttcctctcctgcctagccgccggcatccccgcccggcagctgtacgccaagggctcgccgtcgtacggctccgtgctgacgtccaccatccggaacctcaggtacttgtcgtccaagacgtgcaacccgctgtacatcgtcacaccgaccgacgtgaagcacatccaggtggccgtctcctgcggccgccgccacaacgtccgcatccgcgtgcgcagcggcggccacgactacgagggcctctcgtaccggtcggagatccccgagccgttcgccatcgtcgacctcgtcaacatgcggaacgtgaccgtcgacggcaaggcgcgcacggcgtgggtggagtccggcgcgcagatcggcgagctctactacggcatctccaaggcgagccccacgctggcgttcccggcgggcgtgtgcccgaccatcggcgtcgggggccacttcagcggcggcgggttcggcatgctgctgcgcaagttcggcctcgcgtccgacaacgtgctcgacgtgaaggtggtggacgcgaacggcaaggtgcaggaccggaagtcgatgggggaggactacttatgggccgtccgcggcggcggcggctcgagcttcgggatcgtggtgtcgtggaagctgaggctgttgccggtgccggcgacggtgacggtgatccagatgcccaagatggtgaacgagggcgccgtcgacctcctcaccaagtggcagtccctcgcgccgacgttcccggaagacctgatgatccgcgtgatggcgcaggcgcagaaggccgtgttcgagggcctctacctcggcacctgcgacgcgctcctcccgctggtgaccagccgcttcccggagctgggcgtcaaccgctcccactgcaacgagatgtcatgggtgcaatccatcgcgttcatccacctgggcaagaacgccaccgtcaaggacatcctcaaccggacctcctccatccgagccttcggcaagtacaagtcggactacgtgacgcagccactgtccaaggcgacatgggacaccatctacaaggactggttctccaagccgggctccggcatcatgatcatggacccgtacggcgccaccatcagcaaacccggcgaggcggacacgccgttcccgcaccggaaggggatgctgtacaacatccagtacatcaccttctggttcggcgagggcgcgccggcggaggcgccgatcaagtggatcagggacttctacgcgttcatggagccgtacgtcaccaagaacccgaggcaggcgtacgtcaactacagggacctcgacctcggcgtcaacgccgtcgaggccggcgccaacgtctcctgctaccaggtcggcaaggtgtggggcgagaagtacttcaagggcaacttcgagaggctcgccaggacgaaggccaaggtggatcccaccgacttcttcaggaacgagcagagcattcctccattgctcgcgtgatcgatcgatcgacagaaattaatcatcgacggaaacgcacaatttgcatcgagatttaattagtgtgtgtgagtggtgagtacgattaattaagtacttggacgtgtcacatgtccaacaaataaagatcaaccaactaacgtataatcgtaagaagattattgtttttttttctttttcatacacgtgtgcgcgtatgagttctacttcctccgttttataatgtaaaactttctagcattgcccacgttcatttatatgttaatgaatctagatatatgtatgtgtttaaattcattaacatctatatgtatatgagcaatgttagaaattcttatattatgaaacggagggagtagctagtagcgttttacatttcaatgttcgtgccatccacttaatttattgcgtgatgagattc

SEQ ID NO: 22428 - DNA, 1265 bp, Oryza sativa
  ref <308>: DATABASE ACCESSION NUMBER: AK072612
  ref <309>: DATABASE ENTRY DATE: 2001-12-06
gaaaggaacttcttttctgaagactgattaaaaaaacatgacctttgaatcaagcttgtggcctctcagataacgaacttttcctgccacctagttatgagtataatatggcttacatttacacaggtgaaaatgaaaatgagaaaagaaaaggcacaataagaaacaacggctgatgatttattatgttctgcccttctttgttgtgacaaagtatcttgatcacaaggacggaattggcagggtagctggcagttgcagtagcattaactgccaactgtgtgctgctaatcttatttgatccaaattatatggttattaatcaaatcccatagccccataatccccaaccatgcccgaagaagctgctgggatggcgtcagtcttgcggaggctctacctctctgtctacaactggattgtcttcatcggatgggttcaggtgtcgtggtccatgatattggcattgttggagaagagatatgaggccgtctacgctgctgtagagcagcatctgctgttcgcgcagactgctgccatcatggagattcttcattccattgtagggttggtgaggtctccagtgtcttctactcttccacaaattactgcaaggttgttcatgatctggggcatcttgcggagcttccctgagatacacactcatatttttgttacctccttgctcataagctggtgcatcactgaggttaccagatattctttcaatggcatgaaggagtcatttggatttacaccttcctggctcttatggcttaggtacagcaccttcatagtatgctttcctattggtatggttagtgaggttggcctagtctacattgttgttcctttcatgaaggcatctgagaaatactgccttaggatgcccaacaaatggaatttctccatcaaatacttctatgcctctgtctttttcatggctttgtatgccccagtatacccgcacttgttccactatttgatcgtccagcggaagaaggccttggcaaaatcaaaaaccacataactactcaagagctatctaatctggtttctgctcgcagctacagctcaggttgctaccacttcttgaacaaagaagtaaaaatgtattagaatggaaatgccgaactacacagactatcttttcccttggtaaataaaaatggacatgagtactattttcatgatttgttaatggtgtgttgtaccaaactttggcttttccatatgtaaataaaattgcactccatatcgatgcc

SEQ ID NO: 22429 - DNA, 1356 bp, Oryza sativa
  ref <308>: DATABASE ACCESSION NUMBER: AK072613
  ref <309>: DATABASE ENTRY DATE: 2001-12-06
ggggagctgtagagaagagagagaagagagagagagagaggcgacatcgccggcggcgagaggcggcggggatgagccggaaggaggtggtggtggcggcggctggagggggcgcgggtgcggaatcgggagcggagggatcttcatctgcgggaagcagcggcggcggcggggagctcgcggaggcgctggcgcggcggcggctgtaccgggaggtgacgctggcgctgcgcacggggctgcgcgacgccaaggccgacttctccttcctccgcgcgcgggggctccgcagcctcctcggcttcctccgctccaccgcctccgccaccgacgactcgcagctgctcctcttccggcattcccagtctatccccgatctccaagttattcctgttctctttcagaactcattgcatcaaccaaaggaagatcctgttgtgaccttggatcatatatttggagtagaaccaatgaagattacaagccccccaacagataatgaaattgctctcgctcttagagtcttggaaggatgttgccttttgtatagccgatgcactgctctggcacacaagtacaaggctgtgaaggtaatcctgaatatattagctaaccgaggtccagctgagcaaggagtgtgcttggacgcgctgatatcgttgatgttggattcaccccccaatcagatggatttcgaggaattcagtggacttgagaaggttgcagagcttttaaaggatgtgcaagtagaagagcacataagattgaaatgtggggagttcctactattgctaattgggcatgtttatgcgaaagaaaactctcccatacacgaacaaatgagaattttgttcggcgagcagtgcgcatcactgatatgggcagcaagtcggtttggctccactctcgacgtggagcagaggcagatggccttgcaaatacaagcaaggagagttgttgaatccttggagccctactaagacaaagcacatcaatgcgttctttttgtcttcctgacaatggtctgatatcactgatccaagcaatgtgcttcatttgcctatagcaaagctttgttgtcatattttctgtgtagagccattcttatgtttctgtatgtacaaactttgttgaaaatattctattagttcagctttgcagaaaagatgttattagtttccattcgaaaaccatggactaggttacggtggtaacttagggcttgtagtggttccccattttgtaaaccgtgggtttaatacgaaatttgcctacaaattgccttttatgcttcaacagcaatattggcaacagtttcattgaaacagaggaaatcccctccaattgggaaatact

SEQ ID NO: 22430 - DNA, 1495 bp, Oryza sativa
  ref <308>: DATABASE ACCESSION NUMBER: AK072614
  ref <309>: DATABASE ENTRY DATE: 2001-12-06
gactcttcttcctcccctccgcttctgctcccctctcaaaaccccacctccctctcctcctcctcctcacctccgccgcctccaaaccctaacccgcgcgctcgcctcctcctcctcagccatggcgtcgccgcccgcgaagaaggtgctggtgccgatcgcgagcgggacggagccgatggaggccgtcatcaccgtcgacgtgctccgccgcgccggggccgacgtctccgtcgcctccgtcgaccccggctccgcgcaggtcggcggagcctggggcgtcaagctggccgcggacgcgctgctcgacgacctcgccgacgccgaattcgacctcatctcgctcccgggaggtatgccagggtcttccaatcttagagactgcaaacttctggagaacatggttaaaaagcacgcaggaaagggcaaactttatgctgcaatatgtgctgcaccagctgtcgctctaggatcatggggtttgctgaatggattgaaggcaacttgttatccttcattcatggataaacttccttcagaggtcaatgctgtagaatcgagggtgcagattgatgggaactgtgtgaccagtcgaggaccaggaacggccatggagtattctgttgttttggtcgaacaattatatggcaaagaaaaagctgatgaagttgctggtccaatggtcatgcgcccccagcatggtgtggagttctcattgaaagagttgaattcaactagttggaatgttggtgaaacacctcagattcttgtaccaattgctaatgggacagaggagatggaagcaactatgataatcgacatcctcagaagggcgaaagcaaatgttgtcgttgcgtccttggaggaaactttggagattgttgcatccaggaaagtgaagatggttgctgatgttctgttggatgatgctcttaagcagcaatatgatctcattttgttaccaggtggtcttggtggtgcccaagcatatgcaaagtcagataaactgattggtctgatcaagaagcaagctgaggcaaacaagctatatggagctatatgtgcctcgccagcaatcgcccttgaaccacatggcctgctgaagggaaagaaggctacatcctttcctggtatgtggaacaagctctcggaccaaagcgaatgcaagaacagggttgtcgttgatggcaacctaatcaccagccaaggtccaggcacatccatggagttctctctcgccatcgtggagaagctgtttggtcgggagagggccgtcgagctcgccaaaaccatggtcttcatgtgagttgtgttgttacatactacgtgtaagacaacaccatagtcagactctgaatatgaggcatccttttgctcgtagctggtgtggtggaaagcacttcgtaatccttttttttggctttctcttccacaataacacgacgtcttgttatgtgtacaaccgtacaaatgcaataaaaagagatggatattg

SEQ ID NO: 22431 - DNA, 3124 bp, Oryza sativa
  ref <308>: DATABASE ACCESSION NUMBER: AK072615
  ref <309>: DATABASE ENTRY DATE: 2001-12-06
ggtgcgaaaaccaccccacaaaaatatcgtctcctccgcgtgtgcggaaaccaccccgcataatttccaaaatacccccgagccctaatcccctcttccccttcctcctcgctacggcggcggcggcgacggcgaccgccggagccgacccgatcccacccgagtccttccctgtgcgcgcaccgctccttcctctacttcccgaccgccgcttcctcccctgttggtgtgggcgcgggcggctagaggaatcgaattgaagattacggaacaactctggaggcatggcagaggggtccctagttgttgccatttgccagtatggtggagagttcacttctggccccaatggcaatttgatctacaaaggaggagaagcacacgctgttgacgtcacacgagagatgtcactagataacttcaaggatgaggtgtccaaggtgtttcatgttgaggtttcagatgtgtcactgaaatactttctcccgaacaataacagaactcttatcacaatatcatgtgatcgagatttgcaacggatggtcgattttactgctagttctgcacaagtggatgtttttttgataagtagagtggagaacaggagtataactcagactggagcctccactgctaaacctgggtctaatgcacgaggtgataaaaggaaaacgccaacttccaaaaataaggcatcaaaaaacaagaagaagactcccagtgctactggcactgcagttcaagctaatgccaataatgtgaaacagccaagacaagttgttaccgaaaatgatgacaacagggtttttccactggaatttgggagtgatattgcctttgccaatacagctggagctggttccacagctccagacatcttgaatcagcaaaagcttgctcttgttgataacacagcgagggaatcagttgggctttttgatgattcagtcaatccatatgttggctctgagatcacaacagaacctacacagggtcttaacaatcctattgtgttttgggatgatattatcaaaggtgtcggtcaagaatttgataatgtgaaggattttcgtgctcagttatgcaagtatgctattgggaaaggatttgtttatcgattcattaaaaatgaaaccacacgtgtcactgtaaaatgtgttggtgagggttgcacatggcggttgcatgcatctgaatcatctcggaacaagaaatttgttatcaagaaaatgacagacgagcatacatgtggtggaggaagtggagagggtcagcggcgagcaacaagacagtggctgactactgtcattaaggagaagctgcatgagaatccattgttcaagccaaaggaccttgtcaaggaaatttatgaagaatacggagttatgctgacctattcacaggtttggcgaggtagagaagtggcacagaaggagctttatcatgctatccgggagacatatagccatttgccctggtattgtgaaaggcttttggagaccaatccaggtagcatagctttgttgtctccgatggtggatacaaaattccgccgcttctttgttgcattccacgcttctttgcatggcttcacaaatgggtgtaggcctctcatatttcttgacaaggttccgcttaaagcgactaatgagtacaagttgctggttgctgctggagttgatgcagatgatggtgtctttccagtggcatttaatgtggttgaagaggaaaattatgagagttgggtttggttcttgatgcagctgaggtatgctctccagaatcacaactatccttacaatgctatgacatttttgtccagtggacaaaagggattggatgctgctgttccacaagtgttcgaagaaagtcaccacgccttctgtttgcatcatatcatggaagaattcaaaggagagctgaggaagggaccgtggtcacaacagataagagatgggatggttgaggatttcactcgagcagcccaagcctgcagcatcgaggattttaacgcatcaattgagagcataaggaatatatccactgaagctgctgattggattattgcaagtaagccggagcattggtcagatgccatcttcagaggctgtcgttatgatcatttctcctcgaacattgttgatgcttttaataactggatacctaccaagaaggaaggatcaatagtgctgatgatagactctctgagaatgaaaataatggaggtgatagaagcaaggcgcgagtcttgcaagtcctggtcagggcctttaactccttccatggaattcaaagtgcaggatgagatgtccaaagctgggaagctgactgtgctgtgctcttctgaaaccgtgtttgaagtccggggcagtgcaatttatgttgtcaaccttgcaaattgggaatgcacctgtcgaaggtggcaactttctggccttccttgtatgcatgctgttgctgtgttcaacagggttgggcgatctttctatgactactgttcaaaatttttcagaatagagagctaccatttggcttactcaggagcaatattcccaattcctgacatggataccgttgattttagtgctggggcaaatttgattccacctcctaagccacggacatcagataaacccagaaggaagcgttttaaccccaacaagatacctactgttgtacggctctgtagcaggtgcaagcaagcaggacacaataaggcaacctgtgaagcgattttgtagacaatggaagttctggattatccagtatgcgtagaagggtgaaaggtctgaagctttaagtggagtagcgctggtgagaagccgtagattttgttggatggatggaagaacgatgagatatgatgaatgataccaccgttttgtaacttaatattatattataaatgggggtggaaagatgtagtaatttaaatgtcaaatcttaagaagaagaggaatgaaggatgagctttgttagtagatagattatggttagcggtttagaagtcataataggtagcatggctgttgaaaatgatgatgattcaagtgtaccagtccatgattttaaacattgtctttctagtcttctattcagtgttaaggatggctatcaactagtt

SEQ ID NO: 22432 - DNA, 1572 bp, Oryza sativa
  ref <308>: DATABASE ACCESSION NUMBER: AK072616
  ref <309>: DATABASE ENTRY DATE: 2001-12-06
gaaagtctgggagtcttgtcggttcgtcctcctctgcaagtcctctccggcgtccgcttcttttctcgcttctgctccccgccgccaccgcctcctgctctctccgctcgggtttctccgcggcggttgttagcgaggggaacgaggtatcgccggcgccgtggttcctgcgggatggcagctccagacatgcccaaccggttctcccatattgcccatcaactggtgcatgcagagaagagggaatcaatattctttgtgaaaatggttagagtgcctcactgccatgctaagatagtggagcacctgcagaataaattccatatgaaaccatctgaagcagaaggcacaattaaggagcccttctttgctactggatctatgatttatcaggatgagaattttggatacattttgacctgtgctcatatcctcgaggatttctattcagccaatattgtactgagtaaggagcaggccaacaggtggttcaagtttctcatcctctgcaagcacaatgaagatcacatgaagactatccatcctgacttgtatgaatctgagcgtgataagcggaattacactgtagcaactgttttgaaaattgatcagcgtaaggatcttatgttgcttcagttcaatttgtccacactctatgccacccagtatgctcaaagatgtcgcttacctcatcagtcattaaagctcgcagaaaatccatcctcagcaccaaatgatgtggtcatgatctcctggccacctaataggcctgatactgttgtcattgggcaagtttcaaatcaatgccgcttattcaaccaactgacaacagaaagagataaaggctataatatgcaatttatagagctaaagatcaatgttgaaaagggagcatctggctcacctatactcaatcatgctggtgatatccttgcagtttatcatggccggattgaaggaaagggatatgctataagccatgacgacatttacgaattcctatacacgcgcaaaattctatcacagaatttgcgttaatgagagtgttcataagtgagttgcatcgacaacaaaacagctctctgattcttctaatgcagtcaaagtactgatttacagctttggttctgaagctattgattttcaaggacaagaaagtgtctacctggaggtacctgtgattactgttaggccggtcagctggtgcatacctatttgcctggatcaacgggagcgttgtctgccttggcatatgcctcctttttgtccctatgaatgtgatacagctgcagttcagaatgtttttttatcgaatgctgatgctgcagaaacttcatgttagttgtattccttatactaggtctctttttcctgctgatacatcccaaaaaaccacagtatagtagatggtacatccttattcaactctggatattttcctcttttgtaatcagatgctcagttttcactatctttgttaattctgatgggtacaatgataccccagagagagatggtacaatggtacccacattttcctcttgatatatctctcttatgcattggatctcc

SEQ ID NO: 22433 - DNA, 2828 bp, Oryza sativa
  ref <308>: DATABASE ACCESSION NUMBER: AK072617
  ref <309>: DATABASE ENTRY DATE: 2001-12-06
tgggcacagctcccaactcctcccattatccatccatggcgtcctcccatcaccaagaagtacaagagcaaggccatggagatggagaggaagaggaacaagataatagccaaatcacctctccactgttgcgatcctcaatgcggctcggctcgccggaggagaactcgccggtggagcaggtggcgctgacggtgccggtgggggacgacccggcgacgccggtgctgacgttccggatatgggtgctgggcacggcgtcctgcgtcgtgctgtccttcctcaacaccttcttctggtaccgcaaggagccgctcaccgtcacggccatctcggcgcagatcgccgtcgtgccgctcggccgcctcatggccgccgcgctgccggagcgcgtcttcttccgtggccggccgtgggaattcaccctcaaccctggcccgttcaacgtcaaggagcacgtgctcatcaccatcttcgccaacgccggtgccggttccgtcttcgccattaacgtcatcaccgccgtccgagtcttctacgggaagcgcatctccttcttcgtctccctcctcgtcgtcctcaccagccaggtgctgggattcgggtgggcgggaatattccggcggtatctggtggagccggcggcgatgtggtggccgtccaacctcgtgcaggtctccctcttcagggcacttcatgaaaaggaacggaggagcaaaggcggcatgacacgcacccagttcttcttggtagcatttgtgtgcagctttgcctactacattttcccaggctacctattccagatgctcacttccctctcctggatttgttggatctttcccaaatctgtgctcgcacaacagcttggatcaggtctccatggccttggcattggtgcaattggactcgactggtcatccatctcgtcatatctcggaagcccactggctagcccatggtttgccactgccaacattgctgccggcttcttcatctacatttatgtaatcacaccaatcgcctactggattaatctctacaaggcacaaaacttccctatcttttcagatggccttttcacagtgactggacagaagtacaacatctctaccattatagactcacagtttcattttgatacaaaagcctatgagaagaatggaccattatacatcagcaccttcttttctatcagctatggtcttggttttgcatgtcttactgcaacagttgtccacgttcttcttttccatggaagtgaaatttggcagctaagcagatcagcttttcaagataaaaagatggacatacatacaaagcttatgaagaggtacaaacaggttcctgaatggtggttcatctccatccttatagccagtgttgcaatcaccatgttcacttgtgagtattacatagaacaattgcagttaccctggtggggggtactacttgcatgtgcccttgcaattttcttcacccttccaattggaatcgtcacagcaacgacaaaccagactccaggcttgaatatcatcacggaatacatcatggggtacttgtatcctggacgacctgtcgcaaacatgtgcttcaaggtatatggttacattggcccacagcaagccctagcattcctacaagattttaagctgggacactacatgaagattccaccaaggaccatgtttatggctcaggtggtgggcactttgatagcagcatttgtgtaccttggaacagcatggtggctcatggatacaatccctaacatatgccacaccgagctcctccccccaggcagcccttggacctgcccttatgatcatttattctatgatgcatcagtcatatggggccttatgggcccacgcagaatatttggtgatttaggcacttattctggtgtcaacgggttcttcttggggggtgcccatggctcccctcctcgtctggtttgcacacaaggcattcccaagtcagaaatggatcctacttgtcaacatgcctgtgctgatcgccggaatcagccagatgcctcctgccacttcagtcaactacacggcatggatatttgtagcatttttgtcaggttatgtggtctataagtaccggcgtgactggtgggagagacaccattatctactttcaggtgcccttgatgctggttgggcattcatggctgtcttgctatatttatgcctaggagtagagaaaatcagtttgaactggtggggtaatgatttggatggttttccattagcttcttgccccattgcggaaggtataactgtacaggggtgtccagtggcaagtgcatagccaagtttcttctcatacacagtaccgccggcaatggtatctcaatcatcttaaggaggatgcaaagatcaaagaaccatgcagagaggctttaaacaactcaaaatgaagaccaaaaagaaaatgtccatatgttacaaggaagatgatactacaaggtgtaccgaatacaaaaataagtaaagttatttggtgcatgctaaattgttgccggtgacagaaaacagattatgataatagatgaactgaatttctgaaaccaacactgaattgaaagacagtagccatcgtccatagaaatagttaaagtctgaacatgattccacttacctgtaaaggtaacatcaggatcaccttagcctttaatcatcacaagaaccttgcaggaaaaagtaagaaattcagatgttacttttgctttgagggaaaatgaaacaatacggtcagcatgtaatcctgtatgaaacatggataatataaactgcattatatattgtttcattggaagt

SEQ ID NO: 22434 - DNA, 1105 bp, Oryza sativa
  ref <308>: DATABASE ACCESSION NUMBER: AK072618
  ref <309>: DATABASE ENTRY DATE: 2001-12-06
gacgttgctcgtcgtcgtcgtcgttgtcggagtcgccatgtcgtcggcggcgcgccaccattgctccggtctccgggagcggctaggctgcgtgcagtgcagcttctgcgccaccgtgttgctggtgagcgtgccgtgcagcagcgtgctcagggtggtggccgtgcagtgcggccactgctccggcatcctctccgccgtcaacctgccgccgtcgccggtgtcggcgtccatcgagctgactccacaggtatgattcttttcagcttcagttgatgaaaatgattggatgatgtgcagaatctgtactaacctgacgagatgaaacaggagctggacgctggtccgccgccgggggagtactcggatgagagcagcggagacgatagggagggaagagatgcagaggacgatgcacctgcacctgctgctgctgctgttgcaaacaagcgtacttgtcctgctgttttctcttgatcagtttgtctgaagatgataatgacgatcatgatgggctaattaagcatgttcttgaaacatttctgcagcgccagggaggaagcagcggacgccgtctgcctacaactgtttcgtcaagtaatagcccagaaaaacaaaatgagtatatactgtgatcatagctagactgagggccaattgcagagcatcacctagagcatacatggctctgaatattcttatataaatgtcccccctcgatattcaggtgagacttgagaggtgatggaagtattaacattcctttttgttgtcagggaagagataaagaggatcgaaagcatggagcctaacatcacccacaaacaagcattcagcacagctgctaaaaactgggctcacttacccagaatccagcagaagcgaggcagggatagctgctgaactacacctgcaaaacaaggcaaacgaaattaatgggcacgagtaccaggcagcagtgagctactaggcaggttcaggaaaaatccaagttgtagctgtccagataatcttgttgcacatctcaagcacgtgcttcctgaattcttctctttcatgtgataaatacagcaagttttttttttcgactactcggttcttaacc

SEQ ID NO: 22435 - DNA, 960 bp, Oryza sativa
  ref <308>: DATABASE ACCESSION NUMBER: AK072619
  ref <309>: DATABASE ENTRY DATE: 2001-12-06
ggtctcgagctttcccacgagctccccgccgctgctgctcgccctaggggccccgacgctccagcggtaaaccctacctcctcctcctcctccgtcgccgggatggggtccacctcctcgccgtccccgccgccgccgccgatgatcgggagggccgggaacctcaccgtcttcatcacgccgccgtcgccggcgagcacgccgcgctcctcgcgcccgtccgagtcccctcggtcgggcttctcgaccccggcgacggccccgcgcacggccgcctcgccgtcgccgccgtctccggctccctcgccgcagcagcagagggtggccagcccgccgcccacgatcccggtgaagttctccccgcctgcggctccggtgaaggtccctcctccgcctccggtgcaggtgcccccgccgcagtacgagaaggcctccgcggggggcaagcacgacggatcggcgtttggtttcttctgggacgccgtcgcgcgcgtgcaggaagcccacgcgagcctcgacgagtacgtggcgaactggtttgggctggatcaatccaagtaccaatgggctctcaacgactactacgagagcaccggcaaggaagtggagtgtggcaaagctggcaagccaaaggagcttactactagcaaagtgcagaaagtttagaaggtctgttcacatgataaaaccagcagttcttttctggaattacgctgaggagcattttgcagcgacttctttctgggttgaatgtgtagctaagcaaatgtgtggagaagttcgatttgttagatcttgggggcgtaaaggtggttgtctgtttttcaactgcatggagtctcttggcaggtttacgggctgcgctggaagggaattgagactgctaggcgttttgttcactcctgccaggatctctattgtaatcctatgttatgacaaaattgcatattcgcaatgcct

SEQ ID NO: 22436 - DNA, 3113 bp, Oryza sativa
  ref <308>: DATABASE ACCESSION NUMBER: AK072620
  ref <309>: DATABASE ENTRY DATE: 2001-12-06
gccgattccccaaacctctcctcctcgtcgtggacctgccggtggcgacgccgacgagctcccctccccaccgccgccgatccgagagcctccacgtcccccttgccggcgcggctcgagcccgggagcggaggagggcaagcgtccccggcggcgtcctctggtatggtggcgtggtgatccggccggaggagcctggatgaaggagaggaacccggcggttgcatcctccgcgctggcccggatcctcgccgcctgcgcgtcccaggcaaaagattatgggaggtgcatagcagaaaaggtccctgagattgaacaaaatatgtgtgctaaggagtttctagcactcagatcatgcatgcagactgtggtcaagcgcaaggcttgaagttctggagttaaagctttcggaatttgatatttgttgctttcagtgtcttcatgggtgctctcaggcaatcagatgcaaggaggttggggtagccctggtgctctgtctcatgcttatgtacaacatcctcctctacgatgtgacattaccaaaaaataggtgggcggttttattgatgatgctaataagttccttaatcgctccaactgctgatcggatattatacgggaagaatagttccatctactccagctggacctccgaactctgatctgtaaatgatggacctgttttatcagttcgatattccctggatctgaaagccatagggatacaaggatccaatcatgaggttgaatttataaatagggaaacaggacaaacctgtaataaaaagtgcagagctgattctgaaactatacttggctttttttggacagactgccccacttgtgatgtcataataataaaaacaagtggcctggatctgtttgcttatgaacctcaatcaaatgctcttcacttggtagactcaaagaagatcaatgtgagctggtatttttacactcatgaaagtaggttgattcttcttgcttcaggaatgcaatgcacactatttactggatatcagttttctgctggtgggattgtcaaattgcctaagtttgagatgacaatgactaaaagtgaagcaaacaacaaacctgttctagctgctgatgatgttcataccgtaacagtctatggtaggatttattgcttgcagcttgacagagttagtatgacattgaacttgtatcgtttctaccgtgatgctgttgtacaacagggtactctgccaacttattcaagtagaattgcagttagtgcggttgacaacataatcatggttcaccaaatagatgcaaaggttgtcatactatatgatgtttttatggactcttatgcaccaatttctgcaccactcccgctgcttgtgagggggctgcctagcaataataagcaatcagctcaacctccagatagccaatctagtgcatatggtgggactctctatggagaaggttggagctttctcattcctgacctcgtctgtgatgttgagaacgggctcttatggaaacttcatttagacctagaggctattgccgctagtacatctgatgctcctttgattctggaattccttcagagacgaaagtctgaccctagcatggttaagactctaagccttgctatagtccggactatcatcctggagaggagaccaattactatggttgcaaaggcaatggatgttgttcttgattcctattctcgtctgatgaaaatgggaggtggtcttcctgcagttaggagaacatctgagcaaaaccaacagcccggtgttcagcccggtgtgaacccagattcagcaagtggggatggaaatagacctgtgcagtcaaattcagaagttgagcatggaattgctaacctggcagaacatgtagataggacactgttaaatacatcatctgattctgatgatattatcgatgcatcaggagcatctgatgctcctgacagaaaaccacaagttttggggcaggatagcagaccattggcttctggtacatcaacgcagcatggatcacatgttgctagtgtggcagtttcaccaagtgaaatgtttgagtctgtgtttgtacttgttgaagacgaaatgatggctgatcctgcgtatcttatttctatcatcatggagtttctacgaagtgtctcaagagctgggttgaaggctcctcctaacctttttgtgatgatgacaacactgctggcccgcagcaaccgttatcctgaaatagccttgtttgtatccaacaagatcctagaaccctccaaggaacttgcgatgcaactcatggaattaggtcaacaacactctccgacaaggaagctgggcgtggacatgctgagagagcggggcttgcaccatgactacgtcactgcgttactgcaagacggataccacctggaggctcttcgctacgctagaaaatacaaggtaataactgtgcagcctgtcctgttcttggagaaagctgtggccataaacagcgcgcagaacctcgccgccatgctgagcttcttctccgagttcacgccgaccttcaagacgacgtcggactacggcagataccggcatatcttgtctgagatgatctgaacaaatttcagtagacagggtgaactgcctgaaacgatttggcacgttttatgcaaatcccgtacagaagaaacttgatacgaggaatggtgtaaagttcagacgatttaagtataattgaacaaatggaacgaggttgctcagtgagacagtgaggattgtgatgaacgaattcgagtttctgcgagcctttcgacactacgaccgaacagaactgctgggaaatccatgacttgcaatgtggtgggtcttttttctgaaagcttatcgtatttattgtggaaattctgaaaactcttcatgtgaaattcctcacttggatggggtatgagatcaagtgtccctggcatgtaggtccaagccaagtatgcagaagaggtcactgtcggatggggtgaggagtggggaatgtttaatttaggtgttttttttctttttttgcagggttttttttctttttataaagactctcatttattgcctatatttactaataagataaaacggtttatt

SEQ ID NO: 22437 - DNA, 1716 bp, Oryza sativa
  ref <308>: DATABASE ACCESSION NUMBER: AK099287
  ref <309>: DATABASE ENTRY DATE: 2002-08-28
gggtcgagcgggggcggctcctcctgcgacggcgaggcgtccatggcgtccctctccctttccctccaccacccgtgcaattcaagaacaggcttccttggaaagagacaagggatttgtcttcatgttatccctgctggcagagttggttttgtcagaaaaacaattgagtgcaaggaatctagaattggaaagaaaccgatagaagttccatcaaatgttactcttacattagaggagcaatttataaaagctaagggtccattgggagagttatcactaaactatccaggtgaagtaaaagtggtgaaagaagaatctggtaagctgagagtctccaaaacagtggaaaccaaaagggcaaaccagatgcatggacttttcaggaccctgacggacaacatcatcgtaggggtatcaaaagggtttgacaagaagcttcagttagttggggtcgggtaccgtgcagctgtagaaggcaaagatctcgtgatgaatttgggattctcgcatcctgttcggatggctgttcctgaaggcctgaaggttaaggtggaagagaacaccaggatcatcgtgagtggctacgacaagagtgagattggccagtttgctgcctccataaagaagtggaggccacctgagccgtacaaggggaagggaatccgatacgccgatgaggttgtcagaagaaaggagggtaaagctgggaaaaagaagtagaaaagctcttctgcttcatcatcgtttcgttcggctggtattatatatacttccttttggttttgatttttccccatgtgtaagtgtaatccatcttttacgaacaaagagaacaagctttttgaatcatgtaatctctcacggcttgtcgagatataggactcaaaatagtggagtcacactgtagagtcactactgtttccatcagcccatgttttgcccttgcagagtcacaccgaaatactactgaattaaagcttccaatcccaacctggtctggtggaattcctgaatccgggtcgatcgagagctcacgatgtcggccatggagaccgacatcaacgcgccgccgccccccgcccccgcccccgccggcgccggcgggggatcctcctctgccgccggcccctcctcccgcaagcccaacaagcgcttcgagatcaagaagtggaacgccgtcgcgctctgggcatgggatatcgtcgtcgacaactgcgccatctgccgcaaccacatcatggatctatgcatcgagtgccaggcgaaccaggccagcgcccaccagtgaggagtgcactgtcgcttggggtgtctgtaatcatgcttttcacttccattgcatcagcaggtggctcaagactcgccaagtgtgcccgttagataacagtgaatgggaatttcagaaatatgggcactagacaccacctgctgtctgcgcttgtttgttgccacggctgcgctacaaacacaagccgtatcatctgccgaacagctccatcgttagcttcttttgatgccttacatctatcgctggacgtttatcgtgcgtacttgtcccatacagggattgtgtttggatgatttgtagagagggtactgtatggcataagatccttcatattaatgttctgtgggtcacatatcaacttgctattattgtattcagcggttctctctctattttgccttaagctgtggtaccattttaagtct

SEQ ID NO: 22438 - DNA, 2600 bp, Oryza sativa
  ref <308>: DATABASE ACCESSION NUMBER: AK072621
  ref <309>: DATABASE ENTRY DATE: 2001-12-06
ggaggttgggctaggtgcggtgcagacggtgtcggggggtgcagggcaggcgcaaaaggaattacggaattgccccaaccaaggaggagacggaggggagggcaagaagaagaaggacggtgcagaggaaaggaaaggattggaattccaggggcgacgacatggccgccgtgcaggggcaggggcaggggaagctcctgtacattgtggtggtcgacgacgatggcgccaccttccgctacacgcgctccctcctccacagcactctgcagctgatgggatgcaagccgcgccatgccttcgagatcagcggcagggtgttcgacgagatccgaggtcacatgggcggtgacatggccatgggcggcggcggtggcgtgcagcgctacgagctggccgccgacgcggaagccgccagccccaggcagttccagttcgagctctacaagcgccgcagccacccttctcatccctcgcccgctcttcctccgcctcgtctgccacgccctcgccctctacaagtatgtcgcccccgaccagcgctctgatctccaccgagcctgcaggatccgggaaaggaaggaatcagtcaccattcttctctgcggaaccagcggctgcggcaagtctactctttccaccttgctggggagcagattaggaatcactactgtagtctccaccgattccattcgccacatgatgcggagctttgttgaagagaaaccaaatccccttctctgggcatgtacctatcatgcaggggaatgcctcgacccagtagcggtcgctgatggtaaaggtaggcgcaaggcaaaaaaacgctcaggcatctcaacgacctcaaccattgattttgataaaaccaggcctctcaatgaccaacctgacggcaaaccaattgggaagaagcagatggccatagaaggctacaaagccacaaagtgagatggtcattgatagtttggatcggttgattactgcctgggaggatcgcaaggaatcagttgttgttgagggtgttcacctaagccttaattttgtgatggggctaatgaggaaacatccttctataataccttttatgatctacatatccgatgagggcaagcacaccgagaggtttgccgtacgtgcaaagtacatgacacttgacccaacaaaaaataagtacgtcaaatacatcagcaacattagaactatccaagagtacctctgcagccgagccgacaagtacctagttcccaaggtgaacaacactaatgttgatcggagtgtggcttctatccatgccactgtctttagctgcctccgtaggagagctgctggtgatcagttatatgaccctgctacaaacacagtggcagttgtaaacgaggaatacaaaaaccaatgtgtggccaactccatgagttccaaggggatgttcaaattgattcaaaggttaggatcctcaagaaagctcatggccattgtcaatgtggatggatctgtttcaaaggcttggccggttgagtccagcagcggggatggaaaaggcggttcggaaaatggcagtaagaaatatgtaggcgatccaatatacgggcctctaaatattggaagggcagagtcagtcaatctccagtttggcgctttcggaataagtgcctggcctactgatgcaggctgtacaagtcaagctggaagtgtcaacgagtcatgggacaatgctaatgaaggcactggaagccatgttccttcttcttctggttctcctaagaagttggatggacattgtaaagagattaaagaatcagcagcggcatctggaagtgatgatgacgaagaagaagaagaagaagcggctgatgttccacctaattcagggagtgaggaggacctaagtgaagaagacataagggcgatccatgaggagatggaaggttccgtcgatgaagattgcaataggtctgatgaggaatatgatgacctggccatgcgtgattgcatggagaatggttttttgaccgacgatggtgttgttcacaccgtatttgatggcaacggacagaagcacagcacattgagaaagcgtcaagttaatttgcgtaccctatcaaagatcgacttagactctcctgacactgcacgctcttcttctgctcttcctattagcgcaagcagcaagcgaaatggcacaaggaggtggaagcggtccttgagtgaatcatttcgttcacggccacggagtgctccatctttagtggaattgacgccaaagcacaagggctcagccgttccagaggtggctcccgacaagtagaactgcatataaccagggtatatctgcctaactagtgttttgcaggaggcctagacttaacagatgaataaccgatttttttttctttctttctggtctttaaccctcatgccttttttttcctggacttggagaggatgcagataaaaattcacacagcgtgattcttttgggagttatgttttctgtttgcatatgcctaagctgtaaatgatgaaaatacagtatatgtactgtctgaaccctccgagatgtagagaagtttgaggcaatgtgttgttcttatcaatgctgc

SEQ ID NO: 22439 - DNA, 705 bp, Oryza sativa
  ref <308>: DATABASE ACCESSION NUMBER: AK072622
  ref <309>: DATABASE ENTRY DATE: 2001-12-06
gggagtgcccggccagtcacaggcaaaccatctacattctacacacatatctcactcatcctgtcatccacccatcaacgtacgtacgtgtgatctgcttaattgggagttagaagaagaggccgaggtaagttgaatttgctgcagagagagagagagagagaatcaatggcgcttatcccgtcgctggccgccgcccgctacgcgctgctcgcgttgccgcctctcatggtggccgcgtatgtttataacggcgggggtcggggaaatggagatagaccgcgtgcaagaagcatcaacaaattcaccgatggcggtccagctaccgccggccctgcagcccggaaagacagcagtgccttgtgatcgatcaactgtaagcccttcacacatgtacttcctccatctcataatgtaaatcattttagcattgcgcatatttatatatctagatttattaacatccatatgaatacggacaatgctagaatgacttatattatgaaacggagggagtacgtaatttaccgatgattgctgtatccaactaagctttgcggatttatgtacgcacatgcaactactattaagctttatgtcgttggttttctctaccgcggtgcatgtgtaccgcgagatatgtaaatttatttccagtgcctttttctgatgtaatgaaagtactacgtacgtacgtctcgcacc

SEQ ID NO: 22440 - DNA, 1387 bp, Oryza sativa
  ref <308>: DATABASE ACCESSION NUMBER: AK099288
  ref <309>: DATABASE ENTRY DATE: 2002-08-28
ttggctgctgctgctcttcgtctttgctgacctcggcacaggcagagagagaagccaagaaaagggaaaagagaggaagaagagagggaagaggagaagggagacgcgcggtgatcggaggttgatccatggctggcaggtcgagatacgacaaccccttcgaggagggcggcggcgacgaggtcaaccctttcgcggataaagcttctaaaggaggatcagcaggtcaatccagctattccggaggcgcattctatacaacacaatcacgccctagtgctccaccggccacccacctttcgcctcttcctcctgagccagctgacttctacaatgacttctcgaccccggtggatgttccaatggacactagcaaggatatgaaaacaagggagaaggaacttcttgcaaaggaagccgagctaaacaggcgagagaaggaaatcaaaaggagagaggaggctgcagcacgagctggtattgtgttggaagacaaaaactggcctccatttttccccatcatccataatgatattggcaatgagatacctgtccacctgcaaagaacacagtatgtcgcatttgcgtcactcttaggattggtcctgtgcttgttttggaacatcatctgtgttacggctgcttggattaaaggggaaggtcccaagatctggtttcttgctgtcatctatttcattcttggatgcccaggtgcctactatctgtggtaccgaccactttaccgtgccatgaggaatgagagtgctctgaaatttggatggtttttcctgttctacttggtccacatcgctttctgtgtgtatgcggctgtttctccatcaattctatttgtagggaaatcattgacaggaatttttccagcaatcagcttaataggcaatactgttatcgttggggtgttttattttcttggattcgcaatgttttgcctggagtcgctgctcagcatgtgggttattcagcgtgtgtatctttacttccggggcagcgggaaagaggccgagatgaagcgcgaggctgcacgcagcgcagcgagggcggcgttttgatgatgatgtacgtatgcgtgaaatgcataggagtgtccattgtttgaaaaattactgtgcgctgtaaatttggagagtggtagtagagttgttctgcttatgatatgtaggattttgtgacttgatttgagatttcttccgctgtccatgtccatttcttctgatctgttctaacttcatgctttgcactttagggatactagtatatatttgagagagaaaaattgtggcattaggacttgccagatctatgtatgtaacaaaaagcatacctttctgcatgccgtttctaaacatggagtttgattttcattgcc

SEQ ID NO: 22441 - DNA, 1073 bp, Oryza sativa
  ref <308>: DATABASE ACCESSION NUMBER: AK072623
  ref <309>: DATABASE ENTRY DATE: 2001-12-06
gactgccctcgccgccgccgccgccgccgccatgagaggtcggagcagccgcggccatgccgccgcgtcgacgtcgagccggcgtgaggccgaggacgaggatccagccaccgcctccgacgaatcgggcgacgacgaggaggtttcctcgtcgtcggggtcggagtcggagagcgacagtgacgccgagcgggagctggagcgcgcgctcgccgacgtgccgttcggggagctgcagcgcgcccgcgccgacgggtcgctcggcggccgcgggtttagtgccgccgccgccgcgcagaagaaggctcgcagggcgagcaagaaaaggccgatggagatcagcaccaaagtgcggccaccgaggttcagggagatcattcaggttccgaagaaggttgtcagggacccaagatttgaacctgtatatggacctgttgacaaagaagggttcaggaaaagatacaatttcttatttgatgatgaacttcctgcagagaaagagaaactacaaaaatcgattaagaaatcaaaggaccctaatgccattgaagaaatgaagagtcgcatcacttggattgataaacaattgaggtctcatcctaagaagaacgttgagtcagagattctgcgtgaacatattaagaaagagagggaagcaacaaagactggaaagcgaccatattatctgaagaaatctgaaattcgtgaaaggaagttgatgaacaagtacaatgagctcaaggaggcaggaaagcttgatgccttcatggagaagcggcggaggaagaacgcctccaaagatcatcgctacatgccatatcgaaggaatggagatggtgcataatgatgtctctcaagctgcctttagcttgattctttcatgatccactggtccagcgtcctgtacaacctagagcgaaagctatccatggacgtttgatttgtagctgaaatttgattactgataaccacaagctgttgtaaacttaaatcatggataaaatattgttttgtttgctgctttaatttatcattttctggaatcaaagtgaaaaccagatcacaaatttagt

SEQ ID NO: 22442 - DNA, 1542 bp, Oryza sativa
  ref <308>: DATABASE ACCESSION NUMBER: AK099289
  ref <309>: DATABASE ENTRY DATE: 2002-08-28
gtacggcaagcaaaacccccacacttcccggcggcggcggcggcggtgacggcggcggcgatggagacggtggagacgctggtggcgcacatccagggcctctccgggagcggggaggagctggcccacctccacaaccttctccggcaggccgacggcgagcccctgcgcgcccactccgccgccctcctccccttcctcgcccagctccacccgagcgcccactccctcggcttcctctacctcctggaggcgttcgcgtcttcggcttccaacctgagggcgcagggcggcggggacttcctggtcaccacggccgatttcctcgtctcctgctcggcggagcagatacgcttggcgcctgataagtttctgagtgtgtgtagggtgttcaagaatgaggtcatgcagctcaacgcgccgattagagggattgcccctctgcgggcggcaatccgcaagattcagacttcgtctgaagagctgaccccgatccatgcggattaccttctcctgtgcctgcttgcgaagcagtacaaggctggcctaagcgtcctggaagacgacatactcgaagttgatcagccaaaggacttattcctctattgctactatgggggaatgatatacattgggctgaagaagttcactatagcactggattttcttcacaatgctgttaccgtcccaatgtcatcattgaatgctattgctgttgaagcttacaagaaatacatcctagtttcgctcattcagaatgggcaggttccatcatttccaaagtacacatcttcaactgctcaaaggaacctcaaaaatcatgctcaggtttatgttgacctgtcaacatgctacagcaaaggtaactactctgaattagaggagtatatccagctgaatgctgagaagtttcaatcggacaacaaccttggacttgtgaagcaagtgctctcctcaatgtacaagcgaaacatccagaggttgacacagacctacttgactctttcgcttgaggatattgccagctctgttcaacttaaaaccccgaaggaggctgagatgcatgtgcttaggatgattgaagatggtgagatccatgcaaccataaaccagaaggatgggatggtcagctttcatgaagatcctgagcaatataaaagctgtgagatggttgagcatattgactcgtctattcaaaggttgatggctttgtccaagaagctgtcttctattgatgagaacatctcgtgcgatcctgcatatttaatgaagactggaagagagcgtggtggaagattcgattacgatgacttcgactcagttccgcacaaatatttttgagacgacctctgcattatgtgactcgaggtagtacattagtcaaactagttgttctcatgattgccagtttgatccgtacattccgcccatcaaaatttaaaccctgtaaattctggcgttaaagaatggtgcttttgaaccagagactgaatcagttggtagtttattcaatcagctatcctcttggatgcattttgctgc

SEQ ID NO: 22443 - DNA, 778 bp, Oryza sativa
  ref <308>: DATABASE ACCESSION NUMBER: AK072624
  ref <309>: DATABASE ENTRY DATE: 2001-12-06
gggcttttcctcgacggagggagtagatgcaaacatcggcacaagccgtcacgcagattgcatcagatctcagaaggcgccgacgattctagggtttttcccgcgccgtcgcgggtctcctccccgtctcatcctccggcctcctccgccagttgccgtcctgatccacgccgccggcctcctccgccctcgccgcattctgggacgaggagtcctcctccccctgacgcctagtatcccgccgccggcagccgccctgctcctctcgccagatcccggcctcctcccctgcagcaaagtgctagaatgggtcggaaggctggtgcgctgtacataaacccaaagaagtttggtggtggcgctaaaccctgcatgattgagatggtgtccttcctcaactgcttagctttgaacaagcagaatgatgacaagtgtgtcaggcagaaggatctcttggttgcttgtactcaggctcagaaagggaggccaaagaatgcaacgaagaccatcaattaccatcttcagcggcttgcgcgagacaagggcttgtagcttcccaaccatacggaatcatttcttcatcatgtctattgccttgtccagtctgcaagactcaaggcgttattttcttccaagtagccttgacgaaatgagtagtagggaaatggctagcatagaaataatttttacatgccagactgggaatatcaggacaatatcaatatgattgtcttattaaattgttattatttataaggcggtatacctccattttggt

SEQ ID NO: 22444 - DNA, 2153 bp, Oryza sativa
  ref <308>: DATABASE ACCESSION NUMBER: AK072625
  ref <309>: DATABASE ENTRY DATE: 2001-12-06
gggcacgcaccggccacccacccccattcccagatcccccggcgccgccgcggccgcgccattcgccgattgcgtcggcgtcggcattccgtgtcgcgcgccgcaatgccggcgtcgtcgtccttgtaggttgccagccacagccaggtaggtaggtgggtgcgcgcgcgcgcgccgcgggcggagccgccgaggaggaggagagagatcgctttggcgcgcgccgtggtggtggagggatatgcattccaagcccgagggggacgcggcgtcggcggcggcggcggcggagggtgggtccccgcgatccggctacttccggcagcggagcatgtacgccgcggatccggacggggtcggcgccgccaccccacgcaaggcgttcgacgtggagaaccctcccggcggcgccggggggctccgcccgagcgagtccgtcaccaagctggagtcgctggagcgtgcggagcgcgccgcgctggcgcccgcggtggtgctcaagacgggcttctacatcctcgtctggtacgccttcagtacctgcctcacgctatacaacaagacgctgcttggcgacaagctgggcaagttcccggcgccgctgctgatgaacaccgtgcacttcgcgctgcaggcggggctctccaagatcataatgctgttccagaccaaaggggtggagaacgcggtggagatgggatggaaggattacttcatgagagtcgtgccaactgctctgggaacagcattggacatcaacctgagcaatgcgtctctagtgtttatctcggtgacatttgctaccatgtgtaaatcagcctccccgatatttcttttgatgtttgcttttgcatttaggttggagagtcccagcatcaagcttctaggaataattgtagttatctctactggggttctcttgacagtttcaaaggagactgagtttgacttctggggattcatttttgtgacacttgccgctgttatgtcaggatttcgctggtccatgactcagatactgttgcaaaaagattcttatggtctaaaaaatccaatcaccctgatgagtcatgtaaccccagtgatggccatagccaccatggtactctctctcttaatggatccttggagcgattttcagaagaacacatattttgatagcccgtggcatgtcatgcgcagttttttacttatgcttgttggaggaaccttggcctttttcatggtgttaacagagtatgtacttgtttcagcaaccagtgctataactgtgacaatagctggggtagtaaaagaagctgtaaccatcttggtcgcagtattttatttccatgatgagttcacttggttgaaagggcttggtctcgccaccatcatggttggagttagcttattcaattggtacaagtatgagaaatacaaaaagggtcacataaatgaggatgaagttaattcaccttcattcgatggagatgccaaatacatcattctagatgacttggaggaccaggatgagtttcaggatgaagatacataattttgcaatgtggcaacattttaactgtcacttggatttttatgccctgaaaccattcatgtctgcttattgattgaaactataagtacttatggatgtttccacttaaacgaggtgtcacggacaagggcactgctagacttgctgatgttctgcaaccaaacttaaaaattatctgccggagcttgtccgtctccaaacaatgaaatggtttctcacttctcatccttcattaaatagccaggcaaactaagagctaacttcatcgaaatccccatttttgagaagattggcagcagttgaaattgttatggctgtttatattggtattgcctgagaatggacgtcatttacgtgtttttcttctctttgtgcgagctggaacatgcacatattcattcttaaacctccacatttttggtgcctaggaatattcattctatatagatcaaattgtaagagttaccacacatacctccatatttgctgttcccttgaaagttagggagcagccttttgattgtttgtatttgtagaattgtagcatgttatatactgtaacttgtactgtaacacttccagtctacttggaatcacaagttttaaatttgtgtgt

SEQ ID NO: 22445 - DNA, 1457 bp, Oryza sativa
  ref <308>: DATABASE ACCESSION NUMBER: AK099290
  ref <309>: DATABASE ENTRY DATE: 2002-08-28
gattgatagcctgtgcgtctccaagaagaggcttgccgctgccgccattggagccctctcgtttctgctcgagctctgcatttcttcagtaggaggaggaggaggaagagttggagtcgccatgtcgtcgtccctgctcactgacctcgttaacctcgacctgtcggagagcacggacaaggtcatcgccgagtacatatgggttggtggtactgggatggatgtgaggagcaaagccagaacgttgtctggacctgttgatgacccaagcaagcttccaaagtggaactttgatggctccagcaccggtcaggctaccggtgacgacagtgaagtcatcctccaccctcaagccatcttcagagacccattcaggaaggggaagaacatcctggtcatgtgtgactgttatgcgccgaatggcgagccgattccgacgaacaaccggtacaatgcagcaaggatcttcagtcatcctgatgtcaaggctgaagagccatggtatgggattgagcaggagtacacccttcttcagaagcacatcaactggcctcttggctggccactaggtggctatccaggccctcagggtccgtactactgtgcggcgggagccgataaatcgtacgggcgcgacatcgttgatgcccactacaaggcctgcctgtttgccggcatcaacatcagcgggatcaacgcagaagtcatgccggggcagtgggagttccagattggccctgtcgttggcgtctccgcaggggatcatgtctgggtggcacgctacattcttgagaggatcactgagattgctggcgtcgtcgtgtccttcgaccccaagcccattccgggagactggaatggcgccggtgctcacaccaactacagcaccaagtcgatgaggagcaatggcggctacgaggtgatcaagaaagcgatcaagaagcttggcatgcgccaccgtgagcacatcgccgcctacggcgacggcaacgagcgccgcctcaccggccgccacgagaccgccgacatcaacaacttcgtctggggcgtagcgaaccgcggcgcgtcggtgcgtgtcggccgggacaccgagaaggacggcaaaggttacttcgaggacaggaggccggcgtccaacatggacccgtacctggtgaccgccatgatcgccgagaccaccatcctctgggagcccagccacggccacggccacggccaatccaacggcaagtgaggaggagtcgcctcgcccgggttgatgaactgctttctcgcgttctgggtttcatggaaatctgtgtgtgtgtgttctctgacgctggtgctgttagaaacttccaataattcagaaataactgcgatgtgctctcaaatttctcatgaggccatcacctgcagcatctcatgaaatagatctattgcaatgacaataccaatggcaacgcaaaattttatgg

SEQ ID NO: 22446 - DNA, 3157 bp, Oryza sativa
  ref <308>: DATABASE ACCESSION NUMBER: AK072626
  ref <309>: DATABASE ENTRY DATE: 2001-12-06
gattggggaaagaataatttcctttcgttctactcgcgtccggagaggcggatagtcggagacagcgcgcgtccccctcgccgccgcgtcctcctcaagtctccggtgccatctctccgtgcctcctcccatcgttgctgccaccgcgtctcctcccaatcccctccgtctcctccccattcacagattgcggcacaccactaggtataaagagatcacagcatcaccggtcagcccatcccaaatccggccagcgctaacccctcgtcgccagccatcacaaagaggcgccctggttccacgcggcggtggcggcggcgaaagccatgaaactcaaatggaaccattgagaggccatgtcaggattgctccaagcatgcatgccaggatcttcgctatgctttggccgatgcacacaaggtgctcgatgaaaagtttacttgagattggtctgctatttgatcagtccgtgggaactccccagctagctagctagctagcttaaacttgcgattaatttaactcaagcaatgaagcgaataagcgatgcattcatccgtcagttgatgatggcttttggtatgtagcttttgaacttaatgtgctttggttttatggctgtgtttagttcaacgctaaaattgaaagtaaaaattagaacgatgtgatggaaaagttgaaagtttgtgtgtgtagaaaagttcgatatgacggaaaagttggaagtttaaagaaaaagttggaatctaaacaagacctatattatatttttgttctcttctgttggtgtgtcctaacattattgtcttccctcattaactaaataattaatactggagtatcattttaaataagagaatagtgatgaacacttatcaattatggtctagaaggagaaggcactgaaattttctgtaactgatatacatcttcaaggaagaagcaccaaccttttctacgattgataaaacgtatgattgtttgtcacatgataaagtaactcacagaatgccaatttacctattttactacattgtcagattccatatgcgcatgtacagcatcacaatgattcatttgatgctcatattcggttttagaaatattggtaaattttcttttagaataactcctatgactctaattggtctttatatttcacatatttcattttgctgctgaaagctagattgaattgaagagctgcaaatacagaaatccgtatggatatacatcggatttgtttactcttttatcatactccaaacccaacctaattcatttttgttaactctgcgaagtgcacatggtaggataacttaggttcatacacttttgaagtcagaaatattttgtacatcactttgttagattttactactctctgtcagtatatgagtcagttcctctcatcaccaagcagagatgatttataggtattgtttccaatttcgtactgataacagtacttgcgattattacttaagataggcgagagagatacttccaacctatgcagcggtggttctaacaattatttattaagttctatggtattgtcaattttcaaatttaaagtagaatttcataccatatattttgactcatgtatacaaggttttcatacgggtatttaatgtcgcgcaacgtgcgactaagtggctagtccagctgtgacggggaatcacggtcgtattccagcacgaatcttaacttcaatcgaacggcccacatcgacgcaatgtcaggagggccaaccggccaagcccaacttcccccaaaagccctaacgaaataaacccttccgcccccgccgccgccgccgccgcctcgccgcggctcgcatccctcttcctctccctctcttcttcgccggcgcgacgcgacgaggcggtagctgcctgccatgccgaggagaggtggagcggcgaagaagccggcgggcggcggcgagctgtcccgcttcctgcagtcgcacctccagaccatcaacgacaccttccagatgatggcggaggcggctcccggcggcttggagcggacggagtggtctgaggtcgtcaagctcggcgagcaagtctccaggcaggccagtgttgctggaatggtctggagtggtgatttgcctgatgtagaaacactcaaggagaacatcgtcgcatatttcaacatcctggcagggtttccttttgggttgccacggcagcacagttggcgcaggacccacacttcacaaatccatctgtagctctgcaaagaatgttggttgactccagcttctcattgttcaatcaagctgtttctgcttatgaatcacccagtcctgaccgggaaacaactatacctcaggtgaccggactgtatgggaagcatttcttgctctcaacaaggtacccacaaccaactgtgttgccataggacgagccatgactcagataggtgtgtatctgaaggatattctccgagagatgaaagaactaccaattggtgattctaatggcactgctgaaaaatcttctaatggagctgtggacaccacaagttgttctgatagagatggatcgtcaagtgaccttgagttagatgaggacttcactgaagaggaggttgctgttgccaaattggttgtcactgtggcttccgatgcgcttgttgtggtgaaagaaacaattcgtttcattacttgtttgcttaagatctcaggtaaccgaagtggagctaatgaggaaaaagttgagacaatggaacaattgttgagctgttgcagacaggctgctgaccagattaacgacctcggggcgtctgtgtacccaccacaagacttatctgagatgaaatcctcagtgaaaagattgtatggtggcgccaatgcaatgcggagggaaatcaggagccttggtggctcacctgagggtgcctttgtagcccttgaaagatttgagaagtccctgggagctctagaagtggagatagctgatgatgtagcaaacgagatggaaaatcttaccattagctcgtcctgattgctggaacttgaaagatttgccatacctatatgataatatgtcctcttgttcgagctataagcttttgttgttcaactaaaacgatgaatatgtataatcctttccagtgtgagatcaaatgcttattgctt

SEQ ID NO: 22447 - DNA, 2655 bp, Oryza sativa
  ref <308>: DATABASE ACCESSION NUMBER: AK072627
  ref <309>: DATABASE ENTRY DATE: 2001-12-06
ggaggttgcaaaagtagtgtgctcgatatatccaccaaaagcacacagatattcgcttatccatgtctccccaccgaggagcagctgtggcttctatttgcgctgcgttttatgatagtatttggctattggtactactgctgagcacggcgctggctgcagagacactcgacggtgcgcaggcagcgtcgtcgcaatgccagaacgccaccaagtgcggtggtgtagacatcgtctacccgttcggcctcagttcaagcggctgcgctatgtcgccttcctttgaagtcgactgcaacaacaccgggaatggcgtccagaagccattccttggatatgtcgagctcctcagcatcgatgtccagcttagtcaggcccgcgtgaggactcgtatatcttcttcctgctataacatctcaacccgagagatgaacttcgatgacctgtggtatgtggacctgaaggacacgccgtacaggttctcggactccgccaacaagttcactattattgggtgccgaacactggcatacatcgccgatcaggatgacgtgggcaagtacatgagcggctgtgtctccgtctgccggcgaggtgaactaacgagcctgatcaatggcacctgttctgggaaaggctgttgtcagactgccatcccaaagggcctcgattactaccaggtgtggtttgagcaaagcatgaacacgtcggggatctataatcgaaccccctgcagctacgctgtgctcatggaagcgtccaacttctccttttcaaccacctacctgacttcaccgttcgagttcaacaatacctatggcggcgaggcaccggtggtgcttgattgggctatcaacaccgccaacacttgtgaggaagctatgggaaatctcacatcctatgcttgcaaaagcgacaatgcaaagtgtatcaactcctccgatacaacaggctacatctgtaggtgccaagaaggataccaaggcaatccttaccttaaaggtcccaacggttgtcaagatattaatgaatgtcaacatggagagaattacccttgctatggagattgctacaataaacctggaagtttcgattgtgtgtgtcatgcgggtagtagtggaaatgcggcaattcaaggaggatgccgaaaagacctcttatcaccgaaaacacgactggcaattggtgttgttgccagtgtattggctgtcctctttggattcctaggatgggaagtgattcgacacaaacaaaaaattaaacgacaggctctattaagacagactgatgagttttttcaacaacatggaggccagatattgctagaaatgatgaaagcagatggaaatgatgggttcaccctctacaagagaggggagatagagactgccacaaataatttcagcaaggcacatgtcattggggaaggagggcagggaacagtttataaggctgttatagatggagttgccgtcgcaataaagaagtgcaaggagattgacgagagcaggaagatggagtttgtgcaagagctggtcatactttgtcgtgttagccatcccaacattgtcaagttgcttgggctgttgcctccaatttgaggcaccgatgcttgtgtatgagtttgtacagaacaaaacactgtccagagctgctagattttcacaggattaggcggttccatgtcacactgggaacccgccctaaggattgctgctgaatccgcacacgccactttcacatctccactctttgccacacccaatactccatggtgatgtgaagacagccaacatccttctcgcaaatggcttggttgcaaaggtgtctgattttggatgttcgaagattgataagagaactcaggctgtacccaaagggcacaccagggtatattgacccgcactatctagttgagtaccgactcacaaccagaaatgatgtgtataggttcggagtcattcttcttgagcttctaaccggtaggaggcccctgtcaaaagaaagaaaaagcttaacactgatgtttcaggaggctaggtcccatggcacactcattgagctccttgacagtgaccttgttgatggaagcgagcatgagagtgatcaagcgggctgcagatctagtgagtcaatgcttggttgttccgggtacgacaaggccatcaatgacactagtggcagcggagctccgccgattagcggaagcatatgaagtgaagcgaagcccacagccaccattggtgctcgaggatctgagatttatggatatgggcagtacaacgaacactttgtatggagagagcaggacgagtggggcttatagcttggagaagaaagctgtgttgagtatagagtttgcgagatgatcgatgtattacttgttatattgattcccttgtgtcgttttctagtgcgtgttggatttagtgttcttcctcactttgggggtggaggatctggtttagttttttttttatttttgacttgaggatctggtttagttgtgtgtgatagtgaaacatttgttgtgtggatgtggagtaacagtacaagaacctgtaaaacattatagcattaagtgtattctataactaatgattagtagaattgtaatctaacaaaactatacagtacttcttttattgttgttgc

SEQ ID NO: 22448 - DNA, 880 bp, Oryza sativa
  ref <308>: DATABASE ACCESSION NUMBER: AK072628
  ref <309>: DATABASE ENTRY DATE: 2001-12-06
gtgtaggccgagggggtttaggcttcttgggggggacaagtccgtgcaccaggctctcggcggtggtaaagctgctgatgtacttttgtggaaagacaagaagatctctgctgcagtgataggtggcgcaactgtgttgtgggttctctttgaagttgttgattaccatttcctcactctgatatctcatgtcctgatcggtgtactggccatcttgttcttatggtccaaggcaaccatcttcatcaagaagagtccacctaatattccagaagtgaagatatctgaagatcttgctgtgaatgttgcactagcactgcgcactgacatcaaccaagcacttcacttgcttcgggagatttctctagggcatgacctgatgaagtttttaggcgtgatcgttgctctctggattctttctgaaattggaagcctctgtgatttcctgaccctgttttacgttgctgtcttgatgctccatacagtgccgatcttgtatcacaagtatcaggacaaggttgatcattttgctgggaaggcgcatgtggaactcagcaggcagtactctgttctcgacgcaaaggttctcagcaagatacctaggggtccagcaaaagataagaagcagaactagaaatgaaacaccatatcacgctggaacctgacttgggagtgttggcatctcacatcacaacatatgcatgaatcttgagtccttgacttggtttggcccttgttggtgcttggtacatatatgacctgtctgtagatttgtgtgttgggagtgtcttgtgtagtaaactgtcgatatgatgtggttggtgtgcaactctgcaatgttaatatacaagatcttgctgcaagcctgcaaccatatatg

SEQ ID NO: 22449 - DNA, 1101 bp, Oryza sativa
  ref <308>: DATABASE ACCESSION NUMBER: AK072629
  ref <309>: DATABASE ENTRY DATE: 2001-12-06
gccgtcgcttccacgagaagcagcagcagccgagagagagagagagagagagagagagagagagagagagggagggagagggaagcaatggtggcgacgaacctgaaggcggagacggtggggctgatggaccggcgggcggcggtggaggcggagatggacgccatcatcgccgccctctccgtgcccgtcgggccggggatcaccggcggcctcgtggacgcggagggtttccccaggtccgacatcgacatcccggccgtcctcgcccagcgccgcaagctcgccgaattgcggaatgatcacaaggatattacgaacaaaattgagaagaatctggaagttttgcactcaacaaaattgtcaagaaatgaagcgtcaatccctgcaagttctggcacacctgcttcattgcacagtgggttatctcaaaatgatcctatggaagaagatgctgtgaccagacttccttttgccataattgatgaactgacagatggttctcctgctgctgtggatggcttgcagctttgggatgagatagtaaagtttggaaatgtggaagcaggtgatagattgcaagaaaggcttgtctctgaagctctttccaatgaggattgtcaagtatctctagtcatcattcgtcagggatcatcaatgaacttaactgttacaccaagagagtggcacggaagaggacttttgggatgccatttccgaatcttatgaacaacgggccatggtcccacatctatgaaagaacgagatggtttcgtttttgtgcttgcagacagagctcttgcagaatcagcgataacattcaacatctaagacaatctgattaacctatgaaaggattaaatgctttcatgtttgtacttgtgcagacagcccttgcagcaccgagagcaatctgattaactgaatgcgtgtccaaaccttttagcatccccttattacatgtacattggaagcaaacctggctgcctttgtttggagttttttttaggtgcattgttctcatgcatattggtcctatgaaatgatgtcttatgcacaatctttttgaaaaagcgatgtaaatctgagtctgttggcact

SEQ ID NO: 22450 - DNA, 1411 bp, Oryza sativa
  ref <308>: DATABASE ACCESSION NUMBER: AK072630
  ref <309>: DATABASE ENTRY DATE: 2001-12-06
gggtgggcccaggtcgtccccacacgacagcgctccgcctctccttcccgactccaccgaccccccgccgagctttctcgcctcccgcgaagtcgccaccgcgcgctgctcgtccgtcgtcgccgctgcatccgcctcctcctcgtcctccctacggccgtagggtgcggcggcggagggggcgacgatgccacgctgcggagccggaggtccctgcgtgtggatccgggccctatcccagccgcaacgccacgggaggaagccatggcggggcgtgagggtcgtcgtgctgctgctgcacgcgctgttcatcggcgccgtcttcctgctcgatccgacgctccagaggcaaatccacgaggccaagtggtacataattctatatgggttgctggttttacttaccttggtacaatacctatatacagccacttcttctccaggatatttacctgatatgttgacagctggctcaaggatgcatgcaacctttattaatacaacaactctctcaaagcaggccaattccaaaagtggaagcttaaactctgccatgagtcgcagcaaaatagatcagcaaaatccacaatccactacagctttgttactacagcagacgatggatctatatcctcctgggacatccaccagttgtatgcctccattttattttagggatttcacatgctcttactgccggctcatccagcctccacgcaccaagcactgtcatgactgtgataaatgtgtcctccaatttgatcatcattgtgtttggcttggaacatgcattgctaaaaggaactactgcagattttggtggtacatattcgaacaaacagttttaactgtctggactgttgctttctacattcagttcttttatttgggcatcgttgtatcctggtggaagtttgctattggtattgtacttttggtagcattgatattaatcctcgtggtcctgctgcccttgttgatattccatgcttatcttgctcttacgaaccaaacaacatatgaaattgccagaaggaagcggatttcttacctaagggaggttcctagcagggttcatccattcagcaaaggcatttgcagaaatctgtatgatctttgcatctctaaacagaggggattttttctggaagcagtgcccccgctggaggtactacaagccagagctagaccttacacatgccgagatgtaatctcctgccggtgctgttaggagcttggtatatgctctatatctggactcactagtttagtgtaatgcaaataatatggtagctataatttgtgtctcatttttcatgtacagtgtatgcgcatttttctcctagaaaatctggattgatcgatatccataccttgatctgagtatgctcaaatctggatttttttttct

SEQ ID NO: 22451 - DNA, 889 bp, Oryza sativa
  ref <308>: DATABASE ACCESSION NUMBER: AK072631
  ref <309>: DATABASE ENTRY DATE: 2001-12-06
gttggggaagtcgcgtggcggttagctagtggagttaccaacccaacccgtgtccccttgtcggatccgggcgcgcgacctcgtcgccggccggccggatcgccgccgccgccgccgtagagatggacccggaagcggtgcggaggagcctcgagcccaccgccttgtccaaggaggtcgtcggccccgcctccgcgagcctgcgctacgacgccttcgccctcaccggcgtccgcatcgacgcggccgagcacggccgcctcctctgctccttcgtcgtcaccccgcgcatcgccagcccggcggggtacctcctcagcggcgtcacggcgacgctcgccgaccagctcgggtcgggcgtgttcctctccagcgggatcgggacgagcggtgtctcgctcgagctcaacctctcctacgtcgacgtggccagcatcggggaagaaatagaggttgagggaaagctgttgcgcgctggaaaatcagtcggtgttgtctctgttgatttcaggaagaaaaagacaggcaaattgatagcgcaggcccgccataccaagtacctcgctgtatctagcaaactatgaggttttcctagataccaaaatgatcatgtcaaactctttactatctagaccttgtcatacgctgtcagtgctgtatattgttctaaaataggatcgtgtccatctcaaacgcatagattgatggcggttctgttatttatattgcttaggtcaattcctattgggaatgaagggatttcacagaaaatgggggtaaatcctcctaaattcatacccaactcttcagttatacaaacaggacctcagaaattacgcaactggaaaataagagtagttaagtactcaaatcagattgcatttgtgcc

SEQ ID NO: 22452 - DNA, 1215 bp, Oryza sativa
  ref <308>: DATABASE ACCESSION NUMBER: AK072632
  ref <309>: DATABASE ENTRY DATE: 2001-12-06
gacaacacttgcaaacctctctcaagcagcttagctcctgcctcctccttctgtgatcacttcttgcaaaccaatcgagtcctcaacgaggtcaatgggcaaagaggtggacgtgtccactctcgaggccggcggcgcccgggactacatcgacccgccgccggcgccgctcgtcgacgtcgacgagctgggcaagtggtcgctgtaccgcgcgctgatcgccgagttcgtcgccacgctgctcttcctctacgtcacggtggccacggtgatcgggtacaagcaccagacggacgccgccgtgaacggcgccgacgcggcgtgcggcggtgtgggcgtcctcggcatcgcgtgggcgttcggcggcatgatcttcatcctcgtctactgcaccgccggcgtctccggcgggcacatcaacccggcggtgacactcggcctcttcctggcgcggaaggtgtccctggtgcgcgccctcctgtacatggcggcgcagtgcctcggcgccatctgcggcgtcgcgctcgtcaaggggttccagagctcgctctacgacaggtacggcggcggcgccaacgagctcgccgccggctactccaccggcaccggcctcgccgccgagatcatcggcaccttcgtgctcgtgtacaccgtcttctccgccaccgatcccaagcgcaacgcccgcgactcacatgttcccgtgttggctccgctgccaatcgggttcgcggtgttcatggtgcacctggcgacgatcccgatcaccggcaccggcatcaacccggccaggagcctcggcgtcgccgtggtctacaacaacaacaaggcctggagtgatcagtggatcttctgggttgggccgttcatcggcgcggcgatcgcggcgctgtaccaccaggtcatcctccgtgccagtgcaaggggctacggctccttccggagcaacgcgtagttgagctcgtctggtgatatccgtggtcaagtcggcattgtttgggctctttctccttcagagtttaaggtgaatggagagaacagagcacctgttcgtcagtagtagaagcagcttcagtttaagtgagaagccctgcagtgtggtgtatgtttcagtgtttgcaatgcaagtgtaaactctgtccctctgttgtcttcatgtttctaagaatctaagtgaaccaaaagtcaataaattgaggtggtagagttgaagtg

SEQ ID NO: 22453 - DNA, 2868 bp, Oryza sativa
  ref <308>: DATABASE ACCESSION NUMBER: AK072633
  ref <309>: DATABASE ENTRY DATE: 2001-12-06
gaggaggcagccgcgcgcgcgcggaggcgggcaacctctcctcgactcctctcccccaccgtttcgtcgtccccgcgtgagaggaaggggaggaggcggagatggcgggggaggagcggccggagcggatcgtggtgtcggtgcggctgcggccggtgaacgcgcgcgaggcggagcgcggcgacggctccgactgggagtgcgccggcccgaccacgctcacgttccgcggcgccgtccccgagcgcgccatgttccccgcctcctacagctacgacagggtgttcagccatgagtgcggcacgaggcaggtgtacgacgaaggcgccaggcaggtcgccatgtcagtgctcagtggaatcaacgcgagcatattcgcgtacgggcagacgagcagcggcaagacctacaccatggttggcatcacggagtacagcatgtcggacatctacgactacatcgagaagcatcctgagagagagttcatcctgaagttctcggcaatggagatatacaacgaggctgtcagggacctcctgagctctgacgcaacgcctctcaggcttcttgatgatccagagaaaggaacagttgtagaaaaactcaccgaggagactctgcgagacaaaggccatcttctggagctccttgctgtgtgtgaagctcaaagacagattggggaaactgctatgaatgaagcaagctccagatctcatcaaatactcaggatgacggttgagagttcagctaagcagttcttggggaaaggaaactcgagcactcttattgcttgtgtgaattttgttgatttagcaggaagtgagcgtgcatctcagacggcatcggctggtatgaggctaaaggagggcagccatattaacagaagcctgcttactctaggaaaggtcattcgccaactcagcaaggggagaaatggccatatcccatacagagattcaaagctcacccggatactgcagtcatcactgggaggcaatgcaagaacagcaatcatctgcacgatgagcccggcacactgccacatcgagcagtcgaggaacactcttctgtttgctaactgcgcgaaagatgtcgtcaccaatgcacaggtcaacgtggttatgtcagacaaggcactggtgaagcatcttcagagagagatcgctaggttggagaacgagctgaagtttcctgcatcagcctcttgcacttctcatgcagagattctcagagaaaaggatgaactaattaagaatctggaagaacagttgaaggaactgatggagcaaaaggacaccgttcaatctcagcttgataatttccgcaaagttgcgagcgacggggatatcaacaatcacttagcaaggcgatggagtcggtcttcagactcgattccgcgcattgtgtcagaaggtgcattttcatcttcagatactcaagacattgactatcaagatcaaacaatggatgaactgtcagtacctcactcgtttccaccaagcagccaaatttctgacatcacagaggaacacgaagcacagagagtagctcatcgagctgaatctgagccccctgaggagcactgcaaggaagtgcagtgcatcgagacaaacaagctcaggagcaggagaagccaagaattcttccaaacacctgaaaagaagacacacactgatgatcaaaagcatagcgaaagcatgtcaaattcagcagaaaatgccatcaagctatatgcgtgtgattttgagccgtcatttgatctcgagaagcctgaaactgaagaatctcttgccctgaagaggtgtgtggttagctccagggacagtgcgcttactaggagtagaagctgcagagctagcttcatggtcattccgaacagctggttcgatgactcggcgagcacgacgccgtcgtccgaaaccttcagatattctaccagaaggccagagaaggtgaggaaaagcctgagtcctgatgagatcgcagacaagagcacgggcaacgctgaagaagacaagagcacctgcaatgctgaagaagagactgctgtgaatgacatcggctgcgtcacagaagtgaagcagaagacagaaatgaaccatgcaccccaatcttcagagcaacaccagccgaaaattgctaaagaagttgccacggtctccctttcgaaatggcacatcgatttcgagagaaagcagcaggagatcatcgagctgtggcatgactgcaacgtctcgatcgtacaccggacctacttcttcctcctcttcaagggcgatcagacggacagcatctacatggaggtagagcacaggcgactctccttcatcaagaactccctcatcgcagacggcgagctccacgctaccaccgcatcaagcttgaggaatcttcggcatgagagggacatgctgtacaggcagatggtgaggaagctgcacctggccgagaaggagaggctgtacggcaagtgggggatcgacatgagcaccaagcagaggaggctgcagctgtcgcggcggatctggacgcagaccgggatggatcacgtcagggagagcgccgccctcgtcgcgaagctggtcgagcacctggagaaggggcaggccatcagggagatgttcgggctgagcttcagtttcaagccacgcagatctttcagctgggtcggcgtctactcccgagactgaattcttgcccggccatggcgatgaactgatgatgatgtctcagtggtagatggatgcgtagtggaggagacgatgctgcatgtcaggaaggagaggagagagattttgccgccggaattgaactgatggattgccccgttctatctatgcatgtgaattgtgattcagattttttgcc

SEQ ID NO: 22454 - DNA, 979 bp, Oryza sativa
  ref <308>: DATABASE ACCESSION NUMBER: AK072634
  ref <309>: DATABASE ENTRY DATE: 2001-12-06
gacaggataaggcgacctcgtctaaacccccacgctcccatggccgccgccgccgcgtaccccaccgccgccactctccccccgcgccgcgcacctccgccctctctccggccgtcgccgccgctctcgtggtccgcctccatcgcccacctcgcgctctcgccgccgcccgtgcccagcaaccgcgcgtccctggtggtgcgcgcggcgtggacgcggcggtcgcggaaggaggcggaggagaggcccaaccgcaagtcgtggaagcagcgcacggacatgtacatgcggccgttcctgctcaacgtcttcttctccaagcgcttcgtccacgccaaggtcgtgcacaggggcaccagcaaggtcatctccgtcgccagcaccaacgccaaggacctcaggaccacgctgccctccctcgtcgacgacaacgcctgcaggaccatcggccgcctcatcgccgagaggtccatggacgccgacgtcttcgccatgtcctacgagcccaagaagaacgagaggatcgaggggaagcttggcatcgtcatcgacaccattaaggagcacggcattatatttgtttaggcaagttcggcttacaacgttgattaaaatatgttgcgaggtttattgcatggtagctatgttcatctgttgggtagctgaagtctgttgtcccaccatgttcatcaaaaattatgtctggaagaaagtgggtgattaaacaattggataaatcaatttagcacagctacatattaaaagcaaaggtaagacctcagatttgcactgcctatggtgaatggtcctgcacttaagaaagaggatagtaaaatgaggctcacattctttactggttctcaaactatgctcctttcctaagttcaatattatcttgtcatgcttgcagtgcacagaaaccatcctgatatggatcttccctgcatgaatacacaaatgaaagtgttttttttttcgc

SEQ ID NO: 22455 - DNA, 1229 bp, Oryza sativa
  ref <308>: DATABASE ACCESSION NUMBER: AK072635
  ref <309>: DATABASE ENTRY DATE: 2001-12-06
gcgcgcgttcctcggcacgggcgtggagttcgtggtcggcatcggcaacgaggccgtcccggcgatggccagccccgcggcggcggagtcgtggctgcagctgcacgtggtgccgcacctccgcgccggcgcgcgcatcacctgcatcaccgtcggcaacgaggtgttcaagggcaacgacaccgccctccaggccagcctcctcccggcgttgcggtccgtgcaccaggcgctcggcgcgctcggcctccagggccgcgtcaacgtcaccaccgcgcactcgctggacatcatgggcgtgtcctacccgccgtccgccggtgcgttccacccctccgccgcgccgcacctgcagccgttcctggccttcctgtcggcggcgagggcgccgttcctcatcaactgctacccgtacttcgcctacaaggacgacccggcgcgcgtgccgctggagtacgtgctgttccagcccaacgccggcgtcgtcgacccgcgcacgaggctcgtctacgacaacatgctgtacgcgcaggtggacgccgtgtacgcggcgatccaggcgatggggcacacggacatcgacgtgaaggtgtcggagaccgggtggccgtcccgcggcgaccccgacgaggccggcgcgacgcccgagaacgccgggacgtacatcgggaacctcctccggaggatcgagatgaagcagggcacgccgctgcggccgcaggcgcccatcgacgtctacgtcttcgcgctcttcaacgagaacctcaagcccggcccggcgtcggagcggaactacggcctcttctaccccgacggcacgccggtctacaacgtcggcctccgcggctacctcccgcccatggcatcacacgaggcagcgacccaggtgatccattggttcctacttatcgccaccgcatcggtcgttttcgccttatcgtgacagtatcagccactgtacttagtgagtcgtgacaactgcagttaacgggggtgccattcagaagctgaaaatggcttcgcagtgatattagattagaggatagatctaacagaaatttggaaagtattaacccaccaggcttgcactgcctttcgtcttacagtgttacagaggaagagtcatacagaagaattgtcattggtcgataatacatagcgaatcatcagttgtaagcgtatcacattcttttgggatttataaatgatcttgttctattctggcatct

SEQ ID NO: 22456 - DNA, 2628 bp, Oryza sativa
  misc_feature (203)..(203): "n"=any one base of a, t, c, or g
  misc_feature (208)..(208): "n"=any one base of a, t, c, or g
  misc_feature (212)..(212): "n"=any one base of a, t, c, or g
  ref <308>: DATABASE ACCESSION NUMBER: AK072636
  ref <309>: DATABASE ENTRY DATE: 2001-12-06
gggtttctagtctgaaggctaacctgtagacttgtacagtacctcagttacccgggcccccgaacccccaaacccccgccgtctcccgcttccaaaaccctagctcatcgtcgtccggcggcggggatgccagggatgctgatggacggcggcggcgccatcgtgccgttctcgggagaaccaggccacgcggtggcggcggncccgnccgngcggaacatccgccacggcgtggccccgcccatctgccgcgtctacgtttccttttctagcggcaacctcctgcaggtcgcctgcctccgcccaccgaatccggagggtggcggagaccgtggggcggaggaggtctccggggggagagtggtggaggtaaacctcggaggtggcggtagcgggcctggcggcgcggatgcggaggagatcgatgaggcggaaatgcggaggatcgagtacgggtcggtaccggcgtttgcgctgcttcagagcaggaagaacgcgctcgtagatggctccggtatgtcgcgcttgccctcagtctcggagcacgcagaatggtggcaatatgtgcttgaatacagtaaaaccatcggtagtctccttgggaacccagattctctttctgcttacatgattgatgacccaaagatgatccttaaggtcaaggagaagcctactagtttaaaggctgcgtgggagttgctagagatattctttgttgataaacagttgcaaacttggcttccagagcgtcttgttgattggttagccgactatgacagcctcttgaccaagacagagaacacgatatatcgcacgctgatcaatttccagaaaaagctcatcaacctgcaggttgttgaagatgatcctgattattggagtggattatcagcagctctatcggttggatggcttgatattgtggtgaatatgctacgttttcatggatcataccaattggatcagatggacagccgtgagacagaaaatgggttggttgaagctgttgctgttcttgtgtcaacaatgccacgcatgcgaccagatttgccatcgggtaaattaggccagtgttgtaaaacaagaccagattttataaaggcattggaaaaatggcgaggtcgagtaagtaaactggagtgcagtgcattctggattcagtgcggtcaccaaaaaactcgtgatggtctgaagagtttgcttcatattatgttggggaacataaagaacctcactgcttctacttcacattggctggagctctttgcttctcatttactttatataaggccattcacagtgggttttgaagggatgcatcagttagcacaaaagtgcatacagcttaaaccgtctgctgacaatagcggattgacaggcctccttactggtatcctttcagaaaatagagaggttgtcttggctgaatgcacaaaaaattttggtccttggatggtcacacatgctatggagctgctgactgctgacaatgactatgcggatatgatgttgcatgaagagaggcctaacttcggtggtataagcatagaggagctgcacaggcttgtttatgctcaagttttgtgctctcatgctttaacatggcagattgcaccaacttatctgtcctcatgtctaaaccaaggcctagggctgttggagattctgcttctgaagcaacccatacaagataatcgtgttgtattgaagactttggaaatttgccgcttgtatgagctggagaatgttagtacaaatatcatgaagattgctggcatttatcattggaaacatggtaggaaaggaactggagtttactggttccagcaagctaatgataaagttcgtcttgacagaattgctcaacaattattcgaacatattggcaagtcggtcacagatgatagttttaagcaatgggaggggctgcttgagttactaggttctgacatcggtagtgcaggtggtcttgagttccttcacaggtaccgagatttcaaaaggtcccttcagatggcacaagaaggaaggactggcgagtctgttcggcaaaccgtggagtttcttatacagctgatgagaaatccttctacacctcaacgtttctggctaccacttttacatgactcggtgaggcttctcaattgcaaaccctgcccattgttaaatgttgctgaaacgactttgttgctcaacaagctacaagaactgtcattggccaaacttcggcctgacttttccaacattcacctaccaagccatgcattgaactccgtcagattagctctagcatcaaaccttgcgcgtgcaattcttgaagaaccttaagtaatagttctatttggggtatgagtgccacatccactttgctggaagtttgacggcgttaatcgtcagttgattaccagtaactgtatgttccttgggaagaggttgaacttgtgttcactctgaatgagcaaaggttgaacttgtgttccttcatgaatgagcaattgtgtcatgcatgtatatgtaccggacattgtatttttagctttagtgataccttagatgttacttatgtacaaagaaatgctagtaaatgtattttagaatgggcacaatattgtattccttgtttcttcc

SEQ ID NO: 22457 - DNA, 1556 bp, Oryza sativa
  ref <308>: DATABASE ACCESSION NUMBER: AK072637
  ref <309>: DATABASE ENTRY DATE: 2001-12-06
gattcctctgcctctcctcctctctctccgctctctctcctgccaagcgacggccgccgccgctgcttgccgtccccctcatcctcttcttcccgcagttggcgacctcccccgcgcactccctactgcgagccgctgctgtcgccgtgccgtcgtcctgccatcgccatcctttcgctcctcgccggcagatccggccgccctgaagcgggggaagcctggagccgccctctactcttctccctctacgcccggcacagcccctccctctccctctccatcttcatttccggatcgatggatgcctgtgattaggtggcctagggctcatggttgacggcgttggttgatccggcggcgcagcacacgatctggtggtggtgcgacgcaaagggatcgacacagttcagccaagcaaggcagatatctgcatctcagcagctacatgcgcatccaacctctgccatcaggctttgtacggaagcctgatttcttgcattcttcttcattaacctaccctctatttctattggtgatgtagtagcagattgttggtaaggtacagggacgcccagttgctccgaaagattgtcttcgcccgcagccccctgttgctgtcttgagctccttggtcagttcagtgccttctttaatgtttgtttctccaatatttgaagagtggtgatggatagaaataggaaatgaaagaagccgcttttgagagccaatctggaagattgaaaaaatggattgcttgaagaacagaagacattgtaggagttctctttgtatggctacaacaagatggttgttgtagcactgagcatcagaagtcattgttgccaaactcataatctgaatggccatgatctgccaatggaactcaacagctcatcagtgctaattaccagaggagataatgaagtgaaggctttggttgctcctgcatcactgcttgcccataatgctgaattggaggggaagtggtggttcagaagatcgaggacagtgagtgtaaagtcagttacaatgcgatgaacattaagtatgagaactcgatcaaggcaagtgttatcaacccagctaaggtgagaagatgcatgctccagaacgcagcctgagtggttgcaatggtcctcaccttacaggccattgttattgagcagccgaagcccaaggctcctgtttatcagctaacagagggaaccaacacactatttcaggataagccacatgacatgctgccaaaaacctggtcatgtcaaggacaaatcctgacacccggtaggtgtttgctacacatgtcactcctatcattcttgttatattgcaattgtcaagagaaattaagctttggaataagtgtggttatctgatttacatatgagtgtgttgggttgtggggatattcaacaaataatggagtcgcgagtctgtacttgtcaagaagcagcgatagattcaatggaggcattagcacttggatggtcttacaagaatttagtgcaatggatatgtgccttttattctcttataaaattgccagtttgtttgcc

SEQ ID NO: 22458 - DNA, 4059 bp, Oryza sativa
  ref <308>: DATABASE ACCESSION NUMBER: AK072638
  ref <309>: DATABASE ENTRY DATE: 2001-12-06
tgtctgcttcttccatccttcgttgcatcggcgtggggcgtgcttagcttcctcccacccttccttccttcctccgctcttctcaattttttcgctcatcggagtcggaggagcagcagatcgcccggaatcccgccgccgcgaacccaccgctccctcgcctcgcctcgcctctgattcaggcccccgcccccgccgatcctccacaccgcgcgcctagggtttcgactgctcatccatccgctcctgggggaaggagaggagccaccgccgcgcgattcggggcttgtatgtgtatgtagggttattagattcgtcgacctactgattctactctctcggatgacctagatttcacgtaggatcctctacttccaaccgattcgccttctgcttacttgttacatttacctctacacctctccactcttcctgctcctgcacctgcacctgctgttgctgttgaagatgagctccgagcccccagagccagagccgcccaagcgcaacatgaggatcagttactccagggactttatgatctccgttggagagaccgaccgctgcaagaagctgccccagggctttgatgcctcacttctcagtgatctgcaggagatgtccgctggcgtgcttgacaggaacaaaggctactacactacacccctggggaggtccgacggctcaggtccctattcttattcttctcatggcgggagctcaggggggaaggtgggaaacacgctcctctggttcaagtgaccgcgacggagatttgcctgaccgtgactcatcaatgcaggataggcgtaatgggaacccatacaggcgccattggcagaatcaagagcatgatggcctggctgggaagtggcgttctccctagaccacctggatatggagggcaagtggcatccaaggatcgtgggaatacgtatcagccaaacaggacatctgaacgctaccaaccacctcgtcccaaggctgcgccttttccacggaaagatattgacgcaatgaacgatgaaacatttgggtcttctgaattttcaaatgaggatagagcagaggaagaaaggaaacgaagggcatcgtttgaaatgatgaggaaagagcaacataaagcccttcaagaaaagaagaatggtcctgagattgagaaagaaaactccggtcatgatatcatttcactgttacagactccctccgaaaggacagcaaccacagctaaaagtgagaagccagatggatctgcaatttcctcagcttatcaagaagataccactaaaacctcttcagttctatcagcttccactgccagaccacttgtgccgcctggtttttcaaatgcctttgtggagaaaaagcttcagccacaatcgtccaacatctctcttgaaccaaaggttattgatgcaactagtgagggtaacatattggctacagcacaatttggtggccttgtagagggtaaccagtcagcatcagagatcacagcaagcaaaaataaagagaagggcattcctgataacattgctagtgtaggtaaacaacacacacttccatctggaggtgttacatattcagctgaatttgcatcgagcattctgaaaggaagtggagactgggaaggtgatgcaatggataagtattctattgaaaacgaaggaaagtctaaaaatattggttctgttaggaaggaccattcaatctcaatcttggaacaattctttggcagtgcattgtcaaaaggtggaactgatttgccaccatatgttgagaatcagcagatgaaaaatgatgacgatgtgattgtttcctctttaccagaatcatccaaatttgctcactggtttcatgacgaagactcgaaacctgcagaagacttatcatcaaatggtctgctatccatgattgtcaaaaatgaaaaaccaggtcaagaaagtatagctcatggacctcctttatctgatggtgccgttcagaatttattaccaatatcaccgactcataaacttgatgttgcatcaacgcaccccttgttcacaccagctgcacctgccgtgggaatgctggaacagcacaaccatgctgatattgatcctgctccaattatgatgacgtgtgaggatcttgagcaggcaatgctggcgcaggttgctaccagtagcaactccaatcagaagaatgttgtacaggagcatcagcttgttgtagatgagccgattgctacacagaaagtggctgtagacaatcatgcatcacagcaccttctttcattattaacaaagagcacagataacaagggatcatcttcttttggcttacacataggatcatctgatagatcacataattctgatgttacatccaatggtggagtatctggaatagctccagttaataaagctgaaactgctcccacttcagagaaaaacctaacattggaagcattgtttggggctgcatttatgaatgagctccaatccaaggatgcacctgtttctatccgaggatctgcaactagcggtcctaactatgagttcgcagagacaggcaaaacttcaattgcatcaagccatgaaggatattaccctggtgaacaggtcctacccttcggcaccattaaagatggagttgcccctaaagaatcaggaactggcaacaggaatttagcattatctggcccaagtcagggcagtgctagcttagataagaaaagcttggagattcagttgcctgaagaagataatttgtttacagtgaacgactctttggatggtcaaaagcctgatatttttccatcggtgagatccagtagggttgaggggctactaccagaaaaggcagttgatgatcttaattataggcttcaaagtctagtgcctggtgattcagaacatgttcaagtacttggtcctgatgcgctgggatcccattctcatgaacggcgttatcaggctgaatctcaaaatctttatcatcttctacaaggtagaccacctgcactggctcctcgtcctatgatggatcacattggtaataggaatcagcaaaccccgtttgacatgacacaagcgatacagcatgatcctcaccgttccttttcatcgaacatgaatcctatgcaacaatctcttcatgctcctcgggctcctcatgtagacccagctgctcatcatcttatgatgcagcacatctccacacctggaaattttccaccagaaggcctgcaaagaggtgttccgccatctcagcctgtgcatcacatgcctggttataggcctgagatgagcaatgtaaataacttccatatgcaccctcgccagcccaactatggagaatttggattgatgatggcaggtccatcaggtccagaactgagaggcaatcacccagatgcctttgaaaggtttctccagatggagcttacagccagatccaagcagatgcacccagcaatggctggtcatgtacctggcggcatgtacgggcccgagcttgacatgaacttgagatacagatagatggatgcgtgtgattgcttatgcagtatgaaggacccagaaacggtttgctgtacttgcgtcaaatagtactctttacccatgccataccgctatgtacctgtgtcaatgagcttgggttagcgtttaccatcaatacaatcgtttggctgcgataaggtacctgatgattcactggtggtgggggttggttgcatttgcatataaatatggagaagttatgaatgggttggtgatctggagtgatctgttgtgaaagtggggaacccaacgaatattgggtgaggtccatcaccgtagcagccacctctgcattgtgtctgtctgcctgcctatctgttgttttcagtttctgtataaatactattctgcaaaagaaagtaccagattgacagacacatttggaagtgtttccctggcctcaccttttcttttagctacagtagcattttatgtttaatttagtttctaggataaaatgctatccatgtaacgattctctggtatttaagcatttaccccctccgttttc

SEQ ID NO: 22459 - DNA, 4259 bp, Oryza sativa
  ref <308>: DATABASE ACCESSION NUMBER: AK072639
  ref <309>: DATABASE ENTRY DATE: 2001-12-06
ggattgccttgaggagacatgactgcaattgcattgaaaaaactgtaatctaagcaattttcaacactcattgcaccttccaataccttgacaaccattgacatagaaggcctttggcagctatcattctgcaagcaccacattgcgagcttcatcatttgaatcacttcctcctggcgcgagatcatgtcattactgtgcttatcaaccatatcaatcaactgattattttgagccttttcgcataataacttaatgagctgaacactctcctctggctgagagaaatcaatattttttcttccacttattatttccataagaacaacgccgaagctgtagacatcaactttttcagtgatttgtgatgttaaccattcaggtgccagatatcctggtgtgcctctcatcacagtcattaccttgctttgatccctatccattagctttgaaagtccaaagtctgccaatttggcattgaagttctcatctaagagaatattctgtggtttgatatccaaatgagcaatttttcgtctgcattcctcgtgaagataacataaacccttggcaatatccagaatgatcctacaccttgtgttccaatcaaggggggtattattgtgggggtaatatatccacttatcaagtgaccctcttggcatgtattcatatactaggatccggtttgacttctctacacaaaatccaatcagcctaacaagattgatgtgttcaatgctgccaatagtttctacctctgccaagaattctttgtttccttgtctagcactttccagacatttcactgcaactctctcttcacttattttcccttcaaagaccgatccaaatccaccttcgccgagcttctaattgaagtcttcagtgcattctcttagcttttgaaatgagaatctcattggcattccaggcaatatatcgaaatctaattcttcatctatctctagatacttcctcctcatttgtacatagataccaacaataacaaccaaaacaagagtaataattgctgcaaccgtagaacctaaaattgtctttattttgtaacttttcttttgtgtaggggcagataaggatgtttgttttggcgcagaagaggaggcagtaagttgcactttaaggtaagcagtagaattgtaatgaataatttcaggctgtattgattgcaaggagaagacctctgtcactaactggcattctccatcggaaacattttggtcatacctgaacattacagccctgcaggagcaattcttcaagcaatcttgcttgcaatcctctctgtttttcgcatttgcaatagtttggcttccatcaaagtaagaaacatcagtaagagtcaagaattgatggttttgcttttcttgacaagatattggattcattggtgcacaaccaagattagccttccgttcgtcaactggatggaagtaacctgaactagtattagtctgaagaggacagatgcattgtccacctgcacatatcccgtactctccgcacactgttgggaaagcacaatcatcagggtatttcttgataacatcagataccatggtccacttttcatcagaccactcatacagcctcaaatgtccatcgtactctaatcttatgtactggatggacttcgcttctggcagtgcaataatggcttctggctttcctgcctgtgtcgactgcagaaagatgttgaggcttccattcgtaaaggtaaccctcgtcggatctttctgctcttgtttgtgtccaccaaatatgtatagtatagctgtggtggtttggatccaacatagccatataaaccatctgggagaacagtcatatacaacttactctcagtccaatttgtggtagatgtatttgctctgagcttcattccctgcagcaatgactgcccagggaccaatacatcggttggatgatcaaatgactgccacactgtcgcattcctctgatcaaacagcaccaggttgccatgctcagtgatctccatacctgccactaattggactgaagtgttgctcgaccagacgagtctgccattagcttcatggagtaccaagttgccatctccagtgagctcaatggttgcgttctctccaactaggcttgcccggttggctgaccagattacctgtgccattccgtttaccgataaggtgatcccggcaccgctgttggtgtagacaatgaagacagcaaagaggaatgattggcagggtggggcgcagaagaaccctgcagcgaaggagatgccgggcaattgtttttgtgaacggaggacaatggcacgtactgctgacccgtcggtgtaggagttgtgcttgagcatggcagcattgttgacccatcgcgtcgagaggttagccataggatagtcatagggctgcccggagacgaacggtgctgcagttgcaagcagcagaagcactaccacaatctcaaagaagagattggcaggatgcatggttcttggatgggaaggaacgagattgaagccagcaagaaactgtggccaattcagaggctgataagatgtcctgacctgatgacactgaatcgatgagctgatatggtcaccagaaagatggctcaccctcgcggccttgccagctggcgcatgctattgctcccaagtggtcgactactcatcttctcgcactccggatacaagtcaacagttcagaaccataccactcggtgctttcaatttcttttgaagattgattggcttgaccacttctaatcctaaagtgacaacaattggctttacaggcattcccatgtaactttgattaccatggattctggtgaacaagtttccttctgccgtatcatggggaaaagcacatgctgatatcattaactttagcaattcaagcatttttagagtagacaccgggatggtaatatgaagcttcataattaagcatgccacggcattcgcattccgttcttccattttcgtcctgggagagcataacagctaagactaatcaggtaagaccaggtaacacggttggttttaaatttacatattaggggaacaagtaatttacttatactccctaattccatggttttggatgtgtgactttaaccataatttaaactataatgactttataaaattcaataagttcaagagattatgaaagtgtttttgggacaaatctacacatagcatttttatgttttaaagataagtatttcaaaagttaatgacggttaaagttccaaagtttgatcaggtcttatcaaattaaacatcaaataatgataaccggagcaagtatttcaacacgtacttctcttcacttctaagctccaacgaatccgacaagttggaatctacaagggttgaatccttttttgtttaaattgcagcaaccaaggtcttttgaatcctttcttttgtgcattgagttataggtactatttagtttacctaaaaagttaatgtgaattgcaaactgatgtagaaggctataatttctttatacttcaacaaccaccaccatcttctatagtgtgcaaccaggagtctcagtggcagctaggatcatatcatatgattttcgatccttctaggaagaatcgctgtccatattcatggacaccgattagaaattcataggtactttatcttaaaagggatactttagcataccagacccccccattttgtcattccagtagactgttaaaggtagtttctacccaactaccagctgaaattttttgctgatttctacctagttttggattgtaggatcatcttgatagagacacctgccgactataggaagcacggagcaacctcactcgttcttctacgcatgaactaatatgttgatctgctttggcacagtgtcagtgaaccaatcaaaagacaaaaacaggggaattcttagcaataagaagaggttgggaagaggactgaagggcatggtgccggagagagaactccagagagggcagcatcaaggtgaacgagaaagaaagagaagtagagaatgaaatgggggatgcatttgtgctgtcaacttgcaaaaaacatgtccatgatccgatttgtaatttcgagctgtgcaaatctcctagcaccgaaattttgttctgttgttactattggtagttagtttggagaagtgtgactaagttaggtgtagccttgtaggaaggtcgttttggacttttttttttaagaaccgtcgttttggactttggtt

SEQ ID NO: 22460 - DNA, 3063 bp, Oryza sativa
  misc_feature (2163)..(2163): "n"=any one base of a, t, c, or g
  misc_feature (2273)..(2273): "n"=any one base of a, t, c, or g
  ref <308>: DATABASE ACCESSION NUMBER: AK072640
  ref <309>: DATABASE ENTRY DATE: 2001-12-06
gaatcccgccgctgactcccccaaccacggcggcggcggcggcggaggcggaggcggctgcctgatgcccagccgcccgcgggggccatggagctcgtccccttcaagcccgaggccggggccctggtcgagtcgggcggcggggcccacggggactcgatcccggccatggtggcggcgcagcaggaactgctgcacgcgcaggtggaccagctccagctcctcgtcgtcgcgcagtgccgcctcaccggcgtcaaccccctcgcccaggagatggctgctggggcattgtctatcaagataggtaaaaagccaagggatttgttaaatccaaaggctgtcaagtccatgcagtcactttttgctatgaaggatactattggaaaaaaagaaactcgggaaattagcgcatcttttggggttactgttacacaggtgagggagttctttgcaagtcaacgtacgcgagtaagaaaatttgttcgcttatcacgtgagaaagccctgagaatagagtcatccaaggctcctgacaatgtatgctccataagcactgagcagacacctgttgacattgaggcacatgctcaagttattgagcctctgagaacattagaaccattggaggcgcaacaaatttctttgccgcatctggtggttcctcaaatctctttacaattgccggtggtcctgcagagctgtgcaatccctgttgccccaataggtgtaatgcaacccaccgaggctaagactaatcccgatcccattcaaaaggaaactaagcaagaggaagttgctggagttgagtcagaagataagaagtttttggaaagtatctttgttctaatgcggaaggagaatacattctctggacaggtcaaattgatggaatcaattctacaaataaacaatgtaactgttcttagttggttcttaacaatgggtggtttggccattgtatcgacgtggttgggccaagcagttactgaggagcaaacaacagttattcttgttgttttcaaggtgcttcttcatctcccattacataaagctctgccagctcatatgtcaactgtattgcaaactattaacaggttgcggttttataggacacaagacatatcaagcaaggcgaggaacctcctctccaggttgagcaaagtgcttgtaagaagtcaggcattgaagaaatctcagaaggacttaatctgtaaacaaaggataagtgaaattctccgtgatgagtcttggaaatctgaagttgatattactgaggacatccttgccttgactgatgatgcaagtgagagcagaatgcctgagcccagaaaaacgccattgctgctcactgcttctgcggacgaatcaaataaaaagagttctctgcagacaaaatccaaagagaaaaggaaagttctacttgtagaacatccaaatcggaaagctgctggcaagaatgttaaccctgtcagaagcacatctacgaacaatagtagaccgttatctgcagatgatatcccaaaagccaagatgcgtgccatgttcatgcaggagaaatatggcaaggttgacacaagcaaagtgattggaaaacctcatatgatggaaattcaaaaaccctctggcttagttgattcaaatgtaccgcttgtgcccagaacccctcttacttcaatcattaaaccacctgttgaccctagcccatcaacctctaaaccaagtacactatctccacctgataagccaggaattgccgttagcttgaagctgaacgtaactggcaaagaaaactttatagagaactgggattccaagagagttatttggcagataccaccagaggtttggatagaccctgcttggagtttaggtgctggagagaacagcaaagaattggagggtcccaacccagagtaacaggcgtgagaaggaaaccttttatgctagtctaaaggacataccggttggacttcaaaaggggccaggggatgtggaaatggactttgatgacagccttacaccggaacattccaattgagcagccaccagatgctgacgctatggaaacggatagcgtgagcacagcccctccaaacattgtggttcctgttgtggacaagccaataggatcaacctcatcagtatctccagccgttgctgctngtgcgagcggggcaacttctgaaccagatcttgagctgcttgccgtgctgctcaagaatccaccacttgtctttgctctaacttttaatcaggtgggaccctgccaagtnagcagaccgttgcacttctggacatgttgaagcagactggccctggactatcagagcttgtaaatagcctggccaacaatttggggtccaaaaagagcccggaaatgtgggtcgtgaagcctatccctgcttcgcttccatcgccaacctcctccaaaagacctgatagccagggatggctggagttcagagttcccatcacaagtgaggacccaaaacttgcagcacgcccatttgccaaacagagcaaatgcacctcctgttgcgagcagcgtgcagcaaagtttctcaaatgttgtcagttcgttgccttcacaaccttatgcttcagcttctgctttgccggcacagactcgaactaatatgacatctctcccccagtcgatgatctccgtaaatccgtcaactcaacatgttgctcctatgaataatcttctgagcagagccacggtacaccagcacacccaatcatatgctttaacgtctgatcctgttgcagtggcggtccatcatcagccagcggtgaacaaactagcccatgaggttcagagcatctcacaccctgctgtatcacattcttcggtggctgaatcacatgcctcttacacatcatacacctggcaatctagtgttgctaccattgccgccactgggcgaaatgctacacctgatcgatgggctgcacctgcacgcactactaattcctttaacgctgccccatcaaattcaaaccatgtgacgtatcctaaccagaatgcttacagtaaccacagcacacaagctactacat

SEQ ID NO: 22461 - DNA, 3616 bp, Oryza sativa
  ref <308>: DATABASE ACCESSION NUMBER: AK072641
  ref <309>: DATABASE ENTRY DATE: 2001-12-06
gactctcggactctccactactcttcgccgctcgccgcctccttgctctcaccgccggtcacgacggcgccgccacccacccggtccatcacctcctctcccgccgagcaacgctggaatggccggccgcggaaacgccaccggctccacccgcacccgcgcctccgtcaacgtcgtcgcggtccacggtggtaaagatttgtacaaatcctgctcgttgttccaagattccgtcgattggttttcgccgaaagaaaagcaaaattattcgcaaagtgcggcggcgatggagctattccccgtcgatttcccctttccacgccctccattggcgtttggcgcgacggatcggcatcaatcccccctcccccacgaagcttccattggttcccccgcgtgttcttgaccccttcatcttccatggatccgggcatctcactctcgctgcagccatagctcgtctgggtgttcttggtctcccaaaaccaccaaagatcaagcgttgcacggttgcacctgagattcagagagaggaggattgggaaagatggtcggagccacggcgagtgctttgatcggggtgatgaatcccctcctcacgaagctctccggcctgctcgagagggagtacggcaagctcaagggggtgggccgcgaggtcgcgctcctgcgagacgagctgagcagcatgaacaccgcgctggaggcggtctccgattcggaggaggagcccagctcgcaggtcaaggagtggatgcgccagctgcgggagctgtcctatgatgtagaggattgcatcgacgtcttcgtgcaccgccttggccaccatgaccccggcgacgggctcttccgcaggaccaaacgccggctcaaggctctccggagccgccactgcatcgcaggccagatcgccgagctgaaggatcgtgccgtgctggtcaatgaccggcgcaagaggtatgagttggatgcagctgcatctagctctgctgcgatcgccatcgattccaggctgcctgcgctgttcgaggagatggacaggcttgtgggcatcgaaggtccaagggatgaacttgttgaatttcttacgggaggaatcaatttggctccacaacgcagagttgtctctattgtcggatttgggggattaggcaagacaactcttgccaatcaggtctatcaacatatcaaaagccaatttgatcgcacagcttttgtgtctgtgtcacggaatcccaacgtcaataagatcctagccaacatacttattggaattctcgagacaagaaagctatcatcagttcatcagaagcagcatagtgacacaatagaagatctaaagcacaaaacttttgaagattgtaagcttatcagcctgataagagaaaacctacagaatagcaggtacttcattgtaattgatgatatatgggataaagctgcatggcgagaccacctccgatttgcttttcctgagaataactctgcaagcagaataattacaactacacgcatcaatgatgtagctatagcttgtcacttctcacatgaagattttgtttatgccatgaagccccttagcagtgagaactctgaggcattattttttagaagaatctttagctccaaggagaaatgcccccctgaattggaagaagttgctgatgatatacttaaaaagtgtgatggtttgccattggccatagttagtatagctagccttttatcatgtaaaccagttacgaagcaggagtgggtatgggtgctgaactcctttggttctacagttatgaaagatcaggggtcacacgagttggcagtagtgaagaggatactatttcttagttacagtgatctacctcaccacttaaagtcttgtcttttgtatttaagcattttccctgaggatcatacaattactagagattttttgatatcgagatggatcgctgaaggattcattactgaacaacgaggagagagtttagaggaagtgggagaaaaatattttaatgagctcataaataggaatatggttcaatcatttgagattgacccttttagtagaagagaggcctatcggatgcatgatatcatgcttgatcttatgatatctctgtctactgaagaaaattttgcaactatactggatggtcagcactgtgcaccatcatccaacaagattcaccgtttctccctccaatgtaaaagtgtggaaaggatcacgtggctgagaaccactagtttttctcatgctcggtcgctctctgtctttggtgattttaacaagataccccctcttgtggaccttgaagttttacgagtactagacctcttgaattgctctagtttgaaggatgatcatatcgagaatattggaagtttatttcaactgaggtatgtcagacttggaaatattagcaggataccaaggcaaattgggaagctaaagctcttgcaaacactggacctaagtggaacagcggtaaagaagttacctcaatctattgttcaactgctccaattggtccgcctttttctgccttggcgtgtagaattgccaaatggaattggtaacatggaagctcttcaggtgctatcagtgttcgatggcactgaaaacacatcagctatcattcaagagctcggtaacctaaccaaactgaaggatcttgatgtgtactggaattgcaacgacacagaaagtggtcatgaagtgtacatcaaccatttagtcagatctctctgcaagctaggtggatttaaccttcagtctctttgtattcggaatatatacccctgttccttagatatcttggctgaatcgtggtcccctcctccacgtcatcttcagacatttcagactgatatgggctgttatttttctagtcttccaacatggatgtcctccctctctgagctcacctgcttaagaatacacatgaagaaggtgggagaggaggatctccaggttctcaagtgcttgcctgccctgcttcgtctcgatctatacccagggtaccccaagcatactctcaaagttagctgcagtggattctcatgcctgaaggaatttacttatggtccatcctatgttgatctggctttgatcttgcgtcatcagtcaactatcaaaaatggacttggtatgggtgtgatgtttgaagcaggggctatgccgaagctccagcagcttgagtttggtttcaacgcacatgatatggtatctgcgtatggagctggactcgattttggcatccagcactttgcctccctcaggcatgttcgtgtcttcatcgactgtagggatgcaagtgattgtgagatggaggctgcactggctgcaaccgctaactcggtttctctccgaggaagctaccacgttgaaattcgtagaattttaaagaatgtggaaaatgatgagcagagctgacttgggacatcatacaacatggaactaaacataaagtttccagccaaaatcgagatgccaatatggtttggtaatatattaatcttcctcttaaaccgtctattgttacattgttccttagctctttctttttcttgtttctgttttcagttgaagtaaaatactaaagtgttttggataccc

SEQ ID NO: 22462 - DNA, 960 bp, Oryza sativa
  ref <308>: DATABASE ACCESSION NUMBER: AK072642
  ref <309>: DATABASE ENTRY DATE: 2001-12-06
gacccagcaggttcgccgtcgccatggcgtccgcccgcgccgcgctcctccgccgccactgcctcgccgcagccggcggcgccaaccccgtgctcttctccggccatggcctccgctaccgcaagctggaggtcatcctcaccacgacgattgataagctggggaaagcgggggaggtagtgaaggtggccccaggacacttccgcaaccaccttatgcccaagatgctcgctgtcccaaacattgacaaattcgctctactcatccatgagcagcgcaagctttaccaacgtcaagaggaggaggtggtgaaagaagtccgacaagaagatgatgatgctaagcaacaggaagagaaactgaaggagtatcaaacggcagcaaagtgtcttgataatgctctcttggtgttgaggagattcatctcagttgggaatgaactgcggtctcctgtgacaaaggacgaaattgtttccgaggttgcaaggcaactcaatatcaatatccacccagacaatcttcacctgccgtcaccattggcatcccttggggagtttgagctgcccctccgtttgccaagggatataccacgcccagaaggcaagctacaatggactctaacggttaagatcagaagaaaataagtacaatccatggggtaactttgttccccctccaaggaggtgaatgatacgaaaacgttgcagaattcagagcaagagacttcagataaggtttgctgcaaaattcagtcccattttgaaaatggtggactgcattctgcggtgtggtttttcgaacctgcttatagacattcttggcctttccttgagaggatgatcggtactagccattttcattcgtgaatactgaataatctttctggaatagatatgttgcaacagtttttagcagccagacagcatggcctgtgtattgtctacaacgtcgtattttgtt

SEQ ID NO: 22463 - DNA, 1212 bp, Oryza sativa
  ref <308>: DATABASE ACCESSION NUMBER: AK072643
  ref <309>: DATABASE ENTRY DATE: 2001-12-06
gttcctgaatcttcctaccgtgcgtgagccgtccccagtaccagtactcaccacctacgcggtcgcccaccgcgccgtcgccggcgccggtcagcccctcaccgccgcctcccgttcgccaacgacgtcgtcgccgtcggccctatcccccgtcagctccgtcaaaggcacggagaaacgaacaaacgcgagagagaaaacaagaagaggaggaggagccgacgcaaccgaggccccagttccgattgatctccggttcccagatcggccagcaatggcttcatcttcggacccatggatgaaagagtacaatgaggcatctaggcttgctgatgatatcaattccatgattgccgatagagggtctcttccacaatcaggcccggaaattatacgtcacacatcagccattcgaagaaaaataactattctttgtactagactggatagcttggaagcattgttgtccaagattcctccgaagtcactcagtgacaaggagttacacaagcgccaagacacgctttccaatttgaaatctaaaacaaaacagatggcaacaagttttaacatgtcaaactttgccaacagggaggacttgcttggtcagaacaagaaggcagctgatgatatgagcagagttgctggtttggataaccaagggattgttggccttcagaggcaaattatgaaagaacaagatgaaggtcttgagaagctggaagagacagtcctgagtacaaaacatatcgctttagcagtcaatgaagaacttaccctgcatacgagattgattgatgacttggaagatcatgttgatgttacaaactcgcgtcttcagcgtgtgcaaaagaggcttgcaattctgaacaagcgcaccaaaggtggctgctcatgcatgtgcctgctgctatctgtcgtcgcaatagtgatccttgctgttatcgtgtggcttcttatcaagtatatgtaaaatggatccatgacgtttgttcaacgcatcacttctgcgctactcatcaaaatgtgcagccttttaaagatgtaccatggttttcatctcggctttgttctcctgggtggaatggttttatcagtgtgtgtacgtcatatgaggccctggcatatatgcccaacaatatgtctgagactaccactcacgtggaatttgttggattgcaatgagaagtatatatatgtttttgtgtgtgc

SEQ ID NO: 22464 - DNA, 1793 bp, Oryza sativa
  ref <308>: DATABASE ACCESSION NUMBER: AK099291
  ref <309>: DATABASE ENTRY DATE: 2002-08-28
gtgaaaaacagcttcttctcccctctaacccaaaaaggctgaacctccaccttcaccgcctccgcctctttgacctcctcctccgccattgccgaccaccccaagctctcccccctacaggagccaagagaaggggcaccgtgccgtttcttggacggcggcggcgatggacggcggcagggtcgggggcgactacatttccagcctcctcagctcctccccccggctcgacttcggcgtgccggtgctggacgccatcgtggcgccgggaggcggcggcggcggcggcgactgcggcctcgacaagctctgcggcgacccggtgttcgcggagcgcgccgcgcggctgtccagcttcaacaacggcggcggcggtgttgggcagcggtacggcggcgcgggggcggggctcttcgggatgcctcctccggctcccggcgacttcgccggaggtggctccagggaggcgtcctccgtgtccgaccccgcctcctcggcgatgaaggacgccgccgccaatgccaagaagaggaagtccacggcggcggcggccgccgccgccaagggcaaaggcaaggagcctccggttggggaagagaaggaatcagatggcaagaggtgcaagacgggcaatggcgagaaggagagctcggtgaagccgaaggcggagcaggccgggagcgacagctccgtcgaggacggcggcggtggcgggcagaagcaagggaaggggaagaatgccaagccggtggagccacccaaggactatgtccatgtccgggcgaggcgaggccaagccactgacagccacagcctcgctgagagggtcagaagagagaggatcagccagaggatgaaggtttctccaggacctggttccaggatgcaacaaggtaattggcaaggcactcatgcttgatgagatcataaactacgtgcaatcgcttcaacggcaagttgagttcctgtccatgaagctagcaactgtgaatccacttgatttcagtaacctgcctactctgctgcagaaagatatgctccaagcatgcggcccttcagcgagctcggttttctcattagaaagctccaattctgcttttcggtttgccgaacaaggagatgttttccaacagtttgctcaaaacagcatggaaagccagtgcaccctgaatcagttggacctggctctatctcaggctacaaatgctgcacagtatgcttttcaagatggaacagccggcgcaaacttgcagcaaaggaacttctgggaggatgatctccaaagtgttttccatattgagaatggacagagccaggagaatggggtttcagcaccaaacttccatggtcagcagcaagcaggccacatgaaaatggagttctaacctgcttaggccacactgatcaaggaaaagaatgacaatctgtacatagggaagagacccaagtgcaaaactcccattggcaaagctagtgaagctctctgaactcttgaagctaacagtcatcattaggctcttaagagaggatatttcttaatcatagtctgcctgtagggcgatgtgattcttttggtacctactatttgagatgattatattttgatataaccgtaacaaattaaaatagttaatttgtgtataaagatatggtgcagatattacaaagcaccctcttcttcttctttctgattatgtatgagctggccaattagcggctagctggatggatggaaccatgtattaccactgttgcattttgtctatgatgatagttatcctcaccttatcact

SEQ ID NO: 22465 - DNA, 1225 bp, Oryza sativa
  ref <308>: DATABASE ACCESSION NUMBER: AK072644
  ref <309>: DATABASE ENTRY DATE: 2001-12-06
ggcgtttaccctagcaatccattttagattgattccgtgtagatcgatggagtttggggcggctggtagttccaggccgggagactaattctgatgcgattcgacagcggacggatatttggagagtctgtctctttttgccgccgcctatgattcggagcagcaagcgccgccgcctgacgcccatccccagcgacgccggcaagatgtcgccggattgggcttcgcttgaccaggatctggtggggctgatcggggggcgggtgcttgccggcgacgacatgcgggactacgtccggttgcgcgccgtctgctctcactggagcgcaagcaccgtccgcccactcggccgcggcgtcaccgaccggcgtttccacccgcggcggtggatgatgctaccggagggccacggcctctaccccggccatcccgacctccgcggctacgtccgcttcttcaacctctccaccgccgccttggtccgtgtccatctaccgctcctacgcgaccacgtcatcatcgactcggtcgacggcctcctgctcctgcaccgcgaccacgacacagccatccgcctcctccaccccttcaccggcgatgtcgccgacctcccgccgctggcttccctcctgccacagatggaatccgagagccgcgaccgcagccagcgaagcaagcacagcagactaatgaaagtttgcgcatctgttaccgtcacctccactggcaccatcaccgtcatgctggcccttgaaatcctgcaccgcgtagcctacgccactcccggtgaccaacggtggactctctctgcctggacgctcaaaccttttgtcaaacccgtatctttccaaggcaaactctatgctttgcagctctcatcttacgacatacataaggtatacatctaccagtttaatccaccatgccaagataacgacaagggattgcttcatctgccattgccagtgaagattgctgaatgcccaatggacaaatttctatacctgctcaactttgctgaatgtggttcagagctcttgctggttgcctataatggtgtttctcgttcaaagctgctagtatacagacttgctgaccttgtcagtggaaggattgagccagtaacgaccattggagaccacgccttgttccttgatgaacgttgtctctgtgtctcactctcaaataacaaggaggggagtaagatccttccctccgatttgtc

SEQ ID NO: 22466 - DNA, 1576 bp, Oryza sativa
  ref <308>: DATABASE ACCESSION NUMBER: AK072645
  ref <309>: DATABASE ENTRY DATE: 2001-12-06
gaaggcgagggctgaggccgagggcgacatcgtggcgctgaagaactacctcaacgcgcagtactacggcgagatcgccatcggcacgccgccgcagatgttcaccgtcatcttcgacaccgggagctccaacctctgggtgccttcctccaagtgccacctctcgattgcttgctacttccactcgaggtacaaggctggtcagtcgagcacgtataagaagaatggaaaacctgcttcaattcattatggaacgggtgcaatttctggctattttagtcaggacagtgtgaaagttggtgatgtagctgtgaaaaatcaggattttattgaagctacgcgggagccaagtattacattcatggttgcaaagttcgatggcattcttgggcttggatttaaggaaatctcggtaggaaatgcagtgcctatctggtacaacatggtgagacaaggtcttgttgttgatcctgttttctcattctggttcaaccggcatgctgatgaagggcagggaggcgaaattgtgtttggagggattgatcctaatcactacaagggaaatcatacatatgtccctgtcactaggaagggatactggcagttcaatatgggcgatgtcctaattggagggaattccacaggattctgtgcagctgggtgtgcagcaatagcagattctggaacttcactgcttactggtcccacggccataattactcagataaatgaaaagattggtgctactggggtagtcagtcaagagtgcaaggcagttgtttctcaatatggtcaacagatcctagatcagctgcgagcagagacaaaaccagcgaaagtatgctcttcggtcggtttatgtacttttgatggtactcatggtgttagtgctggtattcggagtgtggtggatgatgaagttggaaaatcaagtggtccctttagcagtgcgatgtgcaatgcttgtgagacagctgttgtatggatgcatacccaacttgcacaaaatcaaactcaggatctcgtattgcagtacattgatcaactatgtgaccgtcttcctagtcctatgggagaatcatctgttgactgcagcagccttgcatccatgcctgacattgccttcacaatcggtggcaacaagtttgttctcaaaccagaacaatacatcctgaaggttggtgagggaactgctacccagtgcatcagtggattcacagctatggacattcctcctcctcgtggtcctctctggatcttgggagatgtctttatgggagcctaccataccgtgtttgactatggcaacctgaaggttggcttcgcagaggcggcataatgccccccatggtgatcggacgagtcggagagcccttagcttttcagctcgggtttatctcccgcaagcgtgtaggtatatattttagtgcatgctcaataaatattgctactgtgatctcaaaacctgtctgttttaatttggctaagctaaatataagtaggcagaattcagacgacagtttatcacaggaaatactccatgagttagcaataacaaaacaaactgataacgagg

SEQ ID NO: 22467 - DNA, 2325 bp, Oryza sativa
  ref <308>: DATABASE ACCESSION NUMBER: AK072646
  ref <309>: DATABASE ENTRY DATE: 2001-12-06
gtctcgtccaatccgaggaggccctcgggctcggcgcggcgaataatttaggaaattgattattaataaggcgagcggcgagcggcgatgtcgtcagccgccgtgatgccgacgccgagcatgaactcctcatccgccggcgcagcggccgcggcggcggcggcagagggaggtggcggcgaggacgagcggcgggcgcgggcgctgtcgtcgtcgtcgtcgtcgctgcggcagcgcgcgatgagcgcgtcgtcgaagctgctccggacgtcgctgagcaggagcagcaagggggcggcggcgcggcagcggagcagcaaggtgatgtcggtgtcgatcgaggacgtgcgcgacgcggaggagatgaagtcggtggacgcgttccggcagacgctggtgctggaggagctcctcccggcgcgccacgacgactaccacatgatgctccgcttcctccgcgcccgcaagttcgacatcgacaagagcaagcagatgtggagcgacatgctgcaatggcgcaaggagttcggatctgacaccatcctcgacgacttccagttcgaggagatggaccaggtgctcgagcactacccgcagggccaccatggcgtcgaccgcggcggccgccccgtttacatcgagaagctcggcgcgatcgacaccgccaagctcctccaggtcaccagcatggaccggtacgtcaagtaccatgtccgcgagttcgagcgcgccttcgccgtcaagttgccccgcctgctccatcgccgccaagcgccatgtcgaccagagcaccaccatcctcgacgtctccggtgttgggtaccaagaacttcaacaaggccgccagggatctcatcggccgcctccagaaggtcgatggtgacaactacccagagactctgtgccggatgttcatcatcaacgccggtcaaggattcaggcttctctggaacaccgtcaagtccttcctcgatcccaagaccacagccaagatccatgtcctaggcaacaagtaccagagcaagctgctggaagtgattgatcccagcgaattgcctgagttccttggtggcacttgcacctgcgaaggcggctgcatgcgctccgacaaagggccatggaaagatcctgaaatcataaagatggtccaatgtggcatgggaagatgtggatttaatagctcgggtcatactgaggctgatgagaagatgatcactgaggatgacatagtggcaattcccaagaagcaagaatcaattcgccgtgattccgttgattcacccaagatcccacgcgaaaagattgaacatccgcagatgtcaccactccatgagatgtcaacttcagaaagcaaggctcctcctggccaagagggaagctcttcccgatacgacgatctgttccccatgccggacaagaacatggacttcaactggaacggcgaagtcagcgccgagaagctcgcactcgccacgagacatgtacgcgtcgctgccggacgcgtacaagcacggcgacgccggggaccggcaggtggtgacggggttcatggcgttcgtgatgggggtggtggcgatgttccgggtggggaagatcgcgccgaagcgcgccatggacgcggcgatgggcatcgcgacgatggaggcgatggccaagaaccggaagctgatgcagcagcagcagcggcagctggagcagctccctggcccggacacggtgacggtgtcgacggcgcagtacgaagcgctgatcaagcggctcggcgacctcgaggagaaggtggcggcgctcacctcccgccctcccgagatgcccgccgacaaggaggacttgctcaaagccgccgtcacccgcgtcgaggccctcgagaccgagctcgaatccaccaagaagcttttggagacttcgtcggggcagcaggaggaggtgctggcctacatcgagaagaagaagaagaagagggggatgcagaatccattccgctggtgatggacgggtttaaagcaagaagcggtgatggagctcggtcgtgcgtctcgtgtgttgttttgtgtgcgtcgtcgtcgctgtatctgaccccgtttgaaatgcgaaaaaaattttgctatttctgcgggagttgagttgagttgtttcctccgggatttctgtgaaattcatgttacatacttcttgtgtttcaaaaggggccttatatgtgtatagcaaaaggaaaaaaaacaaactttttcttgcttactggactgaactgtgtaccccactgttgtgctgcacgtgctttatcaaacatattacatgtacaggctgtatatatctattttcttc

SEQ ID NO: 22468 - DNA, 1533 bp, Oryza sativa
  ref <308>: DATABASE ACCESSION NUMBER: AK072647
  ref <309>: DATABASE ENTRY DATE: 2001-12-06
ggcggagtcctctccaaacttcgcggggaaaaaaattcggagccgccgagcggcggcggcgcggcggggatggagtaccgcgacaagctggtgctcgcgcccatggttcgcgtgggtaccctgccgtttaggctactggctgctgaatatggtgctgatatcacttacggagaagaaataatagatcataagtttttgaagtgtgaacgtgttacaaatgaatctcttggtactactgattttttggagagagggactgatactgtagtattccgtacttgcccacaagaaagggatagggttgtattccaaatgggaacatctgatgctgtgagggcactgaaagctgctcagcttgtgtgtaacgatgttgctgctatagatatcaacatgggttgtcccaaatctttctctcttagtggtggaatgggagccgcattactctccaaacctgagcttattcatgatattttgaccacattgcggaggaacttggacactaccgtgacatgtaaaatccgtcttctgaacacacgccaggacactgtggagttggctcgccgagttgagaagattggtgttccagcccttgctgtccatggaagaaaggtcaaagacagaccaagagatcctgctaagtgggatgagattgcagatgttgtgtctgcactgtcaattccagttatagctaatggagatgtatttgaatatgaggattttaaaagaattaaagatgctacaggtgccgcttctgtaatggttgccagaggtgccatgtggaatgcctcaattttttgtcccaaaggaaaaacaccttgggaggatgtcaaaagagagtacgtgagaaagagtattttgtgggacaatgatttgaagagcacaaaacaaaccataaaagaaatgataatgcactattcttgccttgaattccctgaaggaaaaggtgtgaacaggtgtgatacaatagctgatttagcgaaactatatggggaagagtactacaatttcgttctttcaaataggaattgaacaccttgattttttctaacatccatgttacacagcccctgcctggaatccataccagttttatgaattggtttggaaggatctaccatattacgaaacaaatactttgcagttttgactgaacttgtactttgtgatctataatgaccaagttattgttatcgttgggtctggagcgccctacatttttgggaagttgttatgacagatgttgttgatgataatattctgtttggttgttggacatcacctatgggtggggcttcagtctcgatctctcaggttcttaaatcggggttctggaagcaccaagtgtccaagtctgcatcaccgttgacatcagaaattaaagccgattcacacgggtaattcttttgggttagcttattatatcaccatatctaagacaattgctgcagtagacaaattatggcgtggttgtcatcttgtacacttccagaaattcagtttcttgcaataagtaaggttattaaaggtcaaatg

SEQ ID NO: 22469 - DNA, 1760 bp, Oryza sativa
  ref <308>: DATABASE ACCESSION NUMBER: AK072648
  ref <309>: DATABASE ENTRY DATE: 2001-12-06
gcctctcccatctcaccccgccgccgccgccgccgcagcctcctcaaggctgctcccatcctctccttcgagttagcttcctccttattcaaccatgggtaaggagaagacgcacatcaacattgtggtcattggccacgtcgactccggcaagtcgaccaccacgggccatctgatctacaagcttggaggtatcgacaagcgtgtgattgagaggttcgagaaggaagccgctgagatgaacaagaggtccttcaagtacgcgtgggtgcttgacaagctcaaggccgagcgtgagagaggtatcaccatcgatatcgccctgtggaagttcgagaccaccaagtactactgcacggtcatcgatgcccctggtcaccgtgacttcatcaagaacatgatcacgggtacctcccaggctgactgtgccgtgctcatcattgactccaccactggtggttttgaggctggtatctccaaggatggccagacccgtgagcacgctcttcttgctttcactcttggagtgaagcagatgatctgctgctgcaacaagatggatgccaccactcccaagtactccaaggcccgttacgatgaaatcgtgaaggaagtctcatcctacctgaagaaggtcggctacaaccctgacaagattcccttcgttcccatctctgggtttgagggtgacaacatgattgagaggtccaccaaccttgactggtacaagggccccaccttgcttgaggctcttgaccagatcaacgagcccaagaggccatcagacaagcccctgcgtcttccccttcaggacgtgtacaagatcggtggtattggcaccgtgcctgtgggtcgtgttgagactggagtcctcaagcctggtatggtggtgacctttggtcccagcggcctgaccactgaggtcaagtcggttgagatgcaccacgaggctctccaggaggctcttcctggtgacaacgtcgggttcaacgtgaagaacgttgcggtgaaggatctgaagcgtgggtacgtggcctccaactccaaggatgaccctgccaaggaggctgccagcttcacctcccaggtgatcatcatgaaccaccctggccagatcggcaacggctacgccccagtgctggactgccacacctcccacattgccgtcaagtttgctgagctggtgaccaagatcgacagacgatctggtaaggagctggagaaggagcccaagttcctcaagaacggtgatgctggtatggttaagatgattcccaccaagcccatggttgtggagaccttctctgagtaccctcctcttggtcgttttgccgtgcgggacatgaggcaaacggtggctgttggcgtcatcaagaacgtggagaagaaggacccaaccggtgccaaggtgaccaaggctgccgccaagaagaaatgagcctcgttcaagtggtgctttccatatctgcatttgagatatctagctcttttagtactcgttaagttttgtcgacggtcatttcagttgttgcattgaccgttaatatctgctcgctttgtgcactatgtcagtcatttaaaactctattttctgttcggtttaaacttggatgttaagacttattattgcccttcgactgttgtggaatgcgagtatacattgctaattcctttgtctttattttcgcttgtgctattcgctgtttctgctgctattggatactggatcgtcttcctgttaatgaaaagtgaactttttg

SEQ ID NO: 22470 - DNA, 2244 bp, Oryza sativa
  ref <308>: DATABASE ACCESSION NUMBER: AK072649
  ref <309>: DATABASE ENTRY DATE: 2001-12-06
ggagttcgccgagccgagcccgagcactcgccgccgcttcaaccgccgctccccgcaacgacgccccccccaccagcgaagccatagacaagttggtctcatgaattcaggaagcacattggcatccagagtttcctgttcatcgggaaacaacggcatcttcccaccctgccttctcccaggattcctgggattcccagttgtgtttgtaaacttccacttgttcaaggccattgttcgcagccctgcatcttctgttgtgttgggaatctgtggagggcgccttccatagagaggtgccccataagtcttttgtttagttagtctgggaactggcatagctggaatttgtggtgcaaaacatccttggcatcagtagtctacactgctgaatctcaagttcctgaagatggtttcctctgaaataagctctgttacaacaacccatgcacaaggtcccaagctctttagagggaagatacttctgccaatgggccctccagatgttgtgccttctgagaacgttgagttcgatttttctgatgtttttggtcctacggcagtccagactcccacagatctgagcatcctcactccagacagtcctgcacctttgactgagtccagtgaggggatttacaatgaccctttggttattgtcaagagatctcattctcttgttggtccaagttcacttgttagccaatctttgccacttagtaagcttacactgcatgaatctgatagcgcattggaccttctggagtgtactaaagaaaagaaaagcaaccaagaagctctgagtgatgaagagcttgatgatacaaaaaatgagaatggtgttgttggacttgacgactttgaagtcttgaagcttgttggccaaggggcatttggcaaggtctttcaagtgagaaagaaaggtacttcagaaatatacgcaatgaaagttatgaggaaggacaagattttggagaagaaccatgctgagtacatgaaagcagagagagatatactgactaaagttgatcatccttttgttgtacagctgaggtactcctttcagacaaaataccgactttaccttgtgttggacttcataaatgggggccatcttttcttccagctctaccaacagggtttgtttagggaggagcttgcacgcatctacactgctgaaatcgtgtctgctgtagcccatctccatgccaatggaattatgcacagagatctgaagcctgagaacatcttgttggatgctgatggacatgccatgctgactgattttggcctggcaaaggaatttgatgaaaacactagatcaaactcaatgtgtggtactgttgagtacatggctccagaaattgttcagggccgtggtcatgataaggctgctgactggtggagtgtgggaatccttttgtttgaaatgcttacaggaaagcctccgtttgttggcggaaacagggacaaagttcagcagaagattgttaaggagaaaattaagcttccggcatatttatctagcgaagttcattctctgctaaaaggcttactgcacaaagaagctggcaggaggctgggctgtggaccaggcgggagcaatgaaataaagaatcacaagtggttcaagtcagtaaactggaagaagctagactcccgacagattcagccaagcttccgcccaaatgttgctggcaaaacctgcatcgccaactttgacgagtgctggaccagcatgcccgtgctcgactctccagtggccagccctgtcgctgcagatagcaacttcgtgggattcagctatgtgaggccagcgcccttccttcagaggccgagtcctctaggctgaagacctccagttgagaccgaaatacatcttgccactgggtatgaagctgacaaaatttactgtttcgatgattattatgtaaaactacctatttatgttgttcggtttgtctgggaaaaccccagtatcttttcttcgttgaagatactagtaaaagatgaacgtggtacttgttgaaaccagacaaatttgtctattgccagatggaacagttgccctggcttctatgatcaacccctgccccctgggccctgggcccctggcacatttaggttttctcggccgttcacgtacatgtttccaaatccaaatcctgctgcatgttgcaacacaaatcctgttgagatgcaaatttaaagcataccgtttatgcatgttgaaatgtaaattcg

SEQ ID NO: 22471 - DNA, 1463 bp, Oryza sativa
  ref <308>: DATABASE ACCESSION NUMBER: AK072650
  ref <309>: DATABASE ENTRY DATE: 2001-12-06
gggcttcttcctctccacatgggttgctctcacgtcactatgcgagctctcctctcccgcatccacccgcccggccccggatcgatctccaccacttccttcctccagtgcccctcctccaccgccgcatccgcctccaaaaccctagccccgaccctcaccttccgccgcttcgccgccatggccgccgccgccgcggaggagttcgtgaagggccgcgtcacccccaacggcgtcgccgtcatcaccctcgaccgccccaaggccctcaacgccatgaacctcgaaatggaccttcgatacaaggcatttcttgatgaatgggaaacaaatccaagtgtcaagtgtgttcttgtggaaagcagttcaccccgtgccttctcagctgggatggatattaagggtgttgcagcagaaattcaaaaggacaagagcacaccacttgtgcaaaaggtcttcacagcagagtactctttgatttgtaagattcatgagtatacaaaaccttatatatgcctgatggatggtgtgacaatgggatttggaattggattatcagggcatggccgctaccgcattattactgagaggacgctcctggctatgccagaaaatggtattggcttgttcccggacgttggctttgcttacattggtgccaaagctccaggaggtggtgctgttggatcttaccttgggatgacagggaaaaggatatcatcacctgctgatgcccttttctttggtcttggaactcattatgtaccttcagcgaacctgggacctctcagggaatccctcttgagtgctaacttcacagatgatcctcacagagatgttgagtcattgctgacaaagttcaagaacgagccagagtcagggccccagctagataagtttttaccatatatcatttcttcctttggtcctgacaaatcagttgctgaatctgtggaagagcttaagaagtgtagtcaaagtgatgatgctgcagtggcagaatgggccaacgaggccttggcaggactcaaaaaaggggctccattttctctatgtttaactcaaaaacatttttctcaagttgcatcagcatataggaataatgaacactatctatcgaagttggctggtgttatgaaagttgaatatcgaattgccttgaggtcatcggttcgaaatgattttgttgaaggtgtacgtgctgtcttagttgacaaggaccagaatccaaagtggaagccagcaactctggaagacgtggacaagggtgaggtggaatcagtttttgaaccattagctgctgaggctgagttaaatgtatgatcttcacagcaaacatgtaatattattggtaccggaataccctcttcaatttccctgttatgttgcaataagaaataacaaggataaaaatgatgattattgagccaataaataatatcatgattacagtatttgtgact

SEQ ID NO: 22472 - DNA, 1758 bp, Oryza sativa
  ref <308>: DATABASE ACCESSION NUMBER: AK072651
  ref <309>: DATABASE ENTRY DATE: 2001-12-06
ggtggtggtagcggcacgcttctcgctacgctatagaaaccgcctctcgagtagtcgagtctcgaagcacaaattcccctcgagccgagacgcctccttgctcccctctaaaccctccccctcgcgcggattcgcttccccgtgtctcccagaggggagttggtggtgttcctggagcttcttgggggtggtttttccaagctgcggcgggctcgccggagttggatccggcggaagagaggatttctgggaagggtgccgcgaagctgctcgacggcaggctcgtggtggccttgaggaaatcgcttcaatttcgaacgggctgttcagttggctggacgattcatttcaagagcagaagtgtttacaccaagccgtagcagaagagggaatccttgatttgtcgtgggaataaagaggtgctcacctttgagttggacaatgcatcccagggctcgaatccacgcagacccggctccggagttcgaccaattcgactgcctgccggatccagttgtcctcctgattctgaacaagctggaggacgtgcgttcgcttggccgctgcgctgccgtgtcgaagcggttcagcggacttgttcctctggtttccgatgtgtatgtcaagattgaccgtgtcgtggccacagatggtgatgctgatgatgctctcaacctgtcttcggcgaagccaaagaacatcttctcccatttctttaagcttatgctattcacaatcgtcaagccattccacagtatgcgcaacctgaatggcacgggcaggccgttgttcccgcttgcgcagcattcaccggtacatgtgcttaggaatttctctgatgtctggaatctccgggtggagcttccctcgggagatgttgggaccgaggagggtgttctgcttaagtggagggctgagtatggtagcacacttcggaattgtgtgattctgggaggtaccctggtcgatcgcaagcctataggcgcagagcatgagtcgtcggtagaggataatggaagcatgccagaatctttctataccaatggcgggcttaaacttcgtgtcgtgtggactatcagctctttgattgctgcatcaacaagacactatcttctccggtcaattatcaaggaccatccgacgttgaggagcttggttttagcagatgccgatgggcaagggacattgtacatggggatggagcagcttagagagtttagagaaaacaaactgtcagcctcagcatgttccaatagaactcaggtcccagcctgcaacatgaagctgaaatatgccccataccttgagctacctggtggcatgacattgcaaggtgccaccctggttgtgatcaaaccctccaatgatggaggcagtggtggtcacagcagtcggaaggaaactgaagcttttgtttcaagtgcattcgatgaacctttcagatttgctgtgaaggcgctgatgaagagacgaacatatctactggagatgaacggtttctagatagtctacttgagttgcagtggattgtctttctatcaactgcttcaaatatatcatttttgtttttttctctcaagcagagcaacttcaatcctgtttagaatgatgaaatgtccaccgcaatgcaaccccattttctgttgtttgctctttgtatagcaatactactagcatcctaaatttccatttgagtttcgaatttccaaattaccaatttccaatcaatgtttctatagttcctattatttcatttcc

SEQ ID NO: 22473 - DNA, 1747 bp, Oryza sativa
  ref <308>: DATABASE ACCESSION NUMBER: AK072652
  ref <309>: DATABASE ENTRY DATE: 2001-12-06
ggcaatctgtagatgctcttttgaatcaaaagtctttgcttctgctagtggattgtcaaattgattcttgcatccaaagaaattctcatctgctgttgtcttccttagtacagatatatcactgaatgcttttatagcatcttgtccagatgcacgcatcaaaggaaaggcattgacagaatgagtaacacgtggttctgaaatatcatcatctgaactattgttaagggcatcatcagaatcatgctcgttaccactatcttgtccattctctgcaagatctgtctcctcacctacatatgtgtcttcagcaatattggcatcacctatagttgtcgttgtttcgtattccatgttaccttggttggtttgtggagacaacggcaatgctgttgaatgcaggtcatgggttaaagtggatacgacatgtcctgcagaatgaatggtatctggctccaaagaaacacctgagccatccctttccgaatgacccggctccaaagaaacacctgagccatcccttaccgaatgcctgcttgattcaaccaagggcatactattaacttgacttaatcttgcttccgcagatgtgcaattgacataaagctcaacaacttgcccacacgtcttctcgaatatcatctttcatcccctgtcttcataaataggaatgagttgaaaatattgtggtccaggatttccgatatcaaaccgagcttggatactcattgcacaatgatcctcagtgtacccaagggcttgaaaaatttcatttctgacttcttcaaaggttgtagcctcaagtgccggaaaagttatttttggaggaatgttatattccacacccttatctccatgttgtattctaccatcgatatatactagaacaataattatttttctctcagccatctgtgcaaaacaaactcaataatttaacaaatcaagttaaataattagtagttagataataatctgtacatatatctcctaatttaatttaacaaagcaagttatataactactagttaaataataatctattcatatatccttcagatttttttaaaaaaatgttgatttgcttattaaaaatatcaacgaatagcttataatttaagaacatgcactaccgatccaactacacaaacatgtcaatatatataaagtacgtatgaacacaatgtatacagcaggcagcagctgatcaatgctaattagctaaacgtatgcatgggcacctgttgcctagctcccacagaaagacgtacatatgcagatcaatgtgaaagacataatgcatgcatgtcttgcagttcacctattgccggccggcgagcagccaacgaacttgccgctgaagacgccgtggctggattgatggcgctgagtaatgaacaaatccaaggcgccggcgtcgacaacgacagtacggcgtggtttgcagggtgaagcgtacggatcgaaggcgaacaggcgcatacgacgatgccggcgatccctaaccctagctaggtcgaacaacttttgtttcgatacttctcttagcgtatcggtagcgtcttgagggtctggctgcaccaggaagatggacgctgtttgaaagagcttccagatctggacgctgtttgtaagagcatccatgtctccatcgtattttggttaatcttctcaaagaattactaattatttaatttaaatattattaattattataaataaaaaattcggccaatttgatgtcgtt

SEQ ID NO: 22474 - DNA, 1016 bp, Oryza sativa
  ref <308>: DATABASE ACCESSION NUMBER: AK072653
  ref <309>: DATABASE ENTRY DATE: 2001-12-06
ggccctttctgttgggcgggttcggctggatcttttgttcccccttttcctttcttctccggcagcggcggcggcgatgggggacggccgcgtcggaggtggaacgaatcggccggcatggctgcagcaatacgaactagtgggcaagattggcgaggggacctacggcctcgtcttcctcgctcgcctcaaacaatcgcatccccacgctgccgctggcgttggccgccgtggctctcccatcgccatcaagaagttcaagcagtccaaggagggcgacggtgtctcgcccaccgccatcagagagatcatgcttctgcgtgagatcaaccacgagaatgttgtcaagctcgtcaatgttcacatcaaccacgccgacatgtccctctacctcgccttcgattacgccgagcacgatctctatgagattatcaggcatcacagagagagaggatcgatccatcacttgcagcatttgcgatttctctctcagcttaattcgcatcaagtcaaccatgtcttcggcgacggcgacggcgtccggtgggctgcatgccgccggcggcgagtggctcggcgagctctccgccgcgctgcaggggaagtggcaggccatggtgagcacagaccagcggcggcggcggcagaagggagatgaggcagacgagaagaagggggtcgccggcgccggcgccgccctcggcgtggagacgaggaggaggaaagaggagggagacgtcggcgcgtgcggcggcgccatgtccgacaccaccgtcttcctcctcctcgaccacttcgcgcccagctgatcgtccgtgacgtcacccatggcgcgcccccgagctaatcgtgacgtcatagacgcgtttgtaaagagaagagtagtagacgatgacgcgtatccccgggaggaaatggcaagccacgctgtatatatttgacttgtcgctgctgctactacttgcttcagttcactctcatgtgtaaataaaaaataagaatgcagtatttttcct

SEQ ID NO: 22475 - DNA, 1419 bp, Oryza sativa
  ref <308>: DATABASE ACCESSION NUMBER: AK072654
  ref <309>: DATABASE ENTRY DATE: 2001-12-06
gatgttcctgctctccgggatttgtcctggcaagtgccacaacagcgcaatcagcaaaagaaacctcatcatcagtgtgctgctcggattctacctgggagtaaacccaagtcaccttctctgtcacaggagaggtattaactgaccggagagagagagagagacgatgtcgtcggaggttgagaggaagacggtgtgcgtcaccggcggcaacgggtacgttgcttcattgctcgtcaagatgctcctggagaaaggatacgctgttcagacaagcgtcagagatcccaataacccggagaaggtctcccatttcaaggacatggaaaaactcggccccctgaaggtctttcgcgccaacttggaggatgaaggcagcttcgacgaggccgtcgccggctgccactacgccttcctcgtcgccgctccggtgtacgacaagagccacaagtccgacgatctcgagaaagagatagtccaaggcggcgtcgagggcacactgaacgtgatgaggtcgtgcgcgagagccggcacggtgaagcgcgtgatcctgacgtcgtcgacggccgccgtctccagcctgcggccgctggaaggcgccggccatgtcctcgacgagtcgtcctggtccgacatcgagtacctcagatccatggagaagctgtcgccgacgcaggcgtactcgatctccaaggttctttcggagaaggaggcgaccaagttcgcggaggagaacggtctcagcctggtgaccctctgcccggtcgtcgccgtcggagcatcgccggcggtgagggtcgataccagcgtcccggcctgcctctcgttgataaccggcgacgaggagatgatgaacatcctcaagggcatcgagaaggcgtccgggtggtcgatgccgatggtccacatcgaggacgtgtgccgcgccgagatcttcgtcgccgaggaggagtcggcgtcggggaggtacatctgcggcagcctcaacaccacggtcaccgagatcgccggcttcctggcggccaagtacccccagtacaacgtcagatgcgattgcatcgaagagcatcaccccgagaagccgaccatctcgctctcgtcggcgaagctcatcggcgaagggttcgagttcaagtacaagaacctggacgagatgtacgacgacctcgtcgcgtacggcaaggccctggggttgatccccaactgatggtgatgatgggcggcgtaattccactgctttggcgattacgaccaaacgtgtgttgctttcaaaaatactattgtgtctagcattctattgctacattgctagtagtactagtaccaagttccaatacatttggcggtttggctgtacttcgttctgttcatgtaagaggaggattgagaatttgagatcctcttagggggtaagctgtc

SEQ ID NO: 22476 - DNA, 2707 bp, Oryza sativa
  ref <308>: DATABASE ACCESSION NUMBER: AK072655
  ref <309>: DATABASE ENTRY DATE: 2001-12-06
gctgccgcccacaccgccaccgcctccccccaacccgccgcttccgtctccgatggccgcagcgccgccgccgccaccgcctccgcagctgcagtcctcggatccctccactccgcctcaggagaccagccaggtacgcaagggaaagaagagtcgtggcgcgaagaaacctaggagagccgccgctgccgccgccgcctcgacctcctcggccggcacgatggtcgaggaccccttcctcgtactcgccggaggcaaggaaggagggttcctggagcttgaggagatcgacgaggcggacttcggaatctttggcggtgccgtggaggatctaggagaaattgacaggaaggcaggaaaggatcagaagaagaagaagaggaagaagcggaagcgaggtgacgatgactatgctttacctggtgatggtgatttggtagttggatgtgaggaggagggagagaagggtgagaagagggtgaaaaagaagaggaggagcaggaagaagagaaaggtgaaggaaatggaggaaaaaatggagagcaaggaagatgtctccgatgacaatgtggaagatatgcaagatggcgatgacatggaacaagataaccatgatgggctgattttgggagaggatgaagtctatgcatggcgagagcttaaactgcaccctcttcttattacaccggtgcgcaggcttggattcaaagaacccacaccaatacaaaaggcttgctttcctgcagccgctcatcaaggcaaggatgttattggtgcagcagagacaggttctggtaaaacacttgctttgggcctccctatcttgcagcgccttcttgaagaaccagagaaggccatgagattgtctcgggaggatgagagtacacaagatgaaaattctagagaaagtccacttcgtgctcttattttaacacccaccagggagcttgccaagcaggtctgcgatcatctaaaagaagcagccaagtttttaagaatccaagttgttcccattgttggtggtctatccatggaaaagcaagaacggcttctgaaaaggaaacctgagattgtggttggaaccccaggaagattgtgggagcttatgtccacaggcaacccacacctaattaagttacattcattatcattcttcgtgttggacgaggctgatagaatgatagagcgaggccatttccatgaactgccatctatcattgagatgttaccagtgactaacggttctgatgaaccaactgttgggaccacgccaagtggcgaaactgtgcctatattggaaataaagaagagacagacatttgtattctcagcaacacttgctctctcagctaattttcggaaaaagttgaagcgaggcctagttactgcaaaagcgtctgcatctactgatttgagttctattgaagcactttcgaagcaggcccgtatgaaacctaacgcagaaatagttgatctgacgaaggcttctatcttacctgagaaacttgaagagtcttttattgagtgtagtgatgatgataagtatgcctacctgtattatatattgagtgtccatggacaaggccgcacaataatattttgtacatcaatagctgcattacgtcacctttcatctatattacgagttcttggaattaatgtcctgacaaatcatgctcaaatgcaacaaagggctcgcatgaaggctgtggatcgtttccgtgaaagtgaaaattcaattttggttgcaactgatggttttgcaaggggcatggattttgatgatgtccgaactgtgattcattatcaattgccacactcaactgatgtttacatccacagaagtggaaggacagcgcggaaatcaatggcaggttgcagcattgcattaatctctcctgcagacaaggccaagttttactcactttgcaagtcactgtcaaaggagaacctccagcagtttcctgttgaccatgcttacatgcctgcagtaatgaataggctcacccttgctcggcagattgacaagattacacgtaaaaattcccaggaaaatgccaacaaatcatggcttcagaggaatgctgagtccatgggattattattggagacaagtgacagtgaggaggaacgtgtacaggggcataagcaaaggaaagcaacttctgcgaacctccagaagcttcaacaggatttgagtgagctcttgcaacgccccttgcagcctaagacttcttcgcggcgctatttagctggggctggtgtttcaccgttacttcaaaagcaactggaagagttgtccaaaaggaatgttaagggcagtgctagtgtaaatgcaaataaaggatcccgatttgttgttattggtcaggatcaaatagaacccttgcaagctcttcagaattctgggcaagaggtgtgtgtgagcattgacaagcaaagagaaaagcgaaggcttgctgaaaattggaggcgaaagaagcaaaaagagaagaaaagtacacgagagcaaaagagaaaggagaagaggatagctaaagaaagggactaaatgacaacgttgtccaactactcatcattgtaggcactacattgttactgttgggaaacaagttttgggggtgttggatatcatttttgcaattgaagatagggttataatcaactgtaccagcatcatatctgagcatcaactgtggcatgcatg

SEQ ID NO: 22477 - DNA, 2284 bp, Oryza sativa
  ref <308>: DATABASE ACCESSION NUMBER: AK072656
  ref <309>: DATABASE ENTRY DATE: 2001-12-06
ggaggaggaggaggaggaggaggaggaggagcggtgggattggaggagaggagcgacgcggcggaggactcgctggtgtcggtgctcgccgtgtacgacggcttctgcaacctcaagcagattaatttggagctcaaggtctgtggaggatcatctatccggaaaactctggtgaaagaagcggcttcctacggcgctgcgcatctcatccttggtgttgcgaagaattctctatcttttagtagatcctcctccatttctgttgccaagtactgtgcaaagagggttcctactggatgctcggttcttgcagtgaacaacggcaagattctttttcataaagatgcagtacagcaagaaccataccatagtgctagcacaatgacagagacaccaaggaggagttaccggaagctcctgacttctgtgattggggagaaacttcgggatgagtgtgaacaagataacaggtccattttccgggctgtcaccatgccaccaagctctccggcaccaacgagagaagtttcattggcattagtcccaatgaaggttcaccgtcgtgaatcaccagaagtggcaactggctggtccttccttaggaagaagttcctgcctgacagaaaacctgcctcgcatgacagatcgaagatgtccgtggtgcagtgggcaatgcggctacctagtaggtattcgtcagcttcaccagtctgttcagagtacagaaccacaacaccagatggcatcacaagtgctagtcgtattttgcgtgaccgggtggctgtcccttcgagaagcaattcaggaaagtcttctgtggtgatcgaggaattggataattcctcggataaagaaattccagaggagttgattgcactcagagaaaaattcccttccgtttattctaccttcagtcacagcgagcttgcaaagatcacttctgatttctcacctgagtgtatagttggacaaggtggcactagccaagtttacaaaggttgcttagaaaatggcaaggaattggcagtaaagatcttgaagtattccgatgaagtgctgaaggagttcgtctcagagattgagattgtcagctccctcagccacaagaacattatatcgcttgccggtttctgcttcaaggacactgaccttctgttggtgtacgagtacttgcgaagaggcagtctggaagagatactgcatggtgagaaaggatgtgacaacttattcggatggaccgagaggttcaatgtggcccttggagttgctcatgcactagattatctccatggtagtggcaacaatcgtccagtgatccatagggatgtcaagtcatcaaacatcctcatctcacaggattttgagccaaagttatcagattttggcctcgcgctctgggacactgatgcaacatcgcagatcacatgcaacgatgttgctggaactttcggatacttggctccagaatatttcatgcatggcaaggtgaatgacaaaattgatgtatacgcttttggtgtcgtccttcttgaactcatttcaggcaagaaaccgctttgcactggttgtccgaaaggtcaggagagcctagtgatgtgggcaaactccatcatacagggaggaaaactcacacaacttgtggatcctaacttgcctacagaggaccatgccaacaaagtggagaggatgacccttgctgcttccctctgcatcagaccaacacctcaacgccgtcctcacattgcagttgttctgaagctacttaacggcgacaatggtattctgaagtgggctagatcagaagtaggattgtcatacgagagcgatggtgatgaacctgtggttacactgccagagaataaccgcaacatccagtcctacatcaatcttgcattcgatgtcgatgacgattctgcctctgtcagcagcaacgatttcatcgctgcgaacacttccctggaagagtatttacgaggaagatggagccgatcgtcgagctttgattgatcagtccatggtatactagtcatttttgtatagtaggtatagatcttttttccccttcttcttaagttaacttcttttgttccttggatgagaagtggcacatgcaaaatgccctcctccaagtctgtcctttaatctgatgtcttagatcttgttctcccataagttatgggtctgttctatcatctcagaaggatgtaatttccttgttataaaccaaaattctctcatccaaaggatgagaaagtgggaaataaactaggaagattgttattgc

SEQ ID NO: 22478 - DNA, 1732 bp, Oryza sativa
  ref <308>: DATABASE ACCESSION NUMBER: AK072657
  ref <309>: DATABASE ENTRY DATE: 2001-12-06
ggctttgcctgcctcgcttcgctcgcatcacgtggctccgcctcctcgtctccctccccccgcacgcatcaccatcctcctcctcctcctccctcccgcgaccaccccgtgaggtgtatacgctacatttacaattgattgatctggcttgtccacccctcacatgagctcacaagtctccacatcacggggtttgccctccccaagcaagcttgggacatttgagtcccctcacacatggcaaatgtcaggtcctacaggccaggctgaagctggtagcagcgatgaccaggatatcaggctgttgtctgtttcttggaatcaggactttggttgcttcgctgctggaaccagcaatggcttcaggatctttaattgtgacccttttaaggagactttcaggagggatctgaagagtggtggatttgggattgttgaaatgctgttccgttgcaacatccttgctcttgtaggtggtggctccaacgcacattatccaccgaacaaggtaatgatctgggatgatcaccggagccattgtattggagagtttgccttccgctctgatgtccgggctgtaaaattggggaaggactacattgtcattgttcttgagcgcaagatatacgtttataacttcacagatttgaagttgctccatcagattgagacccagtccaatccaaaaggattgtgctgcctctctcatcattccaacacttcagtgttggcctgccctggggtgcatcaagggcatgtccgggttgagcattttgggttgaaggtgacaaggatgatttcagctcatgattctcacatttcttgcatggcattgacaatggatggcctcctgctggcaacagcaagcatgaagggtactttgataagaatattcaacacaatggatggtactcgcctgcaagaggtgcgcagagggcttgacaaagcagacatatacagcattgcgctatcacccaatgtgcagtggttggcagtgtccagtgacaaaggaactgttcatattttcagtttaagagtgagagttgcaggggaagatgctagtaatgaacagcgcagctcttgaaggtccacggatggatcaccagaactcttctagttctatagatcctcttattcaaacgaacactggatccaatgctagctcatcattgtcattcatgaaagggattctgccgaagtatttcagttcagagtggtcatttgctcagttccatttaccagaagtcacacgttacatagtagcgtttggtgctcaaaacactgtcatgatggttggcctggatggcagcttctacaggtgcagctttgaccaggttaatggcgggcagatgctgcagaaggaatatttccggtttatcaaggctgacctcacccccctgaggacctcggccccctgaactgcgtgacgaaatcatatcaccttgataacttgtatatataaaggttgtgctcagtccattgtatataaatgccgtcctctcgccggcaaagttctaggtagccggaataaggagagctgggtgttcgatcgcaacctacttccaccctcattctgaagcatttgtccccccgtcgaaattgcagctagttgattttagttttctttcctttcgatgaacacaacttttcactgatatatatatatgacataaaagctcaagaatgaaatacaaatctgagcttatattgtagttctacttctgcaaggccg

SEQ ID NO: 22479 - DNA, 1603 bp, Oryza sativa
  ref <308>: DATABASE ACCESSION NUMBER: AK099292
  ref <309>: DATABASE ENTRY DATE: 2002-08-28
ggtgcctccgctgctagaaccttctagaagctctcctcctcctcccatggcggcgacgatcgtgtccgtcaaggcgcgccagatcttcgacagcaggggcaaccccaccgtcgaggtcgatgtgtgctgctcagatggaacctttgcaagggctgcagttcccagtggtgcatcaactggtgtctatgaagctctcgaattgagggacggtggatctgattacttgggaaagggtgtttccaaggctgtcgacaatgtgaactcggttattgccccagctctgattggcaaggaccctacgtcacaggctgagcttgataacttcatggttcagcagcttgatggaaccaaaaatgagtgggggtggtgcaagcagaagcttggtgctaatgcaatcctggctgtgtcactggccatttgcaaagctggagctatcatcaagaagattcctctgtaccagcacattgccaaccttgctggaaacaagcaactggttttgcccgtacctgcattcaacgtcattaacggtggatcacatgctggaaacaagcttgccatgcaggagttcatgatccttcctactggggccgcttcattcaaggaggccatgaagatgggtgttgaagtgtaccacaacctgaagtctgttatcaagaagaagtatggtcaggatgccaccaatgttggtgatgaaggtggttttgctcctaacattcaggaaaacaaggagggtcttgagctcttgaagactgcaattgaaaaggctggatacactggcaaggttgtcattggaatggatgttgctgcttcggaattctacaatgacaaggacaaaacctatgaccttaacttcaaggaggagaacaatgatggttcacaaaagatatctggtgatagcctgaagaatgtatacaagtcatttgtcagtgaataccccattgtctcgattgaggatccgtttgaccaggatgactgggaacactatgctaagatgaccgctgaaattggagagcaagtgcagattgtcggtgatgacctccttgtcaccaacccaacaagggtggcaaaggcaatccaggagaagtcatgcaatgctcttctgctgaaggttaaccaaattggatctgtcactgagagtattgaggccgtgaagatgtcaaagcgtgctggctggggtgtgatgaccagccacaggagtggtgagactgaggataccttcattgctgatttggctgttggtttggccacgggtcagatcaagactggagcaccctgccgatcagagcgccttgccaaatacaaccagcttcttaggattgaggaggagcttggtgcggctgctgtctacgctggtgccaagttccgcgcacccgtggagccctactaaacttgatggtgaagacaggatgctcatttctatccgtaattgacttcccggtcgaactctagttaaaaagctcgtagaatcgagaaataaatcctccactgtatgagcggatatgtaccccccaacttgctccaattttggtgatgtgtagttctgagcttgcgtgttctctgaacctgttggatctttaatacagagagtatggcttttgttatt

SEQ ID NO: 22480 - DNA, 1134 bp, Oryza sativa
  ref <308>: DATABASE ACCESSION NUMBER: AK072658
  ref <309>: DATABASE ENTRY DATE: 2001-12-06
ggatctcttcgctgcgaagccatcttcttctcggtctccacgcgctttcacctccgtattttactcgcgcccttctctctctcctcgacctcattcgcctcgcctcgcgtctcgtctcgttcgcccctcgccaccacgcaacacgccatgggcgcggccgacgacgccaaccaccgccacgaggaggccagccccctcctgccaccgggcggcggcggcggcggcggcaagaagctccaccagtctccgcctccatcgcctccggaggcagccaagtgctgcgccgatggagtccccgtcgttatgggcgagccgctcggggcacccgcaccgccgcgggagagctggaactcgggggtgctctcctgcctcggccgcaacgacgagttctgcagcagcgacgtcgaagtgtgtcttcttggaagcatagcaccatgtgtgctgtatggtagtaatgttgagaggtttgcagccagaccaggaacttttgcaaacagctgcttgccttacactggcctctatatgcttgggaatgctctcttcgggtggaactgcatagccccatggttctctcatcacactcgtacagctattcgtcgacgatacaatcttgagggtagctttgaggctttcactaagcaatgtgggtgctgccatggccttgttgaggatgaggggaaccgtgagcacctggaggttgcctgcgaccttgcaactcactacttctgtcacccttgtgcgctctgccaggagggacgcgagctgcggcgcagggtcccccatcctggcttcaacgggcgatctgtcttggtcatgacgccaccaaaggagcagactatgggtcgtggcatgtgaaccgtgccaaacatctgctctgctctatttgcacttgagctattatgtgatgaatgttctctactgccttggtgaaactctgtatgttcgtcggtaaatatgagtcttgtgtgatatgggatcatgatggacaatggaaactccagcctgtttctctgaattgtgttgatcgtcttcggtctttctgttccgtatggaccgcttgtgtattctgtcattctgaataacattgtaatactgtatcacgtttgtgttggcaatccacttttaaacttatcg

SEQ ID NO: 22481 - DNA, 1031 bp, Oryza sativa
  ref <308>: DATABASE ACCESSION NUMBER: AK072659
  ref <309>: DATABASE ENTRY DATE: 2001-12-06
cttagcatgtttagtcgtagttggttccagcctgaagatgcttctgatctaagacagagaatacgagaactgctgttggaagaatttgaaagtgccaggctggatgaagctttgtcggaggctgacacatctgaccgatccgataatgaagaagatgccacaaagagcgcagaatcagaacaagcagcagcagcagcagcccctggcaatggtagttcagaaatgatcgtagagggtggagacactggcataagtaatgaagacatcaagggggtcgcggcatcaaaagaagcaagctctagcatctgcagaagcgctgacaatctcgcgggctgtgttcttttggaagaagctacattgtcggatagcgtgatgaaggatgaagaagacactacaaaagcagatcctgttagctcacaagatgaacaagaagttgcagttttatcccctggtgcatggaaaaacagtgaagagaacacacataaacagccacagccagatatatgttgcgacagctccgacagtgagatggacgatgtgaagatcattgaagatccatatcaaagaactaacaagcaaaattgtcgcatcttttggcatgaagggctcatgcgtcacaccatctgttccatttccaggatgataaacaaaatttggcagatgcttgtgcatgcaaaaattttggagatgcctgttgccacatgccaaatggatgatgtgactacctgatacaacatctcaactgcatgatggttgttgaattgaagaagtaaatgagtgaaggtgggttacacataatctgcctccctctcccttctcttgttctttgcccatggtggtagtttttttttttttttttttttcctttcatttttggcaggaagaccatggtgtagtcacgggaagtgtacagtgtacaggccaagcatatacggagtaggtcagaatgctagttatgtatggacacattgtttatattcctaatatgagatattaagctattgaaatacttccaacatgtttttggagtc

SEQ ID NO: 22482 - DNA, 1617 bp, Oryza sativa
  ref <308>: DATABASE ACCESSION NUMBER: AK072660
  ref <309>: DATABASE ENTRY DATE: 2001-12-06
gccccttcccctcattctcgatagatccagattcggcatcggcaacagccgcccgtgcgccgcctgagccgtctgcgccgcctccgcacatcccacgccgctccctccatcctgagccgcctgcgcactccctccatcctgcttcgccgtcgcccgtccagcgtccagtggccgacgctcgctgcttgccggttcatgcccaggaaccagatggccggtccccaactgcggagctacccacgccgtgatgctcactggtcgctgtcggcctctcgatgagcaacccatgccgagtgtccctgtgcatcacggaggaggaagacgaggtgcagccgtattcatccaaagctgcaacttcgtcaactcatgaagtacctatacagaactctcctgtcaagagttggcaatggtggctgatggtgggagttaacatgttcttcctcattgccggtcagaccgcatctacacttcttgggaggttctactacaatcaaggcggcaatagcaagtggatgtccacattcgtccaaactgctggctttccgattttgttcattgccctatttcttttccattcaaagacatcttctacacaaacagtcactagtagtcctgcccctacaatttctatccccaaaattactctgatatatgttgtcctgggcctcatcattgctgcagacgacttgatgtattcctatggcctactatatcttccggtctcaacatattcgctcatctgtgctagtcagcttgccttcaatgctgtcttctcatatttcctcaatgctcaaaaattcacccctctgattttcaattccgtagtcctccttacgttttctgcttcactccttggagttgatgaagattctcagggaactactagtatatcacatgggaagtacattttgggtttcctgttgacactaggggcatcagctacatactcgctcattctctccctgatgcaagtcacatttgagaaggttattaagagggagaccttctcagttgtgttgaacatgcagatatatacagctctcgtggcaacattggcttctcttgttgggttatttgcaagtggtgaatggatgactttacaaggagagatgcatgcattccagtctgggaagctgtcatatgtaatgacactgctgtggacggctatatcttggcaggtagcatcagttggagtggtgggattgatctttgtggtgtcatcgctgttttcaaatgtgataagcaccctagctctacccatcattcctgtttttgctgtgattttctttcatgacaagatggatggagtaaagattatagctatgctgatggccatttggggatttatgtcatatggccaccaattatatgttgatggcaagaaaggtagaaagactacagtcagtgtagaggaaacttcctaatcatcacaatgttgcctagaatgccgctcttaccaatttaagttgttggttctgagtaaggtactgtagttattaggaacctcatcaaagaaattccatttttgcaccatttggtatataactatacatattgtcttgattactctgatgtaaggatgtatcaagcaagagaataaattttatgtcacccccc

SEQ ID NO: 22483 - DNA, 1213 bp, Oryza sativa
  ref <308>: DATABASE ACCESSION NUMBER: AK072661
  ref <309>: DATABASE ENTRY DATE: 2001-12-06
gggcgcgtcgtcatcaacgattgctagatagccaaagctcttttgttgtttcggtgctcttcggcttcgtcgtcggcgagggagggtttggtttgggaagttgggggggatggatcggtcgatggagacggtggaggaggaggtggaggagtacagctggagggaggtgctgctgccgcggctcgtcccggtggtgtcggacgcggcgccggagctggagcgggagacgggggagcgccgccggggcagggagctcctcgtcgccgtcgacttcgggcccaactccaagcacgccttcgactgggcgctcgtgcacttcgcccgcatggccgacacgctccacctcgtccacgccgtctccagttgagcaccctccccatcaccatccccatccccgtccgttcacctccgaacttacctagccttgtggagcatatatgcatctagtactttaattagcttccggaattttaaatcatatactaggttgatgattaagtaatttattgtaattgctcaagcgaatttagcaacttgatttgtttagtgcacacaacccagtcgtcgtgtatggattaattaatcagaagtatctgcatctcatttgtcatttggctgctaggctcactgcacctttttttttttttcagatttgaatcaccatacaaatatacatagaatgtgatagcagcagccccggcagcgagcctatataattttcagtaggctagttaattgtgatacttgtaaccctttttatcttctatcttaataacattcggattggcctttcttcggtcatcctagcaagatacaatgcagcatcaccgtgttgtgtcattgtttactgttggatgaacctatatagaggcctgacttccaggaggtcaaatttatgatggacttagaagtggacttccgtttgatgatctagttcattagagaagtgaaagcagtacccccagctcaacagcttaatgtcgatcttgtaaccgctttgtaacctccttttcttaataagatttggtcagcctaatccttcggctgacccgttaaaaaaggttaaaacagtactgtagtttgagagactaagggaatagtagcacttgggtattgtaactttctaagtttgaagattgtgggttgttttcctggtgtattatcatagaaccagttctataatcgaggtacatctggtaaattgtttgagacc

SEQ ID NO: 22484 - DNA, 884 bp, Oryza sativa
  ref <308>: DATABASE ACCESSION NUMBER: AK072662
  ref <309>: DATABASE ENTRY DATE: 2001-12-06
gaacctctccctccattcgcattaccgcgcaaaggaggaagaagaagaagaactcactcgcaggagcaccaatggcgaattctgcgtcagggctggcggtgaacgacgagtgcaagttcaagttccaggagctgaagacgaggagggggttcaggttcatcgtgttcaagatcgacgacaaggccatggagatcaaggtggagaggctcgggcagactgccgagggctacgaggacttcgccgccaccctccccgccgacgagtgccgctacgccgtctacgacctcgacttcgtcaccgacgagaactgccagaagagcaagatcttcttcttctcctggtcgcctgacacggcgaggacaaggagcaagatgctgtacgcgagctccaaggacaggttcaggagggagctggacggaatccagtgcgagattcaggccacagaccccagcgagatgagcctcgacatcatcagagccagagctcactgatgatcatatcatttcatcatccaacaccaccagattaattaattcattcccaacgtcgatcgccttattcaaccccagatccatgcatatatatatgcccatgggttaatatatcatcaattatggggtttatgtccgcttaaatttaccctacgtacgttttgatcctcgcaaaaaaaaacacatacatatatatatataccgttttgatcgactatttatacgttgttatacgacattgatgtcgtccaagtattattatcctattatatataattccttcatttcattctatttttcttctgcttatatcttcaacttttcatttttgtaatttgtaagttgtattgatgcaatttgttggcaacaagaatacactttttctattcatgt

SEQ ID NO: 22485 - DNA, 1279 bp, Oryza sativa
  ref <308>: DATABASE ACCESSION NUMBER: AK072663
  ref <309>: DATABASE ENTRY DATE: 2001-12-06
gccaggagcaaccccagtcctggccatggggtgtggccatgtacgccaacttccactaccaccaccactacgagaaggagcacatgtttgagaagcccctgacgcccagtgacgtggggaagctgaaccggctggtgatccccaagcagcacgccgagaggtacttccccctcggcgccggcgacgccgccgacaagggcctgatcctgtcgttcgaggacgaggccggcgcgccgtggcggttcaggtactcctactggacgagcagccagagctacgtgctcaccaagggctggagccgctacgtcaaggagaagcgcctcgacgccggcgacgtcgtgcacttcgagagggtgcgcggctccttcggcgtcggccaccgtctcttcatcggctgcaggcgccgcggcgacgccgccgccgcgcaaacacccgcaccgccgcccgccgtgcgcgtcgccccggctgcacagaacgccggcgagcagcagccgtggagcccaatgtgttacagcacgtcgggcggcggctcataccctaccagcccagccaactcctacgcctaccgccgcgcagcagatcatgatcacggggacatgcaccatgcagacgagtctccgcgcgacacggacagcccaagcttcagtgcaggctcggcgccatcgaggcggctcaggatgttcggcgtcaacctcgactgcgggccagagccggaggcagacaccacggcagcggcaacaatgtacggctacatgcaccagcagagctcctatgctgccatgtctgcagtacccagttactggggcaattcataagaagattgactatgagatctgatctgaggccatgcctgcatgatcataattcataagtcctagcaagcaacagtggaagaactagttgctactgctctgcattcagtgacaggtttaaattgtgacttgtggaaggacaaggaaggaagtgggggggaactcccttgtttcccgggcaaatgcatattccttccatccccatagtgccttttttctaggttattttcttcttcatcttggcttccagaaaccctacttactgtatgggcccctggcagcagacatggatggggaggtttcaggaaacatcaagttgaaaaggagaggggaattgaagagacaggcagagagctgtatgtatgtcagtatgtgtcatctgtctgtatagtgggtccaagaacaaaccctgaagctgatgtattcactcctgcctcctcaggaaacataactttatccccatttcg

SEQ ID NO: 22486 - DNA, 3854 bp, Oryza sativa
  ref <308>: DATABASE ACCESSION NUMBER: AK072664
  ref <309>: DATABASE ENTRY DATE: 2001-12-06
ggtattttggctctctgatctccctctcccggggtcccgccgctcgtccggcgaagccgacagccgcctcgccgtcgcggcctcgccatgagcctcttccccaccggagtcgccgcatctcctcgctgctctctcttccgctggaagcgcaagctccctaatcgtatttttccatggcctattggctctaccattccaccagagtgtagagttggggagcgcgaaagcagtgagatccgtcggcgatgagtgctcaccgcgggtgatgcagtcttcgccgccgccgtcgagatgcgccggaacccggaaggcatcattgcacctttgtccccaatttggatgccactaggaaagaatggattggctgccaccacatcagacaaggaatcaaaacatcgaaaaggaggtgtaaatcaacgtctgagaggaattgtgttcaggataatagcttcagagataagcattcattaaaattccaaccaaaacctgggcagtgattattgtttcaatgaacagtaagtaaattgataattctgtgtgctaaggtgctgtcgtgacattatatgtaaactattcatagcagaattcctgactcaatactccactgttgctttttgtttagaattgcaatacgtgaataatgtatttgtagtttttgtactatcttcaacatctttacaggaaatacaattattgctctctgcttgtgtggctggtcctgggagatgttttactgcttgctgcatatcgaggttgaaatgttttcgtttggggggtgggggggaaaggtcactggtgggaggttgaaatgttctgtagaaagatgtcgtcatgagaatgtcccgtagctaaagggagagcgatgccactgtaaggatgaatagtgagccatgccattgtccctttatttaaacacattacccgttatccaggggaggtagcaactgctagctttcatgtactctatttctgttccccattcatttatcattcgctgccatggcagtttgatctgcatagattagaatttgcttttgtgatatgtttgaaactttccttgtgtttgaacccacgtcagattctcttatcaagatgtgattgaatgtactctttcgaccaatcattgaatgaacttattttacaccttttggtaaatgatactctttgttttttctgcaagggcaaaggctactagtttgccacgtggcccactgatttgagagaattttgtttgtaacttcaaaggagctattgaaatcgctttctttctccaactttttttttgatgtgtacaaagtaagaatcttttcggcctattataatcctcccatcggtgtcaatgattttatcaccgcattatgcttgaactttgaggtgaaaaaaatgatagtatcatttccctatttgattgttcctgcaatgtgtcaccctagaaaatttcttattttaggagttattatgattcatatatttggactcaacatatgttatttgaatataagaggtacttactaactaaaacattatatcagatgaagtaattcatagttttcatttttttattttcccaaaaatgattattcttgttctaagccctgcatgtgtgaattcttatggccttgaaaataaattgtcaactggacggttattggttggtgcctgtgagatattaagttggatgcatcaagtcttgaaagagttcttacgacatatcagaagttgtcgcttgcatgcttctacataattatgtgataccgagagggcactaattttgtcttttcattgaatgagaaactgagtgaactaaaagcaactacaaaggttagatactttcatcttggatctttattaaataaccgagattattaaggttggggttgatgtgggaaagatactttagtaatttgcaatataatttgttaaaaatctagttgaccattagaaaatggtgtgaatgtatttttcatcacaaatccttttgttagttttataatttttagtagaatttagctataaaatttaatgggcggattttataatactgggtcctatgtcaactgaaatactgacaatatttttgtactgtagcctctataaatgatcacttagttatagatgagcaattttgatttctgaacaccaaatatacaaaatagtatcctataaagtatctccagaatctgcagctattcaagtcactgtctaaaatgtggatagatattgcacaccctgggataactcacttgtatacgaactttaaaatatcttcacttatgttggtgaaggaatagtaaccaggctcctgggctatataaatgaacctcatgttctactttctgtaacttaggtgatcggcaacctgtgtattcatttttgggattgactcctactttaaaggcttcacttcgcctcatttttttcctgactgttcaatacttgtgaatggagtacggtaatttgcgacgtcaagcagcttccttgaaaaagagcctcttcgatcaggcttgtgctctgttcatctcaaatttcaagcattatagttgaggcatatctgagactctgcaaatatatccatcagtccttttgctatatcttcttctgctatttatcattcagcaagacatagaatacagtgttttgatggacatcaccttacagtcatgccattttaattgccataccatggattgacactattgcacacagataatgaaaacaaagctaaggagaatcagattgaagcacattatattaatataagtgggttatcgatatttctgtagagttcattccatttcgtacttatccccaccccagttagcaaagaaatgctttaaaatcaacgcctttcaccatttcggaactctcttttctggtctttatcttagtttaacatgtgttaagtgtgctggtttaacaaatcgttttgtattgacagggttacttggatgagcaattttgtcaggttgaggatttgcaggatgaagcaaatccaaattttgcagaggaggttgtttccttgttttttaaggattcaaccagggtaatgttgaattttgagcaagctattgagaagcatccgaaagacttcgccagatgggacacacacatgcagcaattgaaaggcagctgttctagcatgggtgcctccagggtgaagaatgaatgcacttcattcaggaatttctgtggagaagaaaaccccgaaggatctctactactatggttatgcagttgcccgagatccttccagaaagtgaagagggagcatgccgtcctcaggcagaagtgggagtcctacttccagctgttgcgacaagctggtcctgctgggaccgcgactaggcctggcgggcaagtaagctataagcagcccggctattgaattggtctcgggctgctgctgccgtggatgcgactaggctggtacacaagagccgcctgcccttgttttagtatgcccctgcggtgaaaacccgtatatagacgtgctaccacttatgagttgtgacatgcatgtctgcttgtttatgaccaaaataaaaccgatcaagattactacatcatcatgagattgctctctttgcccttattttgtccatgctgttgtccagattgcgatgggtttatatacagctataaccacagatgaaactgtccggctgtgtcggtgaccattgctatgctggagatagtgtgatcggccgacaaaagtttatgaaggtaatcaggactgatagccctgatagtgtgataggtattactgaactaactggaatgacaggggtgtatctgatatctatgtgatggacatgactgagctaactactactaagataagtactcctatatgc

SEQ ID NO: 22487 - DNA, 1283 bp, Oryza sativa
  ref <308>: DATABASE ACCESSION NUMBER: AK072665
  ref <309>: DATABASE ENTRY DATE: 2001-12-06
gctctttacctcttccattgattccctgcagggctccactccccttcttctccctttgtgcgcgccaccaacgggggtggtggtgggaagagaattcggatcgcatcgagctcgagctgcttcgcgaatcgaacatatgatatggctggtgtgatcagcgcccgtgctggtctgagccattccttgtctgttactcagacagttccgaatcgtccgctgcaggcttcacaattggcaacgaggtgtacaagcccatcatttctttctgctaaactttgcaagactcgtcccctggtagtagtagcagctatggaggtctcgaaggaagccccttctgctgactttgccaatcgccagccttccaaaggggttcttgagacatggtgcaatgccgatgcagtgtgttttgatgttgatagcacggtctgcttggatgagggtattgatgaactcgctgatttctgtggggctgggaaggctgttgctgagtggactgcaaaggcaatgacaggaactgttccatttgaggaggcactagctgccaggctatcgttaattaagccatatctgtcccaagttgatgactgtttagtgaagaggcctccaaggatttctcctggaattgctgacttgattaagaagctcaaagcaaataatactgatgtattccttgtgtcaggaggttttcgacaaatgatcaagcctgtggcatctgagcttggcattcctcctgaaaacatcattgcaaaccaacttctttttggaacatctggagagtatgctggatttgatcccactgaacccacttcacgaagtgggggtaaagcactagcagtccaacaaattagacagaaccatggttataagacacttgttatgattggagatggtgcaactgatcttgaggctcggcagcctggaggagcagacttgttcatctgttacgcaggtgtccagatgagagaagcagttgcagcaaaagcagattgggttgtcatcgattttcaagaactaatttcagaattgccataatttagtaccacactgcaatcctaacttttgcattgttgctaatgagtgcatgtaattgtagatgtcattgaagcattacaattttgatgcgtgattatttaattgtatgtattttattttttaattttcatctttcctcaaccttacctcctttttaaatgatcctgaggctcctaaacttgattcctatgcactgaatattgtgaataaattgtctcataagcaattgcttgagactgccagagttaagc

SEQ ID NO: 22488 - DNA, 1289 bp, Oryza sativa
  ref <308>: DATABASE ACCESSION NUMBER: AK072666
  ref <309>: DATABASE ENTRY DATE: 2001-12-06
gccatgccttacttttttttctgtaggtttctcctcacattcttaactatggtcgggtagataaagttacgaaatctttgaaatttcctctgtctagaccatgcaaagcaggggagcaatgttttctcagttatgggaagcatccaggatctcatcttatcactttctatggttttctaccaagagacaacccttatgatgttatacctttagatcttgatacatctgtggatgaagaagacagttcatctccgtccgtaactacaagccaaaccagtcatatggtacgtgggacatggctgtccagattaagaggacctccgacgtatgggctgcctcatcgcttggtatcccatctccatgccattctaggttgtaatcagaacgaatccgctccagaggctgataacaaggaaaatgacaggatggtgctcgaaacactcctctccatatttactcccatgcttgaaggattaggcgaaccagatgacttcgaccgggagaacgcatgttgggacgtcaatctcgcactggactacaaagatctacaaagaaggatagttttgtccattgttacttcgtgtacctcaggcttggccatgcttgattcctagtccgaactctttagtgcttcatcattggatgtgcaagaccacaattggagtttgttgggagtgactcaagctgacatgtggatggtggagctgttgcacatgggttacctgcaactgactgcaaatctgttctttcctggatagggatccaaggaccagtatggcatttgaccaccagtcccaagtgaagatgctcagctcacagcatcaggtgtctgatccgatgattacgcgaaatccagtcatcgatctgtgccctctgtggcttgagatttaagtaagttgcccctggttgttactgcaaacctgctgcttttggtggaagaaagctacttctgaactaatttattggggatggagtaatgtctcttcgacccataacgccgacatttcagcttattatttataagatcatattgctgatcatggaactgcacatggaatttctgctaaattagttttctcccatgtggtccatatgctagaataactgaacactgcataaaaggatgctccttgagttgtgtgctgaacctgctagtttttttcccttttcttttccttgagttgtgtactgaacctgctagttttttatttttcttttttttccttgagttatgaactgtgcctgttacttcctctatttcatattataagtcactttgggtttgcgcc

SEQ ID NO: 22489 - DNA, 2450 bp, Oryza sativa
  ref <308>: DATABASE ACCESSION NUMBER: AK072667
  ref <309>: DATABASE ENTRY DATE: 2001-12-06
gggtcaaatccttcgtagggcaggcttcctttattgcactcctgctcccgcgaaagcctcgcctcgccttttctccctaccaagccaccacgccacccaaaccgcgatttctgatcgatcgatcgttagctcgatccaagaacccatcttttctttgatccccaatcctcttttgccgaggattaattgggagaagatgacgatgatggggtgtgccgtgctgctcgtggtggtggcgtccatggcgggggaggcggcggggaggttcgtggtggagaagaacagcctgcgggtgacgtcgccggcggggctccggggcgtctacgagtgcgccatcggcaacttcgggatgccgcagtacgggggcaccatgcacggggtcgtcgtctaccccaaggccaacaagaaggcctgcaggtccttcgacgacttcgacctctccttcaagcccaagcccggcggcctccccatcttcctcctcgtcgatcgcggagactgctacttcacaacaaagggatggaatgctcaaaccgctggagctgcagctgttcttgttgccgatgatagattggagcctttgataacaatggactctccagagtctagtggcacagattacatagagaaaattactgttccttcagcacttgtaacgaagaagtttggggacgaccttaagaaagcactggaaaacggtgatatggtcaatgtccttctggattggagggaatctctccctcatcctgatgagcgtgtagagtatgaattctggacaaacagcaacgatgaatgtggtgccaaatgtgacatgcaaatgaattttgtgaggaacttcagaggaacagcacaggttcttgagaaaaggggttacactcagttcacccctcactacattacatggtattgtccggaagcttttgtcctgagcaagcagtgcagatctcagtgtatcaatcatgggagatactgcgctccagatccagagcaggatttcaacattggatatgatggaaaagatgttgtgcttcagaacctgattcagatttgcttgttcaaggttggcaatgaaactcacaaaccatgggtgtggtgggattatgtacacgatttttcaattaggtgcccaatgaaggagaagaaatacacgcgtgaatgcgctaatggtgttatcaagtcacttggattggaccttgagaggatcaacaagtgtgtgggagaccctgaagctgatgaagaaaatcccgtgcttaaagcggaacaagatgctcaaattggtcaaggctctcgaggagatgtcactatattgccgacccttgtcgttaacaacaagcagtacagaggtaagctggagaaaagtgctgtgttaaaagcagtatgctcaggatttgaggagacaactgaacctgatgtttgtttgagtcaagagatccaaacaaatgaatgtttggagagcaatggagggtgctggcaggacaagactaataattttactgcgtgcaaggacaccttccgtgggcgagtttgtgaatgccctattgcccgtggtgtgaagttcgttggtgacgggtacactcactgtgaagcttctggtgtcggtaggtgccaaatcaacaacggaggctgctggaaggaaactaaaaatgggaagacggtttctgcctgctcaaatgaagaatctaaaggctgcaaatgcccaccaggtttcaagggtgatggtataaaaagttgtgaagatattgatgaatgcaaagacaagcttttctgccagtgcaaggactgctcttgtgagaatacatggggaagctatgagtgcagctgtggtggaagtaatatgttatacatgagagagcatgacacttgcatcagcaaagttgcttcttcgtcagtgggctggggcttcctttgggttattttctttggcctcgctttggctggaattggagcatatgccgtatacaaatatcggctacggagttacatggattcagagattcgtgcgatcatggctcagtacatgcccctggagaatcaagaaacaccgaatcaacatcgtcctgtggagcatgctgatatctgaaattgcagcaagcttaactgggagctggcagcagtatcggtggtcgccatcttgacagagtggtaggcttggagctaccctttgtgcccagaagataaaaaaaaattcagtatagcttatgtttctgaaacgacaagatttttgcatatcctctttttctctttgctgaaacttgcaggacagattaggatctccccagaattaacacctcattggcctctagtcataattatgagcttctggtcttgttcttactctactcctacatgtttttttgtttttcagcgagatactcctatatgttaaaagcttgtaaatactgttgttcagacaatagtccttaataaagagaccggaagagcattctacacct

SEQ ID NO: 22490 - DNA, 3380 bp, Oryza sativa
  ref <308>: DATABASE ACCESSION NUMBER: AK072668
  ref <309>: DATABASE ENTRY DATE: 2001-12-06
ggctccgcctagcccaaaagctgcgcagcaccctgaacggcaccacaccacggaacccctcaatttccacgacgcttcctaatcctccctcctcatcaaagccgtcacctcgctcgcgtcggcggcctcgactcccctcccccaaatcggttcccctccaaaaaaaccaaaccctcaaaaccctcgcctccgctctctcgcgcacactcgtgctccctcctccccccatccatggcttcctcccccgcctccgccgcctccgaggaggaggccgtcaaggcggcgaaggtgctgatggtcggcgccggaggcataggatgcgagctgctcaagacgctcgcgctctccggattccgcgatattcacatcattgacttggacacaattgaggtgagcaatctgaacaggcagtttttatttcggcagagtcatgttggacagtcaaaagcccatgttgctcgtgatgctgttctgaaatttaggccaaatatcaatataacatcatatcatgcaaatgtaaaggacgctcaatttaatgttgagttcttcaagcaatttaatgtagtcctgaatggccttgataatttggacgctaggcgtcatgttaatcgcctttgccttgctgctgaagttcctttggtggaaagtgggacaactgggtttttgggacaggtgagttaagaaagtaccactgctctggtccccgtaactcttctgcatgtatgaacggatatataatacactctggcttatcttcttcgtaatctgtatggttaataagatttaccagacatacggccttctagttgagtatgttttgtgcacttaccattgttcactgtgatcatgtgggtccagagggaaagtgtggttgttacttaatcaggccgttttagtgcaaattatctaatgttgatcatagaacaggttttctaccttctccacaaagttcctaaaataatatggtcatttagacattatccagccttatttacaatctaactctttatacagctcaaatcaactcctggtggtagcttggccaatatttggtgcatgttcatataagctgcacaccttttaggtagttacgtacattgcatacagacattacatacttttgaagtgcacatgaatacatgatgtatatcatttgttggcctgtgatgcatgggactctggtaggcaaagctgaagagttcttttgtgtaccttgatgtattgtgtttattatcttgtgcatgatgggttttttgtggtctagaatctagattctgggcttaacaatagtgtcatttaaatcatcttctttatttttttatcacgtatatgtcaacaactaactgaaagaagctaccagtgttcactaaattaactaatggatgaatcgacctcggtcaaattattctgtttattattatattaggccgcaggtggtagaatccctgtctcacgagcaaaacagccaagtaagctaagtctatattttcaagttaattctcttctaaaattatttccattccatatttggcaggttactgttcatgtcaaaggtaaaacagaatgttatgaatgtcaaccaaagcctgtccctaagtcataccctgtctgcacaattacaagcactccatctaagtttgttcactgcattgtttgggcaaaggagttgctttttgcaaaaatgtttggggataaaaaccaggacaatgatcttaatgtccgttcaaatgaaagcggcacttcgaaatcagatgtatttgaaagaaatgcagatgaagatcttgatcaatatgctaggagaatttatgatcatgtctttggttacaacatcgaagtggccttagaaaatgaggaaacttggaagaatcgaagaaggccgaatccaatatacatccgtgatacattacctgaagaagctattcggcaaaatggtagttcacgggacatcaataatgagcaggaagaaccatctgctatggtctctttgggtcttaggaacccacaagaaatttggagccttgctgataattcaagggtatttttggaggcattaaaactattttttgaaaaaagggagaaggttgtattttattcagatctaggttatgtaacctttaaagttacttccatctgagatattttgctcttctggttttcaggaaatagggaatttagtatttgacaaggatgatcagttggctgttgagtttgttactactgcagctaatatcagagcctcctcttttggaatacctctgcatagcctttttgaagctaaaggtgttgctggaaacatagttcatgctgtggcaacaacaaatgctataatagctggtttgattgttattgaagcaataaaagtcctccatggtgattaaaaaaaatatagaatgacatatggtcttgaaacacccttcaaggaagatgctttggatgcctatcgagccatttgagcctaataaatcatgttatgtctgctcagagacccctcttcttctggagggttaacacaaagacaacaaagctgagggaggtcatcgagaagattataaaaagcaaacttgggatgaacctcccattggtaatgattggctccactcttgtttttgaggatggtgagggcttagaggaagatgaggctgcaaattatgctctaaaccttgaaaaggtcttggctgaacttccagctccagttgttaatgacacaaagcttactgttgaggattttcagcaggaattgtcatgcagcattaacattaaacacagggacgagtttgatgaagaaaaagagcctgatggaatggttctatctggatggtctgctccagtggagaagcaagttacgagtaatgggggaaaccagtcggttgcttcttcatctggtgcagattatgctgacggtattgttgaggacatatccactaaacctggaatgaagcgcaagctggatgaggttttagagttgaaggagaattgcgatgcatccagtagtgctcaagttgtcgaagatgacgatgacgacgatcttgttatgcttgatgagaacccaaagttagccaagaaaaagagattgcaatagcaacccctacggtatctgttccagggataacagcggttgacttccgctattatggctaacacattgttccaacgtaacatcttttgtaacttaatgatgtttagggctgataacactgaggtatcagtaagcgtactcagggtcatttttttgctttagatacggtactttaggaatgtaatttgtagcgtttaggcacaggagtgactaatgccctgctgacagtcagctgtaaggctgcacctgtgtttgtctagactggagcaatggtgatgttcttgtctactttctcgtttctgct

SEQ ID NO: 22491 - DNA, 1257 bp, Oryza sativa
  ref <308>: DATABASE ACCESSION NUMBER: AK072669
  ref <309>: DATABASE ENTRY DATE: 2001-12-06
gagtagcagagcaccgcacgtcgtcgccgcgtcgcgcgacggagtggagaggagaccatggcggcggcggcggcggtaaggcaccggacggtggaggcgaacgggatctcgatgcacgtcgcggaggcggggccgggcagcggcactgctcccgcggtgctgttcgtgcacgggttcccggagctgtggtactcgtggcgccaccagatggggcacctggccgcgcgcggataccgctgcgtcgcgcccgacctccgcggctacggcggcaccaccgcgccgccggagcacacctcctacaccatcttccacctcgtcggggacctcgtcgccctcctcgacgccctcgagctcccccaggtgttcgtggtggggcatgactggggcgccatcgtgtcgtggaacctgtgcctgctgcggcctgaccgggtgcgcgcgcttgtcaacctcagcgtcgcgttcatgccgaggcgccccgccgagaagcccctcgactacttccgcggcgcgtatggcgatgattactatgtctgccgattccaggaacctggagttgaaaaagaattggccagtcttgacttgaagagattcttcaaattggccttgattgttcaaacaacaggatcttctgctatgtccattaaaaaaatgcgggcaaacaacagggaagtaacattgcctccttggctctctgaggaagatatcagttatgtagcaagtgtgtatgcaaaaactggcttcgctggtggtattaattactaccgatgttttgacctgaattgggagctgatggcaccatggacaggtgcaaaagttctagtgccaacaaagtttattgtcggggatggtgacctggcttaccatctcccaggagtcaaaagctacatacacaagggtaggttgaagaaagatgttcctatgcttgaggaagtagtggtaatcaaaggtgctgggcacttcatccggcaggagagagcacaggaaatcagtgatcacatctataactacatcaagaagttcaatacgggtgtttcttctccaaaatcatcgaggttgtgagataatttactgctgtaaagaataatttcaagagaataaaggatgtaatgctttaggctgatggtgtggttcttttgtcatgctgtgtttggctaatgctgcagagcttttgtaatgccaagtttggctatcttggcaaacaatgaaatttcaagggtctgaatgaatttaaaagagcttctaggatgcctataaact

SEQ ID NO: 22492 - DNA, 3015 bp, Oryza sativa
  ref <308>: DATABASE ACCESSION NUMBER: AK072670
  ref <309>: DATABASE ENTRY DATE: 2001-12-06
gcgacggtagagtcagacgaccaccagcaaaaccagagaaaagaggatcatggtgtccgcttggaccatcgtccccggcatcatcgtttcgctgatcgtgcttgtggtcaccaagctgtgggatccaatcgcccaggtctacgggtacccgttcgatgcggaaaggcgcgtgcagaaactcgtcgatgagttctccaagctgcaagatcagttgggcgagctggggattttggatcccaaaccctcgtccgcagtgctctcgggttggctgcagcgggcggctggatgcaaggacaaggtggaggagataaagcgccgacatgaatctgtgaagagcgtgggggtccagggcctcctaccccggatcaacgtggtccggcacctctgcgccatcggcagggatgcagatctggagctagaagaagtcaaggatctcatcgccaaaggagagggccacttgaaggagggcgggtgctgctccccatccgattccgattccgattcctctactacctccaccggcggcagaattcgacaacggccagcttgcccagtcaatcctcgacacggcagcggccggcacatggggagttgggatccaggcaatgaaacctcacctgaccagcgtcctagattttgtccgggaagacggcggcggagctcctggcgtgctaggagtatggggcatgggcggcgccggcaaaaccacgcttctcaagctcgcgcgcgatccacgagtacaaaccttggaccatattgttctcgctgaggctggcaagtgctgcgatatcgccaagcttcaggacagcattgcacagggcacgagcctggtgttgcctccttcgctcagtgtcaccaaccgtgctaccgtcctgtgcaaccatcttcgcaacaagaaattcttgctgctgctggatgacctgtggaactacattgatttggaggctgtcggcatcccgttgccccttggacgggggaatcaacgtaaggttgtattgacatcacgaagcgaggccgtatgtgtcagcatggcacgccaaggagttaccatcagaatggggtgcctagatcaacaagatgcgttcaagctcttcgaggataaagttgggagtgctaccatcaatgctgatactaggattccagagcttgccaggcaggtagccgaaatgtgcggtggtctgccattagtgctgtgcgtcatcggtcgatccatgtgcacgaagaagaattataagctgtgggtggatgcagtcaacaggttggagaagtcaaaggtccataataacctagttggagacgatgatatattcaacatcctaaggtacagcttcgatggactacatgacgacgaagcacggggttgttttctggcgtgcaccctgttccctccattttacattgagaagaagcgactcatccggtggtgtatggggcttggtttcttggatcccgccaacggttttgaaggaggagagtctgtcatcgattccctgcagggagcatcgctcctggagagcgctggaagctattctgttgatatgcacgacatcatccgcgacatggcgctgtggattgtaaggggccctggaggtgagaagtggagcgtgctgaatcgagcatgggtgcaggatgcaaccatacgcaaaatgaacaacgggtattggactcgggaagaatggcctcccaaggatacatggcctgagcttgagatgcttgcgatggaaagcaatcgctcctaccttgatccgtggaaggtttcgtccatcggccagatgacaaacatcagctttctggaactggtgtctttagatacatttccaatggagatctgtgagctgcataagctcgaatacctctgcatcaaagcagggagtatgtctaggctgccaattgaactcgggaaactgtcgaaactcaagcaattgcatctgcggcagtcttgcagtcttggcgagataccgacaggattgatctcgcagctcgtaaacctgcaggtgctggaccttttctgcagcagcatcgattatccctaccgtccaaaatctgctgctggtggcctttacaattttctgggtgaactggccgaagctagagcatcggagaagttgaagattcttgggatttgcctggatgcgacgcgtgataatagggcatttctgaagcagttgatgcagaagcaagtgcgaataaggtcgctctgcttaagcttcatcaatccaatctcgcctggacatgatcaaccccagccggccaccagcagatacatgatcgccgaactgcaaccgttctccaatgatctgggagaactagccatttctagttccgacatcttgcaggagcttgtggccacgtctgatggaaaggagctgatccaaaacctggaacatctctgcttggaaaatctcaatgtactggagagagtaatatggctgaacgcggcgagaaaccttcgaagggttgacatcaagaaatgtgcaaaattgacgcacgccacatgggtattgcagcttgggtacctcgaggaactcggcattcatgattgcccacagtttaaacggttgatcgaccataaggagcttgcggagaatccaccagatcatgtgatcttccctcggcttacatatctcgatctcagtgatctgccagaattgtctgatatatgtgtgctgccttgtgaatttaagtcgtcgctggcgcttcttgttgagaactgcgacaagctgatgaacatatcgttccactacccacccggtcatgaccagaaaaatattagggttttctgcgacaatgaatggttcaatagactcgagtgcaagccaaatatcatgaagtcctacctatcgcaaaacatgagattttctgctatttgaagattgttttatctgtacagctgaaaatttgttatttctctcgtggtgtgatctggcagcaagatgcccacgagcattctatactatacgtacgataccagggtaacaaactattaggactcgagagcattcttttgtttgttgc

SEQ ID NO: 22493 - DNA, 964 bp, Oryza sativa
  ref <308>: DATABASE ACCESSION NUMBER: AK072671
  ref <309>: DATABASE ENTRY DATE: 2001-12-06
gggggaaaccatagctccagcaatcggcggcggcggcgacgcgggagaggcggtccggcgacgatggtccacgtcagcttctaccgcaactatggtaagacattcaagaagccacgtcgcccttacgagaaggagcgtcttgatgcagagctgaagctagtgggtgagtatggactgaggtgcaagcgtgagctgtggcgtgttcagtatgctttgagccgtatccgtaacaatgcaaggcacctgctcacacttgatgagaagaatccacgccgcatcttcgagggtgaggcactgcttcgccgcatgaaccgttatgggctccttgctgatgggcagaacaagcttgattatgtccttgccctcactgttgagaacttcctcgcaaggcgtcttcagactcttgtcttcaaggctggcatggccaagtccatccaccatgctcgtgtcctgatcaggcaacgccacatcagggtcggcaggcaaattgtcaacatcccgtcgttcatggtgagggttgagtctgagaaacacattgacttctcactgacaagcccattcggtggaggcccccctggtagggtgaagaggaagaaccagaagaaggcaagcggcggtggcggtgatggtgaggaggaagatgaggaatgagaagaagtttgcaactagttgtttccgtaatgatcataaaactttctgtgctgagtaactgggcccaaattctgtagcttgcctatctgggtttcagaattcaagcaggttggccttcagatgttggtttatgttagctctttttggcaccatgttaggtagctcgaattaaagatatgcctggagatgtttaattttggtgttttatatgtttttgcattcggcattgtggtcaatgctgttttatggattcgtttcatggtaatcctcactcgtaccagtgtgcttgaactagtttatactcactcgtacc

SEQ ID NO: 22494 - DNA, 1161 bp, Oryza sativa
  ref <308>: DATABASE ACCESSION NUMBER: AK072672
  ref <309>: DATABASE ENTRY DATE: 2001-12-06
ggtgttcttgttcttctctggtgatcatcatcatcatcaagtcctattaaacatctggagaatggctgaagaaaagaagaccccatgcctgaatgagcggatcctgtcgtcgctctcgaagcgatccgtggctgcgcattcctggcatgatcttgagattggacctggagctcctcaggttttcaatgttgttgttgagatcacaaaggggagcaaagtgaagtatgagcttgacaagaagactggaatgatcaaggttgacagggtgctatactcatcggtggtgtacccgcacaactacggtttcataccgcgaacgctgtgcgaagatggggatccaatggatgtgctggtcctgatgcaggaaccagtgattcctggctgctaccttagagccaaggccattggcctcatgcctatgattgatcagggtgagaaagatgataagatcatcgcggtttgcgttgatgatcccgagttccgccacttcaatgatctcaaggagctctctcctcaccgacttgctgaaatccgccgcttctttgaagactacaagaagaatgaaaacaaagaggtcgccgtaaacgatttcctgccaccggcaactgctcaggaggccatcaagtactccatggatctttatgctgaatatatcctgcacagcctgaggcgctaattaattatcatcgtcagatggagcaatcagaccctgatctcatgaagaaaataacaataaaagtctcttgggtgatgctctttttgagcagccatttttgcattatatttgaaacaagggataatattatgtttctgcatttgtgcagaatatatgcaaatcaataatgttactgttattgcttgcacgcaaatatgttggtccaactagcttcaggccgaatcatcgatgcatgaccggtgataaatggtgtaattttggactacaggtgataaatattgtatgatgccctgtgtaatatatgtgattgtatttggtttctaattggcgactgctaattgtatgacgtcaattttccagaatggaatagtagtatacctgttggtttctatgaaggcagtaatgttttgggcatttaattgtggtaaaaaaaaagggctccgtaaagataatgtcaaaaagaaaaaataattgagctaatttgg

SEQ ID NO: 22495 - DNA, 1126 bp, Oryza sativa
  ref <308>: DATABASE ACCESSION NUMBER: AK099293
  ref <309>: DATABASE ENTRY DATE: 2002-08-28
gtgccgcctcgtcatcgacttcatcgctggaagcctgggactgccttacctcagtgcgtacctcaactcgataggaagtaacttcacacaaggtgctaactttgcaacggccgggtcgtcaatcagaaggcagaacacatctttgttcctctctggtttcagccccatttccttggacgtgcagtcctgggagtttgaacagttcatcaacagaagccagttcgtctataacaacaaaggtggaatctacagggagctcctacccaaggctgaatacttctctcaggcgctctacacattcgatatcggccagaatgacattaccacaggcttcttcataaacatgacctctgaacaagtcatagcttacatccctgatctaatggaaaggctcacgaacataatccagaatgtgtacggtctcggaggaaggtacttctggattcacaacacggggccgatcggctgcctgccttacgccatggtgcaccgccccgacctcgccgtcgtcaaggacgggtccggctgctccgtcgcctacaacgaggtcgcccagctcttcaaccagaggctgaaggaaaccgtgggccacctccggaagacccacgccgacgccgcgttcacctacgtcgacgtctactccgccaagtacaagctgatcagcgacgccaagaagctcgggatggatgacccgatgctgacgtgctgcggctacggcggcgggaggtacaacttcgacgacagggtcgggtgcggcgggaaggtgaaggtgaacgggacgtgggtggtggcggggaagtcgtgcgacgacccgctgaagcgggtgagctgggacggcgtgcacttcaccgaggcggcgaacaagttcgtgttcgaccagatcgccggcggcaagctctccgacccgccggtgcctctcaggcaggcctgccagatcagcagagggcagtgaatcgtcgccgccggtgcgggtgcatcgagccgtcgtcaggttggctgtgccgtactgccatttctgctgctgctgctgcctctggctttgtaagtgtgcaatattgcagaggcatatggttgatataaagtacatatactgcttcctttgtgcaataaagggagaatgagattc

SEQ ID NO: 22496 - DNA, 1654 bp, Oryza sativa
  ref <308>: DATABASE ACCESSION NUMBER: AK072673
  ref <309>: DATABASE ENTRY DATE: 2001-12-06
ttgaggtaagagacgcttccaaccctaatccccccaacaccatcaacggatccacccactggttgtccgcctgcttctccccgccccaatccaccttaggaatagcgcctggctggatcccaggccgtttgcttgtttgcgtccggagattggagcgccgattgggatgaaaccgatcggcccttaatgtttatttttccccatcactcgattgtatttgttgcctccgagagattctgtgctgttactgaatccaattttcgtgtgatttttggcaggggattctgagatatggccttcttgcggaaggttgggaacctcgtcaggcagtccgcaggctcgggctcgccgctgttccaggcggtccgatgcatgtcctcctcgaagctcttcatcggaggaatctcttatggtactgatgaccagagtctgaaggaagcgtttgctaactacggtgaagtcattgaagctagggtgattgtggaccgtaccactggacggtcgaggggatttggttttgtaacctacacatccacggatgaggctgcagctgccattactggcatggacgggaaggatctgcagggccggattgtgcgggtgagttatgctcatgaccgtggtagccgtgctggtggctatggtggtggaggctacagtggacagggtacgtatggtggtggcggtggctatggaggtggaggctatggtggacaggatgcatatggtggtcgtggtgttggaggctatagtgagggtggccgtgggtatgttggtggtggatacggtgacggtaacaattacggtgggtataacacaagtggtggatataattctgaaggtgggcgtggtggctatagtgtttttgaaggtggacatggctacggtagtggcggtactggttacacaggaggcagcggcggatataattcggcccctggaaattacagcagtgacaacttcaatcaagggggtgcagcacctggtgcatatgaaggtgcaaactacggtggaggcaacaactacatgaacaatgcaaccagtgatgattccaccggtaagctggacgagttgttaaatgatcttaaagttgatggtgatggcaaagaggatggtgagggcaaagcggatggcgctggcctggttaatgaggatctggaaggagatgatggtcaagatgaattgcttcagaatgatttcaaagatgaagatgtgtctgatgactatgccaacaaaagacgttaaagttcgctcgaccatgaagtccagtccggtaacttttcatgtgttgccgatggaggtgctctccacaatcgcgaaatccaaagttaagacaacgtcctgtatgcaaataagtttcgtgttgtagccatatatgctggaccatcgggactctttcgatatgcggtcattcaaaacctggattagtatggattcactgcactacaatcgcatcctctgtggataatccattgttgctcggctgctctctttggatacaatctactgatagacactccctccgaagtccgaccgtgttattctttttttgggttaattggatccatgccattataaatttttgagttttgaagtataccattacaattcatctatttgcaatgataccattgcaattttacagctatttgtg

SEQ ID NO: 22497 - DNA, 1177 bp, Oryza sativa
  ref <308>: DATABASE ACCESSION NUMBER: AK072674
  ref <309>: DATABASE ENTRY DATE: 2001-12-06
cagggcaaccacccaagaaaaagaaaaacagaggagtcgaagaaaaaggatagcttcagtaaagcctagcaaagcgcccatcagaaaccctagcaggagcgccgccgccgccgccgccgcccgccgtcgtcatcctccctctcgccctttcaggtccccagcccgccgcgccgcggatcgagtcgccgtgtgaagaaggccagcgtcaccatggcggacgaggagcaggtggagaggaaggaggaggtctccgaggtgaaaagcctgcccttctcgttttttttttctttttttcatttgccctgcacatcggattcagttcggtttttcggcggggaagggaagaaacggcgtagcgatgggctgggtgcggtgccgtgctgtgctgtctgtgtttggtgtatgcgtgatctggtagggtgttttgggcgtgaatccgcgaccatgggcctcttcaggatgtttgatctgtgtgcttggattgaatcagtgaaatctgtaagagcggattaagcttctgagatgagtgggcttcaaaaataataaaaaaaaacatctgagatgagtgataggccagattaagcaatgatttgttttgttcatctttttgtagtagcttgtgaggactgaaccagttagcagtgaacacctatggtgatatttgatggtgtttggacttgtgtctgaatatactgtcagtgctagcctggtcattatcagtgttataatggccctgtcaggatatatgcaccacaatgtgggatttttctgttgattgaacggatgtagagctgtagcctgtaaggagatcaacaaattagattcatcatttgtgttttgagcatggcggtcacatgttatgcctaaggattatcatgtgcaacaaagggttaacatcacaatttgataaaaagcaagtgaaatgttactccgtggtggatttcagcattttatttgtttgtaatcagcctttcacaattatttcttgtcagccttctatatcatttttccttgtaccagcggcttgttgacaatgtttgtgatgttttgtagcttactccttttgacccaaccaagaaaaagaagaagaagaaggttgtgatccaagatccatctgatgaggtggataagttggcagagaaaactgagagcttgacaggtatacttttaatgctgc

SEQ ID NO: 22498 - DNA, 801 bp, Oryza sativa
  ref <308>: DATABASE ACCESSION NUMBER: AK072675
  ref <309>: DATABASE ENTRY DATE: 2001-12-06
gtaagggaatctctcctcttctcttctcttctcgcgccgccgccgtgtccagtgcccaagatgtggggcagcgccgacggcggcacgccggaggtcaccctggagacatccatgggcgccttcaccatcgagatgtactacaagcacgcgcccaagacctgcaggaacttcctcgagctctcgcgccgcggctactacgacaacgtcatcttccatcgcatcatcaaggatttcatcgtgcaaggtggggatcctactggcaccggaagaggcggcgaatccatctacggagcaaagttcgaggatgagattaggccagaactgaagcacaccggcgctggaattctgtcgatggccaacgctggtccaaatacaaatggaagccagttctttattactcttgcgccttgtcagtcacttgatggaaagcatacaatttttgggagagtatcaaaaggaatggaaattgtcaagcgccttggaagtgtccagacagacaaaagtgataggcccatccatgaagtgaaaatcctgcggactgtggtcgaagattgaggcacagcgggtctactcggtgtcactcatgacttctggtatttggagttgtagctgctgtcagtttcaggaattgtttcctgcttgttccgtgcttatgcagtggtgtatcgtttcggatgggctagtttagttattaacaactcatgaatcgtgatccgtcttaattattctcacctgaacgagtagtgttcagtgattatcagtggaaataactttcgaaatatatgaagtcattttgagcgc

SEQ ID NO: 22499 - DNA, 1563 bp, Oryza sativa
  ref <308>: DATABASE ACCESSION NUMBER: AK072676
  ref <309>: DATABASE ENTRY DATE: 2001-12-06
gacctcctccacctccaacccccgatcccccgcaaaccctagccctctcccccaccctcctcgccggcggcgagcggcggcggcgcgcggcgggacccggagcccccagtagcgcctcctccgtcctcccctccctgaggtgcgggggagaggatgccgtcgtcgcacggggatctggaccggcagatcgcgcagctgcgggagtgcaagcacctggcggagggggaggtgagggcgctgtgcgagcaggcgaaggccatcctcatggaggagtggaacgtgcagccggtgcggtgccccgtcacggtctgcggcgacatccacggccagttctacgacctcatcgagctcttccgcatcggcggcgaggcgcccgacaccaactacctcttcatgggcgactacgtcgaccgtggctactactcagtggagactgtttcgttgttggtggctttgaaagtacgctacagagatcgaattacaatattgagaggaaatcatgagagcagacaaatcactcaagtgtacggcttctacgatgaatgcttgagaaagtatggaaatgcaaatgtatggaaatactttacagacttgtttgattatttgcctctcacagctcttatagaaaaccaggtgttctgccttcacggtggtctctctccatcattggatactttagataacatccgtgctcttgatcgtatacaagaggttcctcatgaaggacccatgtgtgatcttttgtggtctgacccagatgacagatgcgggtggggaatttcaccgagaggagcaggttatacatttgggcaagatatcgctcaacagtttaaccatacaaatggtctatctctcatctcaagggcacatcaacttgtaatggaaggatttaattggtgtcaggacaagaatgttgtgacggtcttcagtgcaccaaactactgttatcgctgtggtaacatggctgcaattcttgagattggcgaaaacatggatcagaacttcctccaatttgatccagctcctcggcaaattgaaccagacacaacacgcaagactcccgactactttttgtaatttgtggtgttgacaattttaactcacctgtgttgatgctcctctcctccgcggtgtcggggtctgtagatcttctgtccttagatacgggttccacgagcccggctgtatgtctctcaattcttttgtttggagattttgttgctgcttctcaacctttatacaagacgttaaaagttacatgcactggatttttttctccttatgtacttccattttgtattattggtagacagtgaagggaagctgcattaggatcgcccctattaatatttttttcggtcttcacagggatgcaatgcctgatgtgctcacagcatgaccgaataaattatctccagatgggaagatagttctcgtcttcgggctttcagcaatgatcccccatcagatttgctttgtttgtaatttgggtcagcgtgttgtaatgagttgtatgtttcatgttcatagctggcaaggatccttttagctgggtgccctact

SEQ ID NO: 22500 - DNA, 1549 bp, Oryza sativa
  ref <308>: DATABASE ACCESSION NUMBER: AK072677
  ref <309>: DATABASE ENTRY DATE: 2001-12-06
gggccggagcgtcgtctcgtccccctccccccgcccagatcgcccgaccggccgttgccctccgctcccccactgccccgctcccagctctgatccagcaggcggcggcggcggcggcggaggagaggcagcagcaatggcgacgtccaagaaggatcctccgagcagggacagggctgccaggatgtcgccgaacctcaagcgatcgtcaggcattgaggcctcctctgccgccggctatggcccgcggagggcccggtcggtcccgagctcgccggaccgcaagtttggcgcggcggcggcggcaccagcggccgcctccggctccccggacgtttacaggccgtcgctgtctgccgctggccggtccacctcggcacggtctgtgtccggcagcagcagaacccagccattcccaaagcccactctcgccagagtgaagtctgaaagggccaccaccgccgccgcagcctcgccacggcctccagcgctggcaccgccagcgagcaattcgctcaaggacatggccaggacagcaccatcagcgtcttcgaaagcgccatccaccttgcagaagagcaaactgtctccaaggcctagccctgacaaggcggtggcatctctgaagccgatcacccagagatcgccggcttcagtgactgcaagaggtggaaggactacagtagtgtcgtcatcacgtgtaccgggcaacatcgctgcaaagaaaagagcagaatctgcaaatggtggtagtgcaagctcaaaggcaagaagtggtgctcctcagagggcaatggcggcatctgcaacctccaaggaggagaaggaagatgaaccatcaatgcaattcgaggaatctgagagcatcagtaccccgtccattgaagaccacttacacgagcagcttcccgatccggttgatctgaaacccttggacatgtctgcttctgattcagctctatatggtcagcaggcaccatcgtctgacattccagagcaacaaagcaagaatgaagaagttaaggagagcttctctgaagataaagatgttgtggtaggcaatgagctgcataatggaggccaaggtgctgatgacattgcaaagaacataacaggcattgtcaaggctgatgatcaatcccagcttgcagagaaggaagaggcgagagcgaaagtggacaaggtttggagaaaagatgaaccgaagagcaacgatgtgattgaggaaaccaaaagcaaactccttgaggagaggaagagcagggtgaaggctctggtaggcgcgttcgagaccgtcatgtccttcaaggaatagtgctcagcctacaatgcccatgcccatctcaggatgagttactcctgccatgaaaatatatccaatcacgagttatgttcatatgatgagttccttggttcattgtattcgatgtggtaattttttttccctcaatggtcattgcatttgaatgtggttgttgctgctgctgttcatgtagaaattgaatgaaatgttgattcttgttgattgggaggggaatttgattttgtt

SEQ ID NO: 22501 - DNA, 1625 bp, Oryza sativa
  ref <308>: DATABASE ACCESSION NUMBER: AK072678
  ref <309>: DATABASE ENTRY DATE: 2001-12-06
ggacgttgtttgaatctttctttttaataggattcaaggcatgattctgcgctttttattacacaagaaatgaatcagtaaacaactcaattagccgagatgatgttgccaggcgagcggacgcggcgacccgcgcggatacatcttggacgcactggacgatgaggcggagaggcggaggaccactgctgagcccgagcctgggctcctccggtcgctcgtgccgcctcggtacctgctggacgacgaggacgcggatctccacctgaggtgcgtcttcgtcgtccgcgtcgctggcacgtccgatggtggtggtggaggagcctacggtctttgccgcgcggcgagagaccacctcgccggggccgagtacgcgtgcgccgtggtggcgtggaggggcggggacgccggcgtgctcgtgtacgacgacgcggacgccacggagttggttgccaggagggcgccgcggttgctcgtcaggacgggcctccggatgctggactcctcctcgctgctgctcccggacgagggtggcacgtcgtccttgctccgtctcctgcttccgccgtacgtgatcacgcaggcggcggcggcgcagcaggaagagtacaggagccgggtgattctgctgagagggctgggcacagagcggtggcagtgtgacgcggcccagatcgccgactggctggagcaccgggtggagctgaggcaccaggtggaggccgtcgtgatccacagggccatgggtgtcgtggtggtcgtgctcgggagtccggaggatgtcgagcttctgctgcaggagcctcccgagacatggctgcacgctcctgggatgagatggggtgatgatgatgatgatgatgagatgagatgggggctttctcctcactgtctgatgatgacatggctgcacgtttcccggttcctgacgccgccgccgcagcagccgccgcagcagctcagcttcagcacgagggactgggcgggtcccgtggcctactgccaagccaagaactggctatccgacgagttgatgtctccaggaccaggataccatgtgaacagggtggtcgaggccagacggatcgtgcacaagctcatcgcgctgtgtgctctcgcgaaccctgctaccgtctggagcagcagcttcccggacaggtccttgatcctctcaggtatcccaatgtacacggaccgcgcagatctggaggctcggctgcccaccacctttggtgcgatggatgatctagtccacgcccgtctgaaggggggtcgcagtggccgtgttcaagtcttggcatggggcagcaaggctgggacggaggccggctgaggactggtacagcttggggttcaccgactgcagacgggtgccatacgccgcctacactcatgacttcattgcagctgtcattgtagataagttggcccggctccggagcctctacggaccatctccttgacctcagcggatagccagcccattcatgcattcttcttgctttcaggctgtgtacatgaaaacattagactgatcacctcctccttatattagttgctttaggctgctgcactttcatgtggttgattggttggattgaagtatacaccacctgttggagtcc

SEQ ID NO: 22502 - DNA, 1597 bp, Oryza sativa
  ref <308>: DATABASE ACCESSION NUMBER: AK072679
  ref <309>: DATABASE ENTRY DATE: 2001-12-06
gatctgttcttaacatcctgcagacaaacacaagtgttgctagctcacttggaccacactttttcccgcaaatttccctaatctttcttgacatgttgacagtttacagaatgtacagtgagcttgtatcaagcaccattgctgaagggggaccttttgcctcaaggacctcctttgtaaaactccttagatctgtcaagagggaaacattgaaattgattgagacttttgtggacaaagctgaagatctaccacacattgggaaacagtttgttcctcctatgatggatcctattcttgctgactatgctagaaatgatcccgatgctagggaatctgaagttctgtccctgtttgcgacgatcataaacaaatacaaaggtgaaatgcttgaagacgtgcctcgcatatttgaggctgttttccagtgcactcttgagatgatcactaaaaactttgaagattacccggagcatcgcctcaaatttttctctttgcttcgtgcgattggcacccattgcttccaagcattaattcagctttcaagtcagcaattgaaacttgtgattgactctatcaactgggcatttagacatacagagagaaacatcgcagagactggtctcagtctattgctggaaattttaaagaactttcaggcctcaggattccaaaatcaattctacaaaacttattttttgaatattgaacaagagatctttgcagttctgacagacacattccacaagcctggtttcaagcttcatgttttggtgctgcagcacttattttgtgtggttgatggtctgacggagcctctctgggatgcatcctcagtaccataccaatatactgacaacgctatgtttgtccgagattacacaataaaacttttaggttcatcatttcccaacatgacacctactgaggttacaaaatttgttgatgggcttcttagttcaaaacatgaccttccaagcttcaaaaaccatattagggatttcctggtgcaatcaaaggagttctcggctcaggataataaggatttgtatgctgaagaggctgctgcacaaagagagagggagcgtcaacgaatgcttgccattccagggcttattgccccaagcgaattacaagatgagatggttgattcataattctgtgattcagccttgctaatccagttccatttcttgctttggcctccaaacctctggagccctcaacaccccattgcccaagttctcttccagggtggtgaaagaaggtgcctgctgtaattttattttcggttacctccacttggtgctgattgcgagatttctgctagtcaataggaaaggccaactcaattttgtcgcaagagctgttttggactgccattggtttgcagtatgagctgtcaggttaatgtgatgacagcagctcttgtgctcctgtattttgctaacattgctgcgtgtgcggggccatcatatagtatgatcacggtacaacattgtatcatgatttttagtttagtttatagatcggccgcattctgtattgtggacaagattcaggatagaaacttatattcgtagtgtactattttgtg

SEQ ID NO: 22503 - DNA, 1567 bp, Oryza sativa
  ref <308>: DATABASE ACCESSION NUMBER: AK099294
  ref <309>: DATABASE ENTRY DATE: 2002-08-28
gaattcggaacagggaagccgccgcatccccaaattcgccggcttcctccctcccgagctaggtttccgtctcgccgccgccgccgccgccgcccgcctccttttactttttccgcaccccaattcgctccgctgcccacctcctttcctttttccgctgccagccgactagggtttccgcctcctcgccggacggacgccgcgaacccccccccacacggccacacctcgcgccggctccctcctcgcgttccgcttccctcgcattacaagcggcgccggtcccggatggcggaagatgccaatgccggtcgcaagagctctactcatttagcccaatctcctgaattgcacgcatctcttgaatcgcacgagctgtacaacatacctattacgaggggtgaaggaacattaataactgaactgcgtaaggttatggaggaactacgtgtgtcttattatgctgacacagatgaagaaactcgggagcaactgaaacagttttgggatgatgaattcaatgcaatatcatctggagaaacaactattgagagagatctaaagtggatgcggaaggaggttattgaggcattcgagacatacagtgaggctaatgtagttgattatgagcttgaagatctttctcgtcagtgcttgatttttgatgattgtggtcagccataccatcattataattttacaatgaagtctaagcgtcctgattctgatttggagtctagtactaattgtcctgattctgatttggagtctagtactaatttggagagttgcatttctcgtcactattttgctgaagttaaacttatggatggaaagaaacattatttttgttgtccattggagtcgtttgacaatggtcattgtcatggatgccggaattctggcattgatctgaagcatccttcaaacggtggttatgaggagggcaacgcatactctggactctcttttgatgatgatgaattcgatgcaatctctgaagaaacaactaaggagaaaggtatagagtggatgcgggaggaggttattgaggcattcgagacatacagtaatgctaatgtagttgattatgagcttgaagatctttctcgtcagtgcttgatttttgatgattgtggtcagccataccatcattataatttcacaatgaagtctaagtgtcctaattctgatttggagtctagtactaatgtggagagttgcatttctcgtcactattttgctgaagttaaacttatggacggagagaaacattatttttgttgtccattggagtcgtttgacaatggtcattgtcatggatgccggaattctggcattgatctgaagcatccttcaaacggtggttatgaggagggcaacgcagactctggattctcttttgatccaatctaattagatctatagactatagagttgatcatactggatgggtagcgttgctgtgggataattgtctaataaaacagtaaatatgagttgtaaaaaaaatcttacttattgtacgattttattttgtgtggttatatattttttaccttgaccc

SEQ ID NO: 22504 - DNA, 1226 bp, Oryza sativa
  ref <308>: DATABASE ACCESSION NUMBER: AK099295
  ref <309>: DATABASE ENTRY DATE: 2002-08-28
gggcggactccaaaaacccttcctcaaaccctcgcccccacaacgccccgcgacaggaggaagaagcttctcgtctgattttgttcctggtgactgaaagcagcagagaagcagataggctcgcggtgagccatgggagaaggcggagacgggaggtccttcaattttcttcaagttctgtttgagggtgtaatagctggaggtgctgccggtgttgttgttgagacagctctgtatcctattgatacaataaaaaccaggcttcaggctgcgaaaggtggaagtaaaattcaatggaaaggcttgtatgctgggttaggtggaaatattgctggtgttctcccggcttctgcaatctttataggagtgtatgaaccaaccaaaagaaaactgctagaaatgtttcctgaaaatttgagtgctgtggctcatttgactgcaggggcaattggaggtgctgcatcttctcttattcgtgttcccacagaggtggttaaacaaaggatgcaaatgagtcaattcaagactgcacctgatgctgttcgccttattatccgtaaagaaggattcaaaggtctttatgctggctatggttcctttctgttgcgagatctaccatttgatgctattcagttttgcatatatgagcaacttcgaataggctataaactggcggcaaagcgagacttgaaagacggagagaatgcacttattggtgctttcgctggcgcaattactggggctataacaacacccctcgatgttttgaagacaagattgatggttcagggacaagcaaaccaatataggggaatcataagctgtgctcaaacaattctacgagaggaaggtgctggtgcttttttgaagggtattgagccaagggtattatggattggcattggtggatccatcttctttggtgttttggagaaaacgaagtcaattctagctgagaggaacagccgtaaagtacgaatactatgaaagggggatgattttgcgtagatgctgctattttcccaggatgtctactgatatgtgtgctcgatcaattaattttaggagctccgattcacatccttgtcaatcccatccgaatcttgtattttgctagagcattacatggggttaaagttataatttctgaatttcttttcgtctggctagcttgttttgtacttgagctaaaaagataattttctggaagcgaaatgcttctgttc

SEQ ID NO: 22505 - DNA, 1293 bp, Oryza sativa
  ref <308>: DATABASE ACCESSION NUMBER: AK072680
  ref <309>: DATABASE ENTRY DATE: 2001-12-06
tatcgcgggcggccgcctcggcgacgactccgattggccatggcggcgtctctccgggcatcgtcctcctccctccgctcgcgcctcctctcctcctcctccgccgcttggtctccgtggagccacgtcctctcctcctccgtccactcggaggcctccaaccagaccgaaaccctcgctttcgacgagatccagctgtcccccgagaagccgtccaccgccaccgccttcgtcctccacggcctcctcggctccggccgcaactggcgctccttctcccgcgccctcgcctccgagctccgcgaccgctccccttccgacgagtggagaatggttctcgtggatttgaggaaccacgggagatcagcggggatcaagggcctgaggccgccgcatgacatgtcaactgcggccagggacctcgccgatttggtgaaggcccgtggctgggcatggccggatgttgtcgtgggtcactccatgggtgggaaggtggcactggattttgcagagagctgttcccgcggtgattacggggagtccgctgatcttcccaaacagaacagctttgggtgcttgattctgttcctggtcaagtagaaacagataacagtgatggtgaagttgaacgggttttgcaaacgctggcaagtcttccttcatcgcttccatcgcgcaagtgggttgtcgaccacatgatcaacttgggattttcaaagtctctttcagaatggattgggagcaacttaaaaaaggacaatgaacatgtgacatgggcgtttgatcttcaggctgccatagatatgtttaattcttatagagaaagaagctattggacactgcttgagaacccaccaaagggtttggacatcgccatagtgcaagcagagctcagtgatagatggctttctgatgatgttcagaggctaaaagcgttgtctaggagagagagcaagcctgatgctggtaaagtttctcttcacgttctccccaactctggccattgggttcatgtggacaatcccaaggggctactggagataatggttcccaactttctgtcagctgctaaaatttgactaggttgttaacatgccatttttttaccactggagggttacattgtttttgtgattggatgagaactactctgttgatgttcttaaaaaaaaagaaatatgttaataaaagagatttatagtgaatttatgttcctttaggatattgagttggtgttgaagatggataacttaacagaaatattataggttgatcaaatggaatgattctctt

SEQ ID NO: 22506 - DNA, 1224 bp, Oryza sativa
  ref <308>: DATABASE ACCESSION NUMBER: AK072681
  ref <309>: DATABASE ENTRY DATE: 2001-12-06
gctcactcatcattagtttaagtgtgaggccaccgcgagcggcggcgccggcgacggcgagtactcgacctcgccgctccgtccgtcctgctcgcggcggccgatgaccgcaccacccgatcgagaccgcggccatctcgggaacaccggcggcgatgaggaggccccggcccttggcgcggacgcgtctccccgagcggcggccgcgcgcgtcggaaccctccgccttcgcggggccatccctccccccgtccgcgccgccacggggcgcatcggcgttgggggatcggggaccgtgggggcggtggggaggcgatgccgcggcttccggtaaggggagggcgggtcggccaaggtgagatctgagccgcctcgccatggattttctttcgatttcgtttttagccacgttttcgagattcggtcatcaccaccacaatctctcttcctcgtccttctccctcacggcctctatggcgcaccgtgtgctgtgtgcttgtgtgtttataccctaaccgacccaatgtcaagtgcagttgcttgctgacgacgagaaattggagattatgccattgttaaaaggggtttcgcaggaattccttcccacagcttgccgacgatcaatccgccgagaggccgcagcgtccggattcccatctctaaggtgagccgccgccgtgcagtgaaggcaattggaacctagggtggtgtccggatcggctgtggactcttgggggttttggtcgtcgtcgtgagcttgagccgacttggctcgttagagcaggtacaattggaggagagagagagagagaagaagaagaagaagaaaatcaggctgtagatctggctatactattatacttgctcttagtgttggtgatcgcatcagcatatgctgtatttgtggcagggtactacgtatggtccgcaatgaacacagagggcgatgacgatcgaccttggctgaaataagcatgccttcaagcaattgaggctgctgtgggtattaaattggaccctccctctaccccctttgagcctttctagtcatgtgctaatgccagtggctttgtccttggatggtcattcgtttcgaatgataaccagggtagctccactaccgctagaactgataggtctggtgataagggatggtgggggttgggttatttgattgatcaaaggcgaagctgagcccaaaaaaaatacataaaaagttgaatg

SEQ ID NO: 22507 - DNA, 1857 bp, Oryza sativa
  ref <308>: DATABASE ACCESSION NUMBER: AK072682
  ref <309>: DATABASE ENTRY DATE: 2001-12-06
gacccgctcgcgcaattcgcacgctctcctcgcctcgcctcgccttctcttctctcctcacctcgcccgcgtcgtcgtcgtcgtcgtctccgcggcggcgggggaagcagcgggaggcggaggcggagcagcagcagcaccaccaccccggggcggggccgcggcgcggtgctcgcgcgcgtcgactccgtgtggacaatcatgtcttctaaagttcctgggttagcattacttaacaccagcataagcaaattttggagcgatgaggagcttgtccgattcttagcagagaggaaagaagcacactctctgccagagaatgtatttgtgggaatgaacatttctctcattgatccacgtaactcagaggacatatggtacatgaatttttcagatgatccacaatcccctaagaatggagaaaatgctattataaagtcaaaaaccggatactggaaagttgttggcactgttagaataccgacaagtactgttattgtgggtatgaaagtttctctggaccattatgaaggcgaagcaccatctggtaagagaactgggtgggtgatggatgaatatctgattgaacagaatgacgaagctaatctaccacaggactacaagaatttgtgtacaatattctttcagggagacgacatattaaatgctggagataagcagatatgtctgaatgcaaatgttcctaatgaacgcaaggaattttaccttcaatatcttgctgaactagaagagcaaaatgctgcatggagcaaccaggctgtatctgtaaacgagcaagatgtctcttccagcaaaggactggacgggcaaaaaactagtgctgctgatgaccaatctgttaatcatgccccttctagggagggctacatagaattgaatgacttcttaaactcagattcgtccgcatcaacttcggaatactcaagtcaacgcactatgatttctgaagagtacttcgattctgatgcatttctgagggagattaggaatgaccataacgcagctgatgaagaacatacagacagcaagttcagcgtagctgcagctagtaaatcagattgcgtggttatcagtccacctgaacaagggtttgttaacaatctcgataaccatgccaccatagctggagattcaccgcaaaagtcagtgaaaaatgataaagtagacgaacactcaagtgaggagcatccacagcacagtcctacaacttcctgtttcccaagtcatgtgaaacgaagcctttctagtagttccagtagctctcagggtaccagcaacagcaagtctccccagagacagagagagcgatctaccaaaaaaattggaaaattaggaaagtactggtgttgtggatcattatagtccattgcatagcatttctatactctgtacaggaagcatgacattacgccatgctattttgatacggactggtcgcctcaacagatttatgccagatcttctgatagaacatagtcaaagaagactgcaagttttgaagcaacaatgaccaacaatactacaaactgtggaaagttacatttttgttttgttcatagtgtgaagatatcatgaccttgatgattctgtcaaactgaagtgagctaccttgattccattcttgattgatagggtcagatattcactgatacctgtgttagttcagtgaaatgaggatggcagtagtttctgattatcaccaggtgctctcatttgtaaacatctacagtacagtttcatatgatagaatttcacattttagtaagtactaatactgattgctcaatacttagttatcctgcttgcatttgaaggagtataagcttttgatttacg

SEQ ID NO: 22508 - DNA, 2563 bp, Oryza sativa
  ref <308>: DATABASE ACCESSION NUMBER: AK072683
  ref <309>: DATABASE ENTRY DATE: 2001-12-06
gactgacacccgtccccaaaagcaaagaggcctctctctctctctctcgccgatccctctcctcctcctcttcttcttcttccactagctagttcgtcttcctccttcagctagcttgtagcagctaaggttaggtcggatcgagatcgggatcggccgccggcgagcggcgagcggcgaggatggggcgggggaaggtgcagctgaagcggatagagaacaagatcaacaggcaggtgacgttctccaagaggaggaatggattgctgaagaaggcgcacgagatctccgtcctctgcgacgccgaggtcgccgccatcgtcttctcccccaagggcaagctctacgagtacgccactgactccaggatggacaaaatccttgaacgttatgagcgctattcatatgctgaaaaggctcttatttcagctgaatccgagagtgaggtaaaacacagtaggttgtatgatatataacttttacatgaagggaatattattgttccttttctattgcattagcatttcaatcatatcatttccttgtggccttttaaatcacatgttaacaaagcagtttttctgaattctatcgttctacttgccaaaactagatgttggtaaccttctgttttatactttttaacttcaaacctcgtgtcttttgcactctggcatatttcttaaaatttctacttattgggatatcatgcaggagagtcctcattcccttcatttaatcccctcaaattttatttattatggtcatacaattaatgggccacatgcatggaagtcgatcgccagcttgcgatcagcatcctatcattaatgttatgatctatactaattcttctgtaaataaattaaaattgcactagtttttaactaaatgctactattctatttttttatccatactccgtttgagtggtttcttttgtgtttcatgaagccatataatatgcttaagaaaacatagaaacatgcacaatacaataatagcgctggtaggatccggttggagaccaaatgtttcgatattctaagtgcatatttatatatactaagtaaaactgtaatcataaacatgcatatggactgtgatcgatgaaatgtttcttcattttttttttcaagataactcttccccagttgacaacatgcactgcatccagaagtactcatggtatttgttttcagtactgtttgatgagtaaaactttggtaagtgttaaaaaatgatgataagtgcaaatatttgttcctttaccacttccaccttcttggagtaaagaaaaaaatgtgtgtggtttggcaaagttgttgcatatatcacggcattagtgtgcggataatgcgaataaatgcatcaataagcactaggagtaagttaattagttctctaccttaattgaaaagttcatgtacatttaaaaaaattaaacatgcctctttttatcatttgttgaatttctacatttatcaagacagcaaaggagttctcatctactaataaattaatttaaggagctataactcccttaattttatcaaatattcacatacacggttgcatttgaggattttctatatactccactaaatgaggatgcatttaggttctttataatattttatttccatcgtttcatcatctgtttatgtttacagtaatttagtaatagttctctaattttgacagtaatggttggctcacagaaaacatcaaccaaccatatatattggtttatactgacaaagagtttttttttgtacagggaaattggtgccatgaatacaggaaacttaaggcaaagattgagaccatacaaaaatgtcacaaacacctcatgggagaggatctagaatccctgaatctcaaagaactccaacagctagagcagcagctggagagttcattgaagcacataatatcaagaaagagccaccttatgcttgagtccatttccgagctgcagaaaaaggagaggtcactgcaggaggagaacaaggctctgcagaaggaactggtggagaggcagaagaatgtgaggggccagcagcaagtagggcagtgggaccaaacccaggtccaggcccaggcccaagcccaaccccaagcccagacaagctcctcctcctcctccatgctgagggatcagcaggcacttcttccaccacaaaatatctgctacccgccggtgatgatgggcgagagaaatgatgcggcggcggcggcggcggtggcggcgcagggccaggtgcaactccgcatcggaggtcttccgccatggatgctgagccacctcaatgcttaagatgatcatcgtcgtcgtcgtcggccaaacagctgccgtatgcaccgtgaatcatgggagcaaccttgaatgaattgaagtcattggtatcgatcctagcgatgatatatatgattctcctaaaatgaaatttatctcaaaaaaacaaacctagcgattaagctattcttatatatgtgtttgcctgctgccccctaccctacaggctacatatgatttgcaagaaattaattatgagcaagg

SEQ ID NO: 22509 - DNA, 787 bp, Oryza sativa
  ref <308>: DATABASE ACCESSION NUMBER: AK099296
  ref <309>: DATABASE ENTRY DATE: 2002-08-28
tggacgccggccggagaatccgcctgccatggattattactaccccatggaggaggaggaggaggtgcacgagcgcccaagattccggcgcccggtccacccgtggcagtggcaccattggcagaatctcctcggcctcctctcgtcgtcgtctccgtctccggcgacggcggcggcggcgcagaggtgcagccatgtcagctgggaggagaccgccgccgcgcacctctactccgccagcctccccggtgtgaggaaggaggagatcagggtggaggtggaggacgcgatgtacctcgtcatccgcaccgagcttgatgacggtggcgatggcgacggcggaggcggcggtggccggaggagcttcgcgaggaagttccggctgccggcgatggtggacgccgacggcatctcggcggagtacacccacggcgtgctcagggtaaccgtcccgaggctgcatacgcgggctcgccccgtcgtcaacctcgccggcggcggcggcggtggcggtggcccggcctgcgaccccgtcgccagagcagcctgattagtgattcgatatcaatcaagaaaattacttaattacttatttaagttgcactgtgagcttaggattggggaagtaatagcagtatagtgaactgtacaattctcaggcatttcagaatttcagaaaattgccaaattggcagtgcctgttcgttatcttgtagtatcagttgttttttgtgctatagtactctatttctgttctgtcgcagtaaaacgtgaaggatttagtttt

SEQ ID NO: 22510 - DNA, 2198 bp, Oryza sativa
  ref <308>: DATABASE ACCESSION NUMBER: AK072684
  ref <309>: DATABASE ENTRY DATE: 2001-12-06
tggtggtcagttgagctcatcatctcctccatcctgaggcggcggcgcaacgacgacgacgacgacgatggcgctgctccgcgcgcaccacctcctcctgatgaggccgcgcgccgccttctcctctcgccctccccctctctcatcctccccgtgccgccgcgcccttcccaccaccgccatcgcctcgcgcctcctctgctcccaccacgcctcgtcgccgccagaagatgcctccgcctccgcctcgccctctatcgtcgccgacctgctcgactacctcaacgagtcatggacgcagttccacgccaccgcggaggcgaagaggcagctgcttgatgcgggcttcacgctgctcagtgagaacgacgactgggacctgcagcctggtggccgctacttcttcacgcgcaacatgtcctgcttgattgcctttgcagtaggggaaaagtacaaattgggaaatgggttcaatataattgcggctcacaccgatagcccatgtctcaagctgaaaccaaggtctgcctcctttaaatctgggcatcaaatggtaaatgtacagacatacggaggtgggctgtggcatacatggtttgacagggacctgactttggctgggagagttatcctcaaggatgctgatggctcatttaagcatgagcttgtcaaagtgagcagaccattgatacgtgtaccaccgctggctatacatcttgaccggttatttctcattccttcttttactgatctattttctgagaactaggtggaatctatctggtagtatgttctgtattgctaagcaaatattgctagatgttctctctttcagtactgcatcatcatgtaaccctgtcaagttatagcagcttagtcttctttgaactactatttatatctatctcagtgtttggaagttatctctgaacactattgtcatgttcgtttagtgcatatctgaggatcacacaggctactgctgctatcatatttgactgcctgttttaagtttgactttctctatttagctgactgaattccttttgccttttagcacagtgaattctgatgggttcaagcctaatctggagaatcatctagttccacttcttgcaacaaaacatgaagagactactgcaaattccagtgaaaaaaatagttcaagttccactaaagttgtccatcatccactgctcttgcaagttctttcagatgaaattggttgcaaatcaggtgaaataattggcatagagttgaatgtgtgtgatacccaacctagctgccttggagggggaaataatgagttcatttattctggtagactcgataatctcgcttcgtgttattgtgctcttagatctctcatggactcctccaagatgccagaagaattgtcaaatgagaaggctataagaatgattgctttatttgataatgaagaggtgggttcgaattcgatgcaaggggcgggtgcaccaaccatgttccatgctatgagacggattgtcgattccctgatgcatcaatctatgggagagggtgctttggaacgtgcaataaattcctctttccttgtttcggcagacatggctcatgccctgcacccaaattatccagacaagcatgaagagcaccacagaccagagctacagaaaggactagttatcaagcacaatgctaaccaacgttatgctactagtgctgtgacagcttttctgttcaaagaaatagcaagacttcataatcttcctgttcaggaatttgttgtaaggaatgatatgggctgtggttcaactattggccccatacttgcttctggtgttggcatacggactgttgactgtggtattcctcagctctcaatgcacagcgtgcgagaaatgtgtggcaaagaagacgtagatacaacatacaagcacttcaaagctttcttcgagatgttctctgatattgaccggaaactcaacgtagactaacttttagatcttatcagttcctcatgttcagtatttgaatttttttttcctggatcagaataatgaccgtatatcagagtatcagttttttcttgtcccaacatcccaatctaattctacgcatgaccaagaggggtgaaatcattttacatgtaaatatggtgacacatcgccaagctcacttttgagaagatggccttacacatatcatactcagtt

SEQ ID NO: 22511 - DNA, 1551 bp, Oryza sativa
  ref <308>: DATABASE ACCESSION NUMBER: AK072685
  ref <309>: DATABASE ENTRY DATE: 2001-12-06
gtgcgaaaaaaaagaggaaaaaaaaatcccctcgccaaaacgcgcaccaatctccgttttaaaaaactcgcccaaatttcaagggaagggaaggggaagaaggaaggcaggtgcgcgtgcgccgttgtagattgctccttcctcgtggccggagcgcgcggcggcggcggcggcgacggcggcgagatgagtcgatgagatggggatgaggtgcaagaagcacccgtaccaggcgggcggcggcgtctgcgccacgtgcctcaacgaccgcctgctcgcgctcgccgccgcgcagaacggggcgtcgtcgtcgcctcctcctccggctgcgccaccggccgcggcggcgccggcgttcccgaggtcggtgtcgccgtacgtgtcccgcaggaagtcggattcctcgggcggcggcgcgcttaagcatcatcccagcctcctcttcttccggacgccgcaggtcggccccgcctacggcagcagcggcgggctcgaggagggggacatcgggtacgagaagcggcgcgcggggaagttctccgtcatcgccacgctcttcggccaccaccaccaccatcacagatcggaggagaaggacaagggaggcgacaacagggagagcagaaaccgttcttggctcgccgggttcatgccgcgccgccgcaagaagcagccgccagcgccagccgcagccgcagccgcctcgtcgcccccgcctaggcgctcctgccgcgtggtcagcaaccgtgggctctcgccggagcgggactgcgacggcagcgacgaggagagcagctcgccgactgatcccccatggcagccatctccttcaccgatgcggaggaccccatgccggcggcgccaaaccagcaccatgccatcgggcttcgccgtctgcctcagccctctcgtgcggcccagccccgggcgccgccaccgccacgcccatccgcccgacccaggcaccttctcctgcgagctacggccatcgccgctccacaacctctcctccgccgcctccattactcggtgccgctccaggaagctcgccgacggcggacgcttccggtgatcttttcacgttttctttttcacctttttcatcttctcttcaccgcttatcaccacctaatcccaattaccatcctttttagatttttcttctcctttcttactcgcattttgtccatccatgaaaagtctctataagattttatactcccaactccaaaccacttcgttgacatataggttactactgctcgtcagccgaccattactgtaagagctgcttgtttgtttgtacagctagttgtctaatcttgatttgcaaaattgttaattaaccttagtttcttttttttttctttgatgcttgggtttaagaatgagtggacttgttgatgtgcatggactgcacggtacaggtcgtttgtacacaggattaaatgctggatttatgagtgagagggatctgagtagagggggataggagtgtatgtggctttgtgcacagggattaaaagaaggttcttgattgttttgtgtctg

SEQ ID NO: 22512 - DNA, 2963 bp, Oryza sativa
  ref <308>: DATABASE ACCESSION NUMBER: AK072686
  ref <309>: DATABASE ENTRY DATE: 2001-12-06
gagttctccacgcccaagggcagaagagagggagggagagaagggggggagacgaaggaagcacgaaaccctaatcccgaggcagcgcgcctctccgatcaactccggccttccctgctttctaagtatcagttggagctaccatgacgacccaagctaaagaaaaatgcccactttgcacagaggagatggatttgacagataaacagctgaagccgtgtaaatgtggatatgagatttgtctttggtgttggcatcagataatggaaatggatcagaaggaagaatgtggcgggagatgccccgcgtgtcgttctatctacaacaaggacaggatcatgggaacaagcatcagcaaccaaatgaactttgtgctgacaaatcaaactttcaaaaagaacaagccaagtctcaaaagcagaaaccagtaaaagttcagtcaggagtgacagaagaatcaatagacccatatagtgttcgtgtgattcaacgcaggcttgtttatattgttgggatgccttctgaattcgcgagtgacaaggtgctgaggcagcataattttcttgggcaatatggaaaaatagaaagtattattatcgacaatattggagctaaccaacagattcctgactctggccgtgtatatgttaccttttcaagggaggaagaagcttttcggtgcattgaggcagttaatggtttcatcttggatggtagacctctaaaggcaacttttggcgttacaagatattgtcatgtatggctaagcaataaggtttgccgaaagccaatctgttcgtacgtgcatcaaaaagccccaccagaagatatttgtacgaaggacgatgtcgctgtgtactgtgcaaggcttcagcatttgttgggaatggatacaaagggtctccgttcaggaaatactttgccccctcctggtgactgtgtatcaagaactaccgtttgtaatggaaactccaaagataagacctgcagcgatgattatggagtactacacaatcacggtaacaagaatcttggcacgctgccagctacaactcttcaagaagagaagaaacgtaatagcacacctaataatcagcaaggattgtctgcctccgtgtctcaggaattaccaccgcttggaccaaaggttcaccatctcaatgatcagttggcttcctgtggtgataagccccaagcatctgtgcagtcagcaaatggcaatttgaattctaagcaagtaactgcagcaggaaatggaacggtgggcaccttatcagcaaaacaatatgttaatgtagtttcacaaggatcaagtggttcaggtcgcagatttactgtacttactaggcagacggcttctagtgatactcggtctaaagcaacaggacaagtcggtaatgcctcttcagattcccagaagcttacttcggcaaacaatgagcacagtgacagaattaaaatttctaggagtgataatgtaaagttagtttcgcagagaccagaggaaccttcccaaatgctagctaatcatttgaccggagcaattgataagacccacgttgatacagatgaaaagaatgctcgctcagatataaatgaaaaaacagtttgtggtattcagatgcagcttaaagaaagcactgcagcacacagatcaactgtgctgcagagtttgagggacaatcctatgtccaataatcttccaacattggatgtcaaatctcagatatcagttgtgccagacaagccttcagattcacagtcagcatctaaaactcaattgcagccctcaaatcataaaaaaactgctgtttgtagttcagatacagccaatgcaagtgatgcatgtggcatcgctaataatcaggtgctgttccctggtggtaaacatcaaacttcatcacaaggggaggatcacagcttgtacaagagggataagagtcagtcaggagatcaactttcatctcagcatcctgggaatgttttctcaccaagactactcacttcactgtcatccattgatataactgccaaggaaaataaaggaattaaaaggcacgtttgtcctcctggatttgaggagcttcacaggccgtctgattctgacaagattacatcagtaagctccccaacttcttctattatgtgctctggacctgataccctggtacaagattcatgctctgctaaagatcagccagacttcattagctgggtttcagagtgcctagaagatggtggagaaactacacaaagtaataggagcataccttctactctcagttccacagatgccacttggagatacatgcagtatcctcctcctgtttttctggtgcatcaaatcactttcctagtatcaccgtaccctagaggattgtcacagcacacggtgggtcggattgaaaataccatgaattgctgctgttcccatccatctgtcagtggcatagcaaatcacaagcctgaatactggagtggaagtgaccatagctacatgtctactgggggatatgatgtattcagtcaaagtgcaacattaggcatgatagctggtatggtaggcacatcgccccaacaaccttcgccacctgttcattacaatgactggaccacgggaagtgctgattcagatttgaagagtccacaggttgatcatacataccccatgtactcgctgttctgacgacctggcggagtttgccttcgcaacccctaacaatagatgtacaagtaaaatgcatacctgctaatctagcttgcaaaatggtgggtggtagcgacattggcaacgaaaatgcttcgtctgctgaagcttgtaaagaccaaatgtggagcttcatgtacaaaaattagagtacttgtgaacatttggtcatggaacaatccgttgtagtgcgttgccattgctgtacagatggcctccatttcttacatcttgatgtccttgttcttgtgtttct

SEQ ID NO: 22513 - DNA, 3501 bp, Oryza sativa
  ref <308>: DATABASE ACCESSION NUMBER: AK072687
  ref <309>: DATABASE ENTRY DATE: 2001-12-06
gatttattttctttctctctctctcggccttaatcgcatataacgataattgatatggataattggattggattatatgcagctgtatcacaaattcacaatcccacaatctcattttcttttttactcggtgaaccactaaaacagtgtgaaatgggcagctgtttggcgttttcaagaaagaaaatattgttaaactgaccttttttgacagtcatcttcagttttttttttttgtttaagcccttcctctcctcactcacactgccctgttcatctctttcttttttattcgattcctctattccattccacacgcattgccgctggtagtagaagtatagtatctctccgcgaccgaagattttaaaaaggaagcaatttgcctcttttttttttttggcgcacctcgattagtagtagattttagaggcgaatgtgagcggtcaaatccttcttttttagcttgtgcgcgttgtgttttgtgctctccttttgtcagttcctgaggcgctctctcctgtgcctttgtgtttagcgtgcgtgaccgcgagcgaggtcgaggagtgagagggagtgaggcggcggcggcggcggccatggcgcagcagcagcagcagcagagtgcgtgggaagcggagaagatgttggacgtgtacatccatgattatcttttgaagaggaacctgcagagcactgccaaggcattccaagcagaaggcagcgtgtcttccgatcctgttgcaattgatgccccagggggtttcctcttggagtggtggtctgtcttctgggacatcttcattgcaaggacgaacgagaagcactctgatgttgctgcttcgtacattgagtcaattaaagctcgagagcagcagccatcacagctgcagcagcaagaggctcattcccagcagtcatcacagcagatccaaatgcaacaactcctactacagaggcatgcacagcagcagcagcagcagcagagtcagcaacaaccacagcaacaacgccgccagcagaagcaacaacagcgtagtgaaagcagtcatttgccgacaagtgcacataatggttgggtttctgctgatcctccaacacgacaaagcacttcagctgcaagttctttgtctgcaaagatgtacgaggagagggtgaagaattctgttcaaagggacaccttagatgaagcacctgcaaagcaaaggtttacagaaaatattggacaactgctggaatcaaactcatcatttatgctgaagtccgttgcaataacagctcaggcttcagggcaaattttccatggatcaactggtggcgtgtcaggtactttgcaacaggttcaggcccggaaccaacaactccaggcatcaacacaggaaataaaggtagacacaaatgctgctgtacacatgagagctgcaggggcagatggatcattaattggagtaccaggcgctaacccagcagggaacaatttgacgttgaaagggtggcctcttactggcttagaccagcttagatctgggtttctccaacagaaatcttttatgcagtctccccaaccattgcaccatctacaatttctcactccacaacaacagcagcttctgcttcaagcacaacaaaatatgacatcttcacctggagagatggacagcagaaggcttcggatgcttttgagtagccgaaacattgttcctgggagggatggtcaatcaaatgcctacacggaagttattcctagtgtgggcccttcattgcaaaatatgtgctcacctgtgcagcgcatggagacagatatgctgatgaagaagatagcagctatacagcagcaccagcaaagcagcaatcagcaacagctccttcagcattctttacttagccagcaaccaccaatctctaatcaccttccaggccagcaggaaaaaatgggagctggaagtgttactattgatggaagcctgtctaattcattccgtggaagtgaacaggtttccaagaatcaaaatgggcgaaaacgcaaacagccaatctcatcgtctggtccagccaatagttctggcactggaaacaccgcggtcccctcctcagaaccctcaactccttcatcgcaaagcccaggagacacaatttcaatgccctcgctgcaccacaatgctagcttatcaaaggctttagttgtttacggtaccagtacagcagggacaatgggatcaccatcaaatcaacttgctgacatggatcgttttgtggaggatggctgcttggaagatcatgtggattcgttcctgtcgcatgatgatgcagatcgaagagatggcagtcgtatggaatctactaaaggattcatcttccgagaggtctcttctgtacaagcaagcacgaacaaggttgtatgctgccacttctcatcagatggaaagctacttgctactgggggtcatgataagaaggtggtattgtggcatgctgaaactttaaaacagaagtcagtattggaggaacattctcttttgataactgatgtacgattcagtccaagcattccacgccttgctacctcctcatttgataaaactgtcagggtctgggatgctgacaatcaaggctattcaattcgaacgttcactgggcactcagcatctgttatgtcactggatttccacccaaacaaggatgacctcatttgttcttgtgatggggataatgaaattcgattctggagtatcaacaatggaaacatcgtccggatatttaagggaggatcaagccagctgagatttcaaccacgtcatgggggatatcttgcagtagcttcggagaatgctgtctctatacttgatgtggagactcaagcttgccttaggagatttgagggccacacaaagcatgtcgattcagtatgctgggatcccagtggcgaatatgttgtatctgtcagtgaagacacggtgaaggtgtggtctgtgaatgctgggagcgatgatcgctgcgtgcaagagcttagctgtaccgggagcaagtttcactcgtgtgctttccacccttcatattcatctatgcttatcattggttgttaccagtctcttgagctgtgggacatgtcggagaacagaacgatgacgctcgcagctcatgacagcctcatcacagccctggcgtcgtcaagctccggtttggtcgcttccacgagccacgacaagttcgtcaagctgtggaaatgatgtgctttcaagctagccgcgccctctaaccctcttctaaggatgggcctttttcttcctcattttttggtcacaccatcagctctgaagagctattgtgtgatgatggtataaacactctatatggtataatatcccccacaaagtagctggctactgaatgactgatgaaaatattgctatcctagtataccttttgctgaccctgggaaagtagcattttgtacagaacatgaactatgctttagtattaatcatagtctatctgaactac

SEQ ID NO: 22514 - DNA, 1811 bp, Oryza sativa
  ref <308>: DATABASE ACCESSION NUMBER: AK072688
  ref <309>: DATABASE ENTRY DATE: 2001-12-06
gatcaggcatcagcagcagcagcagcaacaacatttggccgctctgaagattggtgacggagaatgcccggcggctccctcctcaatagcggcggcatggcggactacggcggcggtggcggcagcggcggcggcctcacgttcccggtcgtggttacctgcctcatggcggcctccggtggcctcatcttcggctacgacattggcatctcaggtgcgctggagatggatcggattcgatcgatcgcttactttgcaattgcatgcggtttgggggtgctcttttctgaaaatttttctgaatgtttaattccgtggttttctttttttcttcttcttctgaaatctctgcacacgtatcgcgtaggattcgatttgatttaccactcattttagtcggtgattctcccaatccatcatatctcccctcatcacgacctcgacgacaacgatacgattctcctgtggcttgtggctagcccactttgaggacttgattcctgggtctctcaagtcactcgctacaagccaagaccattttcctttgatctgaagcggccatggccgagccgcatctcaactgctgccctgtgccccccttggtttctttattccgtttctgcttcttccacggcagattcccaacacatggagtagtccaaatctggcctcagtttttaataatctaaaaaaaaatcagcgcgcaggtgtaagcatcacgcgagcgaacaaatctaatccaatcaaactggtgaattttacaacagaggaagaggatattttttttctattcttgagaagattcacgggagaacaattagttctcgtgtgatatttccgcgttcattcaaatcaaagcccagagaggccgaagaggacgcagctcttgttctctcgtcaaaccgaacgtacagcagctgctgattaaccgggcacatcacagaagaaaatccaggaagtagatatctttcgaggaagcgtgatccgagccgcgcgttagccatcggacggccaggaggggatagaggcggaggtggggccccacctggcagatccttacacgtgggcccgttcacctgcttgggcgggaccaggtgaggcgacacaatccggtcgaattggatggccacactgcggcggcggggccagcgagcggccggtgtacggcctacccatcttctcgtggagcgccattagacacgtcaggttggttacagttaaacctttagagcccataagtatgtccgttgactctctttccatcgtgaggctgttaagtgtgattggttcctaactatattttaccacgtttttaaatattgttagtacttgtttaagttgagataattaaattctgagtcccacattaacaagtctaagataatcttgtcacactttcttgattcattaacgtgtgggacttgatttattaaaagtgaattttgccacaattatgatcaaacttatctaatcttagacatgataaactgtggtaaaatgtggctgacaaccaaacataattttagaatcagagctttactgagccaaaaatcaaagtcatttttagaattgaggggtacctgagatatttttagatgagtgagattttttttttagggaagatagtgagattttattttgagcagcacatttttttttctattcccacatagcagcagtaatcttcttgggaattaccactttctgtatttcaaagttttaagcccgtttgaaacgcaaaattttagaattagttttttatatagttctgttcttttatttatttttcggttaaaacatgtcagcgaagc

SEQ ID NO: 22515 - DNA, 3167 bp, Oryza sativa
  ref <308>: DATABASE ACCESSION NUMBER: AK072689
  ref <309>: DATABASE ENTRY DATE: 2001-12-06
gggtaggatggtactatccaatagtttccctgttacgaactcctccgctttggtgactcgcgacggcgatgcgcgggcaccacaaagccgccgcggctggtggccgtggccgcgtcgctataaaatcccaccgcggcttcgtctctctctccatcagcccgtctcgctcttgctccgcgttccgcttggctttccggctttagcagagtagtgagagagagagagagagagagagagagagagaggaggaggaggaggaggaggaggggattgtgacttgtgatctgcgaggatgcaggtgcaggggttctttgacaggttgacggggaggaacaaggaggcgtggaaggaagggaggatccgtgggacggcggtgctggtgaagaaggacgtgctcggcctcggcgacttccacgcctccctcctcgacggcgtccacaacatcctcggccacaaggagggcgtcgccttccgcctcgtcagcgccaccgcccgcgacccaagcaatggagggagggggaagctggggaagccggcgcacctggaggagctggtggtgacgatgaagtcgacggcggcgggggagtcggtgttccgggtggcgttcgagtgggacgagtcgcaggggatccccggcgccgtcgtcgtcaccaactccaaccggtccgagttcttcctcaagacgctcaccctcgacggcgtccccggcaagggcaccgtcgtcttcgtcgccaactcgtggatctaccccgccgacaactaccagtacgagcgcgtcttcttcgccaacgatacatatctgcctagcaaaatgcctgcacctttgatcccttaccggcaagaagaactcaacattctacgaggggacggtaaaattggaccatacaaggagcatgaccgtatctaccgttatgattactataacgaccttggccaaccagacaaaggcagtaaactagtacgaccagtccccggtggcagccaagaactcccctatccccgtcgaggcagaactggccgggccccaacaaagactgacccaaatacagaaagcaggcttcctctgctggacttgaacatttatgtcccacgcgacgaacggttcgggcacctcaagatgtcagacttccttgggtactctcttaaggctattgttgagggtgttctcccaataataaggacctatgtcgatacgacaccaaaggagtttgattcttttcaagacatcatggaactctatgaaggtggattgaaagtggccaatgcctctgcactagcagagatcaagaagagagttccctttgaacttattaagagtcttttgccagttgctggcgatcaagtcttgaagttacccctaccacatgttatcaaagaggacaaatttgcttggaggactgatgaggagtttgcacgagaaatgctcgcaggagttaacccagtgatgatcaagcgtctgacgaatttcccggcaaaaagtactctggatccaaatgtgtacggtgaccataccagcaagatcaccgaagctcacattaagcacaacatggagggcctcacggtgcaaaatgcactgaagggcaacaggcttttcatcctagaccaccacgatcacttcatgccgttcctggacaagatcaacaagttggacggtaacttcatatatgcgagcaggaccattctgctcctgaaggacgatggcaccctgaagcccctggcgatcgagctgagcctgccgcaccccgatggccagcagcacggcgccgtcagcaaggtgtacactccagccaacaccggcgtcgagagccaaatctggcagctcgccaaggcttacgcctccgtcaacgactctgcttggcaccagctgatcagccactggctgaacactcacgccgtgatcgagccgttcgtgatcgcgacgaaccggcagctcagcgtggtgcaccccgtgcacaagctgctgagcccgcactaccgcgacacgatgaacatcaacgctctggcacggcagacactcatcaacgccgatggcatcttcgagaagaccgtcttcccaggcaagtacgcgctcgagatgtcctccgtcgtgtacaagaactggaagttcaccgagcaggctctccccgtcgatctcgtcaagagaggggtggccgtgccggacccgacgagcccgtacaacgtccggctgctgatcaaggactacccgtacgccgtggacgggctggtgatctggtgggcgatcgagcggtgggtgggcgagtacctggccatctactaccccaacgacggcgtgctccgcggcgacgaggagctgcaggcgtggtggaaggaggtgcgcgaggtcgggccatggcgacctcaaggaccaggactggtggcccaagatggacaccgtccaggagctcacccgggcgtgcaccatcatcatctggatcgcgtcggcgctgcacgcggcggtcaacttcggccagtacccgtacgcggggttcctcccgaaccggccgacggtgagccggcggccgatgccggagccgggcaccgaggagtacgcgaagctggagcgcggcggtgacgaggccgacctggtgttcatccacacaatcaccagccagttccagaccatcctcggcatctcgctcatcgagatcctgtccaagcactcctccgacgaggtctacctcggccaacgcgacacgccggagtggacgtcggacgccaaggcgctggacgcgttcaagaggttcggcagccggctggtggatatcgagaaccggatcaaggacatgaacggcaactcggcgctcaagaaccggaacgggccggtgaagatgccgtacatgctgctgtaccccaacacgtcggatgtcaccaaggagaagggccaagggctcaccgccatgggcatccccaacagcatctccatctgagtctcgcgtgcattctttagatcgatatacgtgtgctattgctagtgttgcgcgtttgccgtcgtcgatttgtttcattgtttgtatcagtgtgcattaccgtgattcttcgtagttcagggtctcagggataagtcgttgcaaatgtgagtaaccttgaggcatggataatttcattaggaattattcacatggaataatgaaagttaataaaatcattttgctttcagagtttgtttc

SEQ ID NO: 22516 - DNA, 2263 bp, Oryza sativa
  ref <308>: DATABASE ACCESSION NUMBER: AK072690
  ref <309>: DATABASE ENTRY DATE: 2001-12-06
gctgcgagatcgaagacctagagggcggcgctaatggcggtggaggaggcggcggagagctgcggaagccacgcggcggcgtcggccgctggtcgtcgtggtggtggaggcggcggcggtggaggggccacgtcgtcgtcttcgtctgcgtcggccggggcggcggcggcggcggcggcgcggaagcagcagcagcagcagcgccacaagctggaggtgtacactgaggtgctccgccgactccacgacagcggcgtccccgaggcccggcgcgagggcttcgacgacgagctctggaaccacttcaaccgccttcccgcacgttacgccatggatgtgaacgtggagagggcggaggacgtgctgacgcataagcggctcttggagcaggcgaaggatccggcgcagcggccggctttcgccgtgcgggccgtgcaggtgtctccaattcttgatgggaatcagactgatgctgattcaaacactgcaggggaggaggttgcttcaaggctgttgaacagacaacagagcattcaccctcctcctgcctttggttcatctacaaatcttgaggcccttgctcttgaggctagcaagtcccaaggacaagaccatgatagcacctcagataatgtcaattacagacccatgcatgaaatcaccttctccaccattgacaaaccaaagcttcttagcgagctcacatcgctgcttggcgaacttggtctaaacattcaagaagcacatgcgttttcaacaaatgatggctactcactcgatgtctttgttgttgttggttggcatgatgaggaaactgaggatttaatagaatcagtacggaaagaaattggcaagattgatgagacgcagggatggtctacaactcattcatggtcttctccagttgaaaatatgcagattggggagaattcagcagctgaccatgttgaaatacctagggatggtgccagtgaatgggagattgatgtaaagctactcaagtttgggaataaagtagcatccggatcatatggtgatctttatcggggtacatattgcagccaagatgttgctatcaaagtgctcaaacctgagaggataaatgcggacatgcagcgtgaatttgcccaggaagtatatattatgaggaaggttcgccacaagaatgttgtacaatttattggtgcatgcactaaaccccccaatctatgtatagtcacagaatatatgtcaggtgggagtgtttatgattacctgcataaacataaaggtgtattcaagctccctgctttacttggagttgtgatggatgtttcaaaaggcatgagctacttgcaccaaaacaatattattcatcgagatttgaaaactgctaatctccttatggatgaaaatgggacagttaaggttgctgattttggtgttgcacgtgttaaagctcaatctggagtaatgactgctgaaacagggacatatcgttggatggctccagaggttatagaacacaagccctatgatcacaaggccgatgtttttagttttggaattttgatgtgggagctgctcacagggaagattccttatgagtacctgacaccattacaagcagctgtaggtgtggttcagaagggattacggcctacaataccaaaaaatgctcatgcaaaactttctgagcttcttcagaaatgttggcaacaggagcctgctgaaagaccagatttctctgaaatattagaaactcttcagagaatagcagaggaggttggtgatgagcatgatggaaagcacaaggagaaaatactgggcggactattttcagctttgagggggcgtgggcactaaatggtgtgggaatacatgttttcattccatatggaagggcctgagaaaaagatcagcgtcagttccttggcaggtgcagcgccacattgagattagactgctgcagtcgacttaatgagcaattttcagatgcaagtccatcaaggtgttaactgttgtcatactatttttttggtgtacaacttccgggttccattacagctgtaacataggaagagttgttgtgaagtgtacattattgacctgattcttctactgacgagttgtaacttgtagttgaataagaagccagatttagggcgtgcattattctcccagatcctgtggtttagctatgcttatctatctactacctactgcttactttttgtcctgaattctttttcgacaatataatgttctgtgccgtcctgtttct

SEQ ID NO: 22517 - DNA, 2525 bp, Oryza sativa
  ref <308>: DATABASE ACCESSION NUMBER: AK072691
  ref <309>: DATABASE ENTRY DATE: 2001-12-06
ggttgatggtagtagacggcttcagaatttgagtgcaggactgttaacattagggagcttctgtacacgacgaagcatgtatctccccatctgagacagacaattcttcgagtgcgaagcatccgtggcacttctatgtgcacgattcctcgagtgctacaaacggtttcgctaccaacaacggctcgtgttcttctgaaggaatctgacgtgacgtgcagcggcagggcacttgactgaccgatgagttcgttgctttcccggcccgtttgccactcctgaacaatcgtagcgaggggaggggaaaaagacgaccccgaatcgccttaagacagtgggtgttcttgtcgtgcgcttcaccgtttgtcttgttggacccggagaccccacatatccagatctgcaagcttcctcctcctccttcctcctgatcctttagcttcctatatacgattccaccatcgaaggccagggcccagacttgcttgccgcaggttactgatccaccgaaggagggaggcgcccgcccgccgccatggccgaggtgacggtggtccgtgcggagcgcgaggaggagtccaccctggagcagggtctcctcgccatcccggaggaatccaaccaacttacatacactggagatggatctgtcgacttttctgggaatcctgttgtgaaggagagaactggtagatggagggcatgcccatttatcttaggtaatgagtgctgtgagcggttggcctattatggaatctccacaaaccttgttacatacttgacaaagaaactgcatgatggtaatgcttctgctgctagcaatgtgactgcatggcagggaacttgctacttaactccccttattggagctgtactggctgatgcatactggggaaggtattggactattgcaacattctccacgatatacttcattgggatggctgtactgactctttcagcatcagttcctacattcatgcctccaccttgcgaagggtccttttgcccaccagcaaatccattgcagtatactgtcttttttcttggactttacctaattgctcttggtactggtggtattaagccctgtgtctcatcctttggagcagatcaatttgatgatacagacccagttgagcgaatccagaagggatctttctttaactggttctatttctcaataaacattggtgctctcatatcaagcagttttctggtttgggtgcaagacaatataggatggggaataggctttggcattccaacaattttcatggggctggccatcataagtttcttctctggaacatcactttatagattccaaaagccaggcggcagtcctattacacgagtatgccaggtggttgttgcctcctttcgcaagtggaacgtacatgttccagaggatagctctcgcttgtatgagttgcctgatggggcttcagcaattgaagggagtcggcaattggagcacaccgatgaactcagatgtctggacaaagctgctacaattactgatcttgatgtgaaagcagatagctttacaaacccatggcgaatatgcactgtgactcaggtggaagaactgaagatattggtaaggatgttccctgtctgggcaacgactattgtgttttctgctgtctatgctcagatgtccaccatgtttgttgagcaagggatgatgcttgatacatcagtaggtccattcaagattcctccagcatctctatctacctttgatgtggtaagtgtcattatatgggtccccctctatgatagtatcttggttccaatagctaggaggttcactggcaacccgaggggctttacagagttacagaggatggggattggtttggtaatctcaatcttttcgatggcggcagctgcagttcttgagattaaaaggttggacattgcaagggctgaacatttggtggatcaaaatgttccagtaccactgaacatctgctggcaaattcctcaatatttcttggttggtgcctcagaggtcttcacatttgtcgggtcacttgagttcttctatgatcaatcaccggatgccatgaggagcctctgcagcgcactgcagcttgtcacaacagctcttgggaattatctcagtgcattcattttgacattggttgcgtacttcacaacaagaggaggaaatcctggatggattcctgataacttgaatcaaggtcacctagattatttcttctggcttcttgctgggctcagttttctgaactttgtgatatatgtcatctgcgcaaacaaatacaaaagcaagaaagcagcttgagctaatcaggagttaaaagactgtcgtcatgggaatttcacttcaaaattctgtatatatgtgcacaaagtacatgttgaagcagcgaccgtaacaagagaactttaaccatcctgtactctgtatttgatgctactatacattttatactttttgttctgtagatattaatttattgaagctacttgtggaatgtagctttgcttcc

SEQ ID NO: 22518 - DNA, 1706 bp, Oryza sativa
  ref <308>: DATABASE ACCESSION NUMBER: AK072692
  ref <309>: DATABASE ENTRY DATE: 2001-12-06
gtcctgcgcctcaccttgtctagttagcaatggcggctgatcaccttgtcgtggccatgcttctcctgctggctttgtcgccgccggccgttgctgacgacacggcggtgctcggccggaaaggcggcgtcgtggaagggcaggcggcggggccggggaggtacgccgtgatattggacgccggcagcaccggcacacgggtgcacgtcttcaggttcgacaacaagctggacctcctcaaggtcggcgacaacatcgagctcttcgctaaggtggatcctgggctgagctcctacgctggacgtcctcaggatgccgcaaactccatattgcctctgcttgacaaggccaacaccgttgttcctgccagacttatgaacaaaactccccttaaacttggggcaactgccggactcagacttattggagatgaaaaggcgaaccagattcttgaagcggttagggatgtagtccacaccaagagcaaatatcagtataacccgaactggatcaacgttcttgagggatcccaggaagggtcatacatatgggttgctctgaattatctcctggataaattgggaggagactactctaaaaccgtaggggtggttgatcttggaggtggatccgtacaaatggcatacgccatctcatcaaacaccgctgctaccgctccaaaggtgcccgaaggaaaagattcctatgttgtgaaggagtatctcaagggaaaagattataacatttatgtgcacagctatttgcactatggcggttttgcttctcgcgcgcacatcctagagagaaaggatggaccatttagcaactgcatgctgcgcggattcagtggtaacttcacctacaacggcaagcagtacgacgcaacggccgcaccacaaggtgcagactaccacaagtgcagagaagaagtagtgaagttactgaaggtgaatgcgccctgcgaaaccaagaactgcagcttcaatggcgtctggaacggtggtggcggagcagggcaggatgacctctacgttgcgtccgccttctactacatagcctcccatgttgggttcatcaacagcgatgcacccagtgcgaagtcaacccctgcaacgtttaaggctgttgcagaaaaggtttgtaaactgagtgtcaaagaagcaaaagtagaataccccaacgttcgtgatcatgcctacttatgcatggatcttatctacgaatactccttgctcgttgacggcttcggtctacatccaagtaaggagataacgctggtagacaaggtgaagcatggggagtactacattgacgcggcttggccattgggtacagctattgaagctgtgtcacccaaaaaacggcttcgagaaatatacaaatgatcttgagatcgatgtactagctactttggaagttaggatatcgattgttgtatgatcgatgtctgtgtgctggttattacagtataactgagtatcatgatatataagtagtatgttaataatgggtcgagctatcaatagatcgaggcggccatgctctttgtcctagactccaagttgtgtatgtttgaatatatagcagctttctatatataattacgtactatcacagaaatcatcggttgtgtttgtgtgtcatgagcacgcatgtcttgtatgtaaaagactgaacatctggtgcacatttgagtatttgacctg

SEQ ID NO: 22519 - DNA, 1095 bp, Oryza sativa
  ref <308>: DATABASE ACCESSION NUMBER: AK072693
  ref <309>: DATABASE ENTRY DATE: 2001-12-06
gctccttccctcccgccgttgccaaccacccccttcccctcccccctcgccctcgccgccggcggccgtctcgtcgtcggtgagacctagagagccaaacagcgcgttggttgttgagctcggagagggagagagagagagagagaggatggaattggagtcggagcagcacggctgcgagcattacacgaggggatgcaggatcagggcgccgtgctgcggcgaggtgttcggctgcaggcattgccacaacgaggccaagaattcgctcgagatccatctcaatgaccgtcacgagatcccccgccacgaaatcaagaaggttatctgctctctctgcgacaaagaacaggatgtacaacagtactgttctggttgtggggcatgcatggggaaatacttctgcgaaaaatgcaacttctttgatgatgatgtctcaaagaaccagtatcactgcgatggatgcggcatatgcagaactggtggtgtggataagttctttcactgcgacaaatgcgggtgttgctacagtaatgtcttgagggattctcatcactgtgtagaaggagcaatgcatcacaactgtcctgtctgcttcgagtacctatttgactcgacgaaggacatcagcgtcttgcactgcgggcacacgatccatctggaatgcctgaacgtgatgagagcgcatcatcacttcgcttgcccggtgtgctcacggtcggcctgcgacatgtcggacgcgtggaagaagctcgacgaggaggtggccgcgacgccgatgccggagttctaccagaagaagatggtcagtaaaacaccaaacatttctccaaaatctcgtgtgccattcttcagtgaacatttttttagataatggaaatggattacatctccggcctctgctcgtaggcacacaactaaaaagtccagaagtgaatagaaaagagcttaaaaaaagacgagatgggacaaaccctcaacttctaccaataatatgatctactaaaataatgtttctaaaatcatgtagattctatcacaaaattctgtaggtactacgccatccagactggaataaaagttctttggctacct

SEQ ID NO: 22520 - DNA, 1413 bp, Oryza sativa
  ref <308>: DATABASE ACCESSION NUMBER: AK072694
  ref <309>: DATABASE ENTRY DATE: 2001-12-06
gaacgtcttgcggccacacgagccaagcagcgagacccccggatcgaaacgcacaccggcggcgatggcgatggcggcgctgcgacgggacgggaggcgcgtcctcctctcctccaccccatccccggcggccgccatggccgcgcgctcccccgccgccgcccaccaggagattgccccactaggcgcacgttctgtttcaacacaagttgtgagaacccgcatgaagagtgttaggaacatccagaagattacaaaagcaatgaagatggttgcagcatcaaagcttcgagctgttcaaataagaacagaaaattcacgtggtctatggcagccattcaccgctcttcttggggatgtccctagtgtcgatgtcaagaagaatgttattgtagccattacctctgacaagggtctttgtggtggtatcaactcaacgtcagttaaagtcagcaaagcactccacaagttgacttctggaccagagaaagaaagcaagtatgtcatattaggagaaaagggtaaagttcaactcattcgtgactccaaggataacatcgagatgacagtatctgagttgcagaagaaccctatcaactacacacagattgctgtgctggcagatgatatcttgaaaaatgttgagtatgatgctctaagggttgtttttaacaagttccactcggtcatatcattcaagcccacaatgacaaccatactttccccagaggttatggagaaagaatcggaatctggtaaggttggtgacctggattcatatgaaattgaaggaggtgaaactaaatcagaaattcttcagaatcttaccgagttccagttttcttgtgttatgtataatgctgctctagagaatgcatgcagtgagcttggagcacgtatgtctgccatggacagctccagcagaaacgctggtgaaatgcttgatcgactcaccctcacatacaacaggacacgtcaagcatctatcactacagagctcattgagattatctctggcgcttctgcccttgagggataatgatgaaacttttgcccatctttttttgttttgctgttcgaaaaaagttcacttgtcatatggagcagcctttccctcgagtggatcctcatgctaagttgcaataattagcccagttacgtgacggtgctatgcatatatcagaaatgcttgttccagtcatccttgtttatctgaatggcgacgtattttaaacaatcttttacagctgtgttcattttgcataaatgattgatcactgttctgcgttgaatttatctagagctttctcttttatttttttttttttgtgtccgcaaccattcatcggtatatcccgctcattacacaaattcacttatctatctgtttggtcagactgaatcgatttgttt

SEQ ID NO: 22521 - DNA, 2741 bp, Oryza sativa
  ref <308>: DATABASE ACCESSION NUMBER: AK072695
  ref <309>: DATABASE ENTRY DATE: 2001-12-06
gactactcccctctcctcccctcccgactcgacgaggatcctcccgtccccacgtcggctggcgattttgactcgcccgccgccgcctgcgccgatctccctccgacgactggcggcggcatcttcttccgccgctgcattgagcacccatgcaagttctcttcacctgtgggatgatgtagcaacattttatctcaactgatcctccatacagtaatctccaagatggaacagatttcacttgagcatcggtacaaggagtgcaggccacgaagaaataacagctgtccaaccaaaacacttgtcgggaaggatcagttgaaggaattggagcacaggagaccatcacctagtgtgattgcaaaactgatgggacttgatgtgttgccacctgcttatgtagcccacaatcagcaccaggaattcaaggatgtattcgaagtgtcagaggaaccacaagaggccgtcacgaaagagagatcacataatttccctaaagggttgccaagcttgaagcgaagtgcattaaagctaagaaagcttatgccatcaaagtctccctacggcgatgaaacatttgataacaatgtagtgaaccaagatggttttgatcgcttgaactcgctagagataaataatcctttgtttgagaagcacccctatgatgtgaattgttcccccaattatcgatatgagaaagatagtacttcaagtactttcaggaagtaccctgttggtttaggtaactcttcacttaaagaaattgttgttctggagctaggcttaggggaagtccaacattcaggtaatgccttttctacaccagaaccctctgatgtcaataagaatttcaggagaaagatgaagcaggctgagttttctactacgaacaggggttcgcaaaatcttttaggcactaaagatattaatgtgcctagaataaaaggagaaagacacttgactagcaatgctgtagattcactgttaaagcgacaagattcatcacttgatcaatataacacagtggatacggataacactggatcatctcagaagtgtgttagcagtgaagttaactccagaaaaagcaacaggtcatcatcaaatagctcaccctggaaaatccgccgcaagtatgaggaaggtgccattggttcaaaaactcttgcagagatgtttgctttatctgattcagagaggttgaagagggattcagactcacatgtgcagattcaagacaataaacttaaccggggcaacaacaatgacaaggaaggatgctttatagtgttgcccaaagcatgcacctcgattgcctcctcacagtttgttggacaagaattcttcctgtgaaaggtcccctcacgatatttttttctcaaatacatcaattagtcacaacagtggtcagtttcacttcgattctttctgggataaaccaacacggcagcaaatttcaagtcccacccaagatgacttgaggaatgcttcttgtgcaagatatcacaccttggagcaacatagatcttctttcccttcttatgataataccagaaacaactcatggcatttaactgatgacttttcaacttttgcctgcataaatgagaaagtacttttcacaacagatgaagacttgttgagaaaacctactgaaacagtgcattcttcgtttggatcacgattatctggggaacaaaaggtttcagcatcgcctttccattgcggtgtatatgaagccataactatttctgatcatacttgtgcggcaaagtctcgtagaagcttgaaagaggttgaccgaccaagcccagtgtctattcttgagcctccaactgatgaagacagttgttgttctggatacttaaaaaatgactcgcaagtcatgcctagcatcgataaacaaatatatggctgtgagctccgatatgagcaagaagtatccttgtccagcgacaatgacaatgattcttctgaccagtctcttgaagcatttgaagttgaggaggaaaaggaattctcttatctacttgacatacttataagctccggtgtgatagtcgcggactcacagctcttgttcaagtcatgacaatcttctggttaccttgttggtcctcatgtcttcgacaagcttgaggggaagtacagcaaggttgctacatggccaagaccacaaaggaggcttctgtttgatcttgcgaattctgttctttctgagatcctcgcaccatgcatcgacacgcatccgtgggcaaagttgagtagaaattgctgccctgtttggggccctgaaggacctgttgaggttgtatggcaaacaatggtcaggcagcaggaagagcttgctgtagcacatcctgatgacaagattcttgatccagaatggctggaattcggtgagggcatcaacatggtgggatggcatatagccaggatgttacatggtgatctcttggatgatgtcatactggaattcctctcaggatttgttgcttcatgaggaaaattaatcaaattagtttgtacttcgtgttattcatcaatactagtaacagtagtcgagtgcaatgacgagccaggattttgcctgaagaaacttgaaccacattgggtggtgtctgtaacagcgtttcaagtgcacatatgttgccttttttctggtccatgatagaggctcagtataacatttcataactctttgaaggccgaagatgtatgcacaacaccataacatgtgt

SEQ ID NO: 22522 - DNA, 3085 bp, Oryza sativa
  ref <308>: DATABASE ACCESSION NUMBER: AK072696
  ref <309>: DATABASE ENTRY DATE: 2001-12-06
gaaaggccacctcagtgagagagggaagggagggagggagggaggagggagagatctcctgctgcctcgcgatttccggcggcaaaaaggttcgattttgatccccgtctccggattcgcccagccccgatttgcccttgcggcgcggcctcgctggtttctgcaagtgatagagaaagatcccgattttaacagtggcagttcgtggcccgcccgcttctgcttctggttttgggcgattcggcggttgctggactggagggagtcgcgggtgcagtgttctggttcggatctgagcgggtgttgggtgttttcaactctaattcgggcgagcaatgagggttcttgatgcgtgacctgatgcgggaggcgtattgggagaagatctcttgaagtttttttttttttggttttggtttgtttggggggtttccttggagtggagtctcttgcccggatcgccacactcgttctatgggctgtgtcagttcgaagcaattccatggcgaggagcagcgtggcggcgaggggaagccccggcggcgcccatctagcaactctctgaggcgtcttgttagttacaattccagcaagaggcatgagcactttgaggaggaggatgaagaaggtgtggttgtgtcagccacctcctccagtgctggacatcgtgtagggaatgatgtgagcacggctaggctcatccggaagccccccgcgccggtggttgaggctgtggctgtgcctgtggctgcattgccagatgaggcggcttctgtggcggttagcgtggttgatgtggagaggccagttgccgcgcctgcgaattggaggcgtgctccgaatggcgcggcggagcaagagcctaggagtggtggtacaaggagtgaggcgaaaccgaggattacagatgttgtgcccaatggagtgcagggggggcatgcggcagctggctggccaaggctggcctcacagaggtcgcagcagaggcagtccgtgggtggcaacctcggaaggcagagtctttcgagaagttggacaagatagggcaaggtacatacagtagtgtttacaaagcacgtgatcttgagagtggaaaaattgtggcacttaagaaagttcggtttgccaacatggaccgtgagagcgtgcggttcatggcaagggaaattcacatcttaagaagacttgatcacccaaatgttattaagcttgaaggtttggtgacgtcgcgcatgtctagtagcttgtatcttgtatttgaatacatggagcatgatctagcgggacttgcagctacacctggcataaagttcacagagcctcaggtcaagtgttacatgcaacaactactctctggacttgaacactgtcataatcgtggtgttttgcatcgggatataaagggcgcaaatctcctcattgacaacaatggtgttctcaaaatagcagactttggtctagccacattctttaatcctaaccaaaagcaacatttgacaagtcgtgtggtaacattatggtaccgacctcctgaactattgctgggtgctactaactatggtgctgctgttgatctctggagtgctggttgcattcttgcggaattgctgtctgggaagcctatcatgccagggcgaacagaggtggaacaattgcacaaaatatttaagctttgtggttcacaatcagaggatttctgggctaatttgaagttgtcacgtgctacaatattcaagccacaacatccttatcgtcgatgtgtgaatgatgtatacaaggatttccctcctccggctttagcgctattggattgtttacttgctgtagaaccctcagaataggggtactgctgcttcggcccttggaagcgaattcttcacgacaaagccttatgcttgtgatccatcaagtctacctaaatatcctccaagcaaggaatatgatgctaagcttcgagacgaggaggctagaaggcaaagagcagctgcagttaaaggacatgaatctgaagctggggcgtagaaagcaacttccagccaccaaatggcaacaacgaattgcagcaacgacgggttcagcttaatcccaaaagcagcagctaataagtttattccaaaggaggatgctgtcactggctttcccaattgatcctccaggaagagctggagacaatgtttaccctcagcctgcgcctctgatgcatgctggtcgttcatcctctactctgggccgatcaagtggcactgatcagaatgctcagaggttttacacatctcaaattgctgctgctgagatgtctactgcaactggtgggcagcgaggcaatgccactaagctgtcctccaacccttggggagagtgccaggagacaatatttgagagagcatcgatctagttcaagatatagtcaacttgctgctgttgaaccctctgacagacctgaatggacacaccaattccaagaaagaccatcatcttcccaccgcaaagatgatggggcagcaaataaggaacctactgtggtgaatggcgctaagaagagcaggatccactactcaggaccattaatgcctcctggagtaaacatggaagaaatccttcgagagcacgagcggcagatccaacaagctgtacggagggcgcgcctcgacatgggaaagggcaagaatcacgtcgagagagaccagtcggaatcgcttctgtacactacccagaatggcagaccgtaggcgaaaaaaacgctcaggatcgcgattcaatgtgttgtggagcccccatttcagccatgaaaaacaatagaaagtagcgtatgtttctgcgccgtcaaagcggagaggtttctttctgctagatgttccacccattgcagtggtttggttttcaccagcaaaaggaaacctgttcctgtagagattcaccgcctgtccaagcttagcatagggcgtcgaaaatatttgctgaagatttggttgtccacagccaccaattgtatatctcgagagagtatcctccccttgaaattgattcttacacctgttttttggcagatgacaagagaaaaaataatataatggaagtacagacc

SEQ ID NO: 22523 - DNA, 1222 bp, Oryza sativa
  ref <308>: DATABASE ACCESSION NUMBER: AK072697
  ref <309>: DATABASE ENTRY DATE: 2001-12-06
ggcgtgtgtttgctgagacgccattgtcacatcggttgctgcttccttctcggaagatagcaccaccagaggtcgtcgttgggttgtaatggcggaggtgcagagcgtgcaggcgctggcgtcgtcgctggcggcgctgccgccggagttcgtgcgttccgagcacgagcggccgggggcgaccacgttccgcggcggcgacgcgccggagatcccggtgatcgacatggcggcgcccgagtccgccgcgcgcgtggcggaggcggcggcggagtgggggctcttccaggtggtgaaccacggcgtgcccgccgcggcggtggcggagctgcagcgcgttgggcgcgagttcttcgcgctgccgcaggaggagaaggcgcggtacgccatggacgcgtcctccggcaagatggagggctacggcagcaagctgcagaaggacctcgagggcaagaaggcgtgggccgacttcttcttccacaacgtcgcgccgccggccatggtcaaccacgacatctggcccagccatccggctggctacagggaggcgaacgaggagtactggcagcacatgcagcggctggcgcggaagctgttcgagcacctgtcgacggcgctgggactggatggcggcgccatgtgggaggcgttcggcggcgacgagctggtgttcctgcataagatcaacttctacccgccgtgcccggagccggagctaaccctcggcgtcgcgccgcacaccgacatgagcacgttcaccgtcctcgtccccaacgacgtccagggcctccaggtattcaaggatggccactggtacgacgtcaagtacgtccccgacgccctcatcatccacatcggcgaccagatcgagattctgagcaacgggaggtacaaggcggtgctgcatcggacgacggtggacaaggacaggacgcggatgtcgtggccggtgttcgtcgagccgccgccggagcacgtcgtcgggccgcacccgcagctcgtcaccgacgggagcccggccaagtacaaggccaagaagttcaaagattaccggcactgcaagatcaataagctccccatgtaaatttgtaattgggccatggaaacatcgcccccatgacacccaagtaccaagagtgctattgctggatgtggacgctgctcaatgtgatgctagttaagttgctctgattgctaatctgctgctttctgattcgtaatc

SEQ ID NO: 22524 - DNA, 897 bp, Oryza sativa
  ref <308>: DATABASE ACCESSION NUMBER: AK099297
  ref <309>: DATABASE ENTRY DATE: 2002-08-28
ggatcttctcgcttcctcctctcttctctcttctctcttctcctcgcttccacccacccaccatcggccgtcgccctgtccaccctccaccggctgtcgcttccccccacgacgaccggctgccgcggcctcccgcctccctcccatgaccgcgtcgccgtctccttcgctcgccgccggcctccaggagctcggggccgccgtctcctccccccgtctcccaatagccggtcgccggatccggcctcgacgagtttggaggatgcggatccagcgaccgccggcgtctgcggccacctcccccgcctcctgaccgtgagccgccgccgcctgccgccggatccgacctcaacaaatttgggggacgtggatccggcagcagccgcctcccccgccgaccgaccgtcgaccgccggcgtcctcggccacctcccccgcctcctgaccgcgagccgccggatccgacctcaacaaatttggaggacacggatctggcggcagccgcctcccccgccgaccaaccgccgaccgccagcgttcgcagccacctccctcgcctcctgaccgccagccggcgccgcctgccgcctcccccgccgaccaacggccagatctggtggacgtccgccgcctccatccccaactgttggtgtctgcggctcgtccccccgaccgccgacgtcctccacatctccttcacccacaagcgccgccaccatttccgattaggttggctatattcattgctaattttcattgccaaatttcagattaggctatatcttgattgcttgtgtggatttgtagtttgttaagatgggaatcattactgtgtgatgtatattgttacataagttgtgtgatctgtgatatatattacttgtgtggaagtgctcc

SEQ ID NO: 22525 - DNA, 2423 bp, Oryza sativa
  ref <308>: DATABASE ACCESSION NUMBER: AK072698
  ref <309>: DATABASE ENTRY DATE: 2001-12-06
gatctgacacgtcactccaccaatccacttcatcggaatcatccatcacttccgctccctccgccggcttccccttcgccggaggagaggacgaaggaagggatggctcctccgggccaactgctccccttggcccgctcgctcctgcccctttccgctcctcccttcgtctccggccgccgccgccgcctccctactctggtcctcggcagggcgctacctccgcctacatggctgccgcacggccgcctctcgccggcgcatccacttccctttgcgcctccccggcgtctgtccaggccgcctcctcccgctacgtcgcttcctggggcttcgcccggcggcggagccgaggcccaggcggtgttggcggagttcgtgacgtccgagagggtgaaggtggcggcgatgctggggctggctctcgcgctctgcaacgccgaccgcgtcgtcatgtccgtcgccatcgtgccgctgtcgcaggcgtacggatggaccccgtccttcgccggcgtcgtgcagtcatccttcctttggggtttctggtgtcaccaataattggtggagcactggtcgactactatggcggaaagcgagttatggcttatggcgtggctctatggtccttggctacattcctctcccctttggcagctgctcgctctctctggttgttcctctcaactagagttctgctgggtatggcagaaggggtggcactccccagtatgacacatgtttgagttgtttctcccaccaacaatccaatgcctttccggatttccattgcttgtttttcacccttggcaaaaccattggtttacttctttcccctatcatcatgtcacgagctggaatttttggaccatttgtgatatttggattatttggatttctatgggtgttggtgtggatatctgctatatcagggactccaggtgaaaatgcacaaatatcagcacatgaactaaattatataaccaggggtcagaaattggtaaaaactcaatctggaggtgaaagattacgaaaggtccctcctttcaccaagctactctctaaatggccaacatgggctttaatttctgcaaatgctatgcatagttggggttattttgtcattctttcatggatgccagtgtatttcaaaacaatatatcatgttaatctgagagaagctgcatggtttagtgcactcccctgggtcatgatggcagttttaggctatgttgctggtgttgtatcagacaggcttatccaaaatggtacaagcatcactttgactcggaagataatgcagacaattggctttgtgggtcctggtgtggctcttcttggactaaatgcagcaaagagtccagtcatcgcttctgcttggcttactatcgctgtaggtttgaagtcctttggtcactcaggttttctagtaaatcttcaggaatgtcaaatacagctggaacatttgctgccattttaggaactgttggagcaggtttctttgtcgatcggatgggttctttccgtggatttttaatattaacatctcttctatacttcagtagcacactgttctgggatatatttgctactggagagcgtgttgattttgatggcactggctagcgcctaagagaaaatctacagtggctatcctaaaatatgatgatgggtgggagaattatgtgccatcatcttctggtatgctatgggaaagctccatgcacacaagcaaacagagttatgacgtctaccgattatggcatggtgctttccatttagtaggggtagcagtgaagaaaaaatggaaccagctactgtgatcattcgaattttcgtactatggagactggagagtccaaaatgtgagtcaaggatagctgaagcagttacacagaactaatgactggagagtccaaaatgtgagtcaaggataggtgtggtaatattagttgtagagatctgaaaatgattggcacttgacaagaattaagcttggaatcaagcacggtttgatgagggttgtcaagtttttaaatggaaagtagatggaatacgttttagtcctttatagttttatagttaatagaaaatatgactcaacagtcatagcctcatagggcaccttcgactttgtaaatgccacaacatgtggatggctttaaagatccaacgaattgcaaggattttcagtttccttctgttaaaaattagaattcccgcatggggaatagctgagagagagagagagagagagagaagtctcgttgactagccatacacgcaaatgaagggtgtgatataagggatataatggtcgaatttgccccactgtagggttgttaagtactctctttgattcacagttttatccagttcatgataaacgatcatatcaacaatttcaagatacatgttattttagt

SEQ ID NO: 22526 - DNA, 2729 bp, Oryza sativa
  ref <308>: DATABASE ACCESSION NUMBER: AK072699
  ref <309>: DATABASE ENTRY DATE: 2001-12-06
taaacaaaaaacgtagcaccagtagccgccttttccccatctccactggccgccgccggcgacatcgccggcgccgccgagctccaccgctccgatcccactccgaacagccgagctgcggtttccaaggaaccgcgggcgagccgagcccgacccgttatcagccccgtttttttaacggggcagtgtccaagtccaactccgcctcttccacgcttcggcttccatccaatcatctgcatcgtcgtcgccggcgagcgccatgaggccgacctcccgcatactggccgcgggccacctcctccgcggctcacgctcacgctacgacccctcgccggtcgccgctgccgcccccatattccggcggccgccgaccgtgccgaggcctctcccgagccctctgctcggaggcttcgggccgaattgttgggtttatcccggcgacgggaagtatgccccctttggtcgcctcagctgcttcatgtcggactccacctacccgccgcctccccgcgatgtgagaggacatgcattttccacatctgccaatgctgtggcagttgggaaatcatctgatgacaaagtgaagaaagatatctccaaaaaggatgttgatgatcagatagcagatacacagatactgaaaaaccttgggaaatacttattgttgaatgatagcccggatttccgcttcaggcttatattgtcattgggcctcttagttggggcaaaggttataaatgttcaagtgcctttcttgtttaagcttgctgtcgattggcttgcagcccttgctggtgctgaaacttcacttgcatcattcacagaggctaatgctaccctattggctctctttgcaagcccagcagctgttctgattggatatggaattgcacgatcgggagtatcagcctgtacagaactgcgaaatgctgtcttttctaaagtgacattgagagccatccgttcagtctccagtacggtattttcgcacttgcatgagcttgatcttcgttatcatctaagccggcaaactggtgccctaaatcgcataattgatcgaggtagtcgtgcgataaattacatccttacagtgatggtgttcaatgttgttcccacaatattggagattggtatggtgtcaagtatacttgcatacaaatttggttccacctttgcttggattacttcagtttctgttgctacttatattgctttcaccttggctgtgacgcagtggcggaccaaattcaggacagccatgaataaagctgataacgcttctagcacagtggcagttgactcccttctgaactatgagactgtcaagtacttcaacaatgaacaatttgaagttgagaagtatgacaaatattttaaagaagtatgaggatgctgcactgaaaacccaaagtagccttgcctacctgaactttggacaaaatatcatatttagctcggctttatccacggctatggttttgagttcatacggtgtaatgagtggtgctctgactgtcggtgatttggttatggttaatggtcttctattccaactttctttgcctctgaacttccttggaagtgtctatcgagaatctaggcaaagcctgattgacatgaagtctatgtttcaattgcttgaggaaaaacctggaataaaggatgaaccacatgcacagcctttgcagttcaagggaggacgcattgaatttgagaacgtgcattttgggtacgtaccagaaaggaagattcttaagggtgccacgttcactgtacctgcaggaaagagtgttgcaatcgttggaactagtggcagcggaaagtcaaccatacttaggcttctcttcagattttttgactcctcttcaggatctattcgaatagatgggcaagatatccgagaggtgacactggatagtctccggaagtgtattggtgttgtaccgcaagatacggtactttttaatgacaccattaagcataatatacaatatgggcggttatcagcaacagatgaggaggtttatgacgttgccccgccgggctgctattcatgatacaattatgaactttcctgacaagtacaacacagttgtgggagagcgaggattaaagttaagcggtggggagaaacaacgagtatcaattgctcgtgtattcttgaaggaaccttccattctattgtgtgatgaagctacaagcgctcttgataccaccaccgaagcgtcaattttaaattctctgaagactttgtccgttgaccgtacctctatctttattgcacatcgactgacaactgcaatgcaatgtgatgagattattgttttggagaatggggaggtagtggaacaaggaccacatgattttctgctgtcaaagggtggccgatatgctgaattgtggtcacagcagaataacagtgatgccatcgatgctgccgcggttagcttagaggtttcatagactatatacataattcccttttgcaagggaaaatgcaaaccatatttgaatgaaagaaggcttccccatatctgcattgtaaattgaatggttaggtttttagatatcggggaacagaaatttatagcttaggagcaaataactccgtttgaaagaaagccaggaggcaaaattttcctctttgaggaaacacccaacagttcgacatgtttccatgatgtaagcattttttttactaatccaagtaaatattttttcccacc

SEQ ID NO: 22527 - DNA, 2411 bp, Oryza sativa
  ref <308>: DATABASE ACCESSION NUMBER: AK072700
  ref <309>: DATABASE ENTRY DATE: 2001-12-06
gaagcgcaaagtaccggttggctcctactctggtttctggcttctgggacggcctcgagtccgccgctgtctgtctccacctttgccccccatcctaaaatttcgaacgcagccatggccgcatagcccttcgccccaagttcaaacacctcgctctctctctctctctctctgcccgtacactcggcgcatcgcctcctcaggcggcaacagcggcggcggcggcgatggagttccagcagggcggcgggggcggttgcggtggcggcaaggcgcgggacaagttctcggtctaccggaacccgtccctcgcccgcgcgctcgcctcccgcagcgtccgcccctccctcccggtcctcgtcctcctggcgctgtcccccatcgcctccccctcctccatcctcggtcctctcctcctgggaagggcagctcgtgaaggtcgcatggccgcgtggggcctctccgtggctgctgccgagcttgtctttaggttgattgaggcagccctgggtctggtcgcactttttacactgccggctttcttcagggcggtgatgctctacaatgggaagagggcacttgcccaaagaggacaaggttgtgttatctgaacgccaactggggcttctcgggttaaagatgacaggttcagaagcaggtggcaccagtgagaaaaccaaaaggcctcccaaggcaaagccatcgactccgtcagagccaattgttccgattaggaggtcttcgttcagctatacgccatctcggtctttagggcaatcaaggattggttccagcaatttgagccctggtggtgagagactgaccacatcagtgcaaatatcaccttccactccactacaaaagcctatttcttcaccttcaaccccatggtctaggaaaagctcaggcagtgcgaagggcatacagacagaggcgatgttggagcagttcttggctggtttggacgaaaatattgacacaatcacagattcagccagtaagattgcaacacctcccgcaaccattacgagctttggtgctgcaagccctgtatcagtcattacatcaaccaccccttctggtgctgcaagaagcacacctttgagggctgtgaggatgtctcctggctcccatcagaagtacagcacgccaccaaaaaaaggcgagggtgagcttccacctccaatgtcattagagcaggcagtgaatgcctttgaaaatttgggtgtataccctgagattgagcaatggcgagataatctcaggcagtggttctcttctgttttgatgaacccacttgtccaaaagatcaaaactagccatattcaggttaagcaaacaaccgctactgttggggcttcagttactgttagccaggttggaagtgatcttccaagcacaacagcgccggttggcttatctccacttggtgggactaaagattggcaaccgactatcacggttgatgaagatggcattcttaatcaattgcgcactgcacttctgcattcccgtgatacgcctgttgcacaaacctttggcagtccacaacaaccacaacagaatcccctccttccgtctattcaagcatgtattgatgcaattacggagcaccagaggcttaacacactgatgaagggagagctgataaaaggcttgctaccacagagtagtgtccatgctgattacactgttaagagagttcaagaacttgctgaaggaacatgcttgaagaattatgattatatgggtcatggagatggttgcggtaaattggagaaaaagtggatcagtgaactgccaactgactcgctccttcttctgtacttgtttgctgctttcctcgaacacccaaaatggatgcttcatgttgatcctacctcttactctggtgcccaatctagcaaaaatcctttatttctaggagttcttccaccaaaagagaggtttccagagaagtatgttgctttgatttccggcgttccagcagttattcacccaggtgctcttatactggctgtgggcaagcagagtcctccgatttttgctctgtactgggacaaaaagttgcagttttctcttcagggaagaacggcattgtgggatgctatcttgcttctgtgccaccaaataaatgttggttatggcggtgtagttaggggaatccacataggttcttccgccttgaacatcctgtcagttcttgattcagacatggaaagctgaaggactgcgtgctgcttgcctgatatcacatcagcaggagctaaagatggttttgtagtttgtactttgaggagataaattatgatcagccagttgctgaatgtaaactaacaccagcatgcttcgaactaacctactgttagatctgatttgtcctggtgaagtgacagctgaatttgtgcccc

SEQ ID NO: 22528 - DNA, 1559 bp, Oryza sativa
  ref <308>: DATABASE ACCESSION NUMBER: AK072701
  ref <309>: DATABASE ENTRY DATE: 2001-12-06
gagctcaaaaccccgcaacaacccaaccctcgtgaccaacccatctccccaccaaccccggccgccgccatgaccggcgccgtctccaagctcgccgccccgaggccggcggccgccgcgccgctcccgccggcgtccgtccgctccgcgttcctcgcctccgccccctccccgcgccgcttctccgtctccatcgccgccggccgcgccaggagccccatcattgcgatggcttctgccaaggaaggaaatggtgccccaacgaagaggacaacccttcatgatctctatgatctccagggtcagtccccgtggtacgacaacctctgccgtcctgtcaccgatttgctgccccttattggcagcggcgtccgtggagtcaccagcaacccatcaattttccagaaagccatctcgacttccaatgcatacgatgaccagttcaagcagcttatattagctggaaaggacgcagagagcgcttattgggaacttgtcatcaaggatatccaagatgcgtgcaaactttttgagcctatctacgaccagaccgatggggcagatgggtatgtttctgtggaggtctcccctaggctggcaaatgatacccagggaactgttgaagctgcaaaatggttgcacaaagtggtcgacaggcccaatgtctacataaagatccctgctaccgcagaatgtgttccttctatcaaggaagttattgctaatggcattagtgtcaacgtcacacttatcttctcgattgcaagatacgaggctgtgattgatgcttacattgatggacttgaggcctctggtttgagtgacctatcccgagtgaccagtgtagcgtccttctttgtcagccgagttgacacacttattgacaaaatgctcgagaagatcggaacacctgaggcacttgccctcagaggaaaggctgctgtagcacaggcaaagctagccaaccagctttaccagaagaaattctctggcccgaggtgggaggctttggtcaagaaaggtgccaagaagcagaggttgttgtgggcatctaccagtgtgaagaaccctgcatacccagacactctttacgtggatcctctcatcggacctgacaccgtttctaccatgcccgaccaagctctgctggcattcatcgaccacggcacagtttcgaggacaatcgacgcaaacgtttcggatgctgaaggtgtatacagtgccctggagaagctgggtatagattgggatgaggttggcaagcagctagagctggaaggtgtggactccttcaagaaggccttcgacagcctgcttgggagcttggaggagaagggcaattccctcaagaagaccgtgagcctgtaggtgcaaagatagctgaaatgttttgaacgctggcaatggcaagtgaacgattactaaataaatgctctaccttgctggctctctccctctctcaaactctcttgtgatgtgctgctctcgaatttctgggtcagcttttgtattctaggcgctcttggctgctatttgtgtaactgaggttgcgaactgct

SEQ ID NO: 22529 - DNA, 2529 bp, Oryza sativa
  ref <308>: DATABASE ACCESSION NUMBER: AK072702
  ref <309>: DATABASE ENTRY DATE: 2001-12-06
gagttcaccaacaggaagctaaacaatatacgatgtggaagctaaagtttggtgagggggcaagcaacccactgctccgctccagcaacggcttcctcggccgggagacgtgggagttcgaccccaacggcggctcgccggaggagcacgccgtggtcgagaggctccgccgcgacttcacccgcaaccgcttcacacagagggagtgcagcgacctcctgatgaggatgcagtttgcaaaagagaaccaagtttacagtaaacatgaagtaagcaatcttaaagacagttcagaagtcacagaagaagttctattaacgtctttaagacgtgttcttgatcaatattcctctttgcaagcaccagatgggtattggcctggtggttacagcgggattttgttcattctgccgctcatgatatttgccttacatgtgactaagtcactaaacgatgtcttatcatctgagcatatacgtgagatatgccgctacatctacaacattcagaatgaagatgggggttggagtacacatactttaggcccaagctccatgtttggctcatgtgttaactatgctaccttaaggctcttaggggaggtactggatgaacacaatgatggattatcaaaagggcgtgcctggattctgtctcatggcagtgcaactgtagcaccacaatgggcaaagatatatctctcggtaattggtgtttacgattggtcagggaacaatccaattattccagaactatggttgcttccacattttcttcccattcatccaggaagattttggtgcttttgccggatggtttatatgccaatgtcttatatatatgcaaaaagatttattgggccaataactccaactatactggcactaagagaagagctctatgatgtaccatacaacaagatcaattggaacaatgctcgcatttcttgttgcaaggacgacattatttatcctccttcgtggttccaaaacattgctatggcttctttacataaatttatggaaccactatttaatatgtggccaatgaacaagctaagaaaaagagctttgaccaacctcatggatcatattcactatgaagatgaaaacagcaattatgtgggtttatgcccaattaacaaggtattaaatatgatttgctgctggatagaaaatccgaactccaatgcattcagacgacacgttccaaggattcatgatttcctatggcttgcagaagatggaatgaagtcaaaggtgtacgttggtagccggtgctgggatactgcccttatagttcaggcctactgctcaaccggccttacccaagaatttagtgaaactatcaagaaagctcatgattttataaagaatgcgcaggtaaccaagaattgtcctaattacaaaagatattaccgtgaaaggtcaaaaggttcatggacattatcaaatggagaaaatggatggcctattgcggatactcttgccgaatgccttaaggcggtgttgttgttatcaaagattccaccaacccaagtaggagatccaattcaagaacaaaggttgtatgatgctattgactgcctactttcatatgtgaacaaggatggcactttgtcctctgcagaatctaagagaacaactccatgggtggagttcatcaacccttccgagagtttccggaacataattgtggattacccgtacgtggaatgcacatcatcactaattcaagccttgatactgtttaaaggcgttcatcctggataccgccgtgaagagatagatagaattatcaaaaatggtgtgttgttcatcgagaaaaaacaaaaaaatgatggatcgtggtatggatcttgggctgtctgttttacttatgctaccttctttgctataaaaggactggttgcggcaggaagaacattccaaaacagtttgtctattaggaaggcatgcaacttcttgctgtcaaagcagctaagtactggtggatggggagaggattacctcggttgtcaagttgaggagtatattgacagtgggaggcctcatgtagttcacactgcgtggggaatgttgggcttaatatatgctggacaggttgaattagatccagcaccattataccgtgcggccaaagaattaatcaacatgcagctggagacaggagaatttccacaacaagaaattcttgggagcttcaattcctccctcttcttcaattacacaaactacaggaacttgttcccaatctgggccctaggagagtttcaccgccgacttctagcaaaaagggcttaaaggaatccctcattacctacatatattgtacttcatctaaaaataatcagacatgtattgtaataaacgtatccaccatagctcaaaagatcttgctatcgactatccaagttgaatattcaatttttattttttggagtaagcaggagaactgcatgtcattgcattgtgaagaagaaaaaaaatatttacaatagattttaaaatgctgaaaattatgacaagc

SEQ ID NO: 22530 - DNA, 1125 bp, Oryza sativa
  ref <308>: DATABASE ACCESSION NUMBER: AK072703
  ref <309>: DATABASE ENTRY DATE: 2001-12-06
gcctcccttttttctcttcttcccctcccgcaaccctaattttttttccccatccgcgaaaccctagccgccacgcgaaaccaaatcccgccgcgcgggatccttttccgccggattccacccgcgaatcggggttccccttacgattcgcgggcggattagcgcgaggcgcgcctccccctacctctgtgtgatccgggggtgaggttaggccggacgccggggcatcagccatgtcgaggtgcttcccctacccgccgccggggtacgtgcgaaacccagtggtggccgtggccgcggccgaagcgcaggcgaccactaaggtttgttgaaccatcggatttacacacgcacgtgccggatcatttgctcttgcctgttggttttgatcggatctgttggttgtgcgtgtgtgatttggggatcgcacgtgcggggaagctaacctttgcatggataacttgagatttgtgaggccgcgcttcgaccagatcggtcgccaatcttttagtggctgaccgtggaaagaggatattactgaccttcggtttgctaattttggttgtgccgttgaatctgaaataaccagaatagtcatggggaaaaaagtctgatctggaaggttcgaattacatttctatatattgttgtgctcccagacgatggttgcaagaaatcactcatgctggataaaattgtggatgtaagagtctgcagtcgttaaaatctggaaacagcacattttgccgtagtaaatttgaatccatgttgctgtctcgttattggtgtgttacgagtaacctgtgtgttgttatctccgcttggactagattccaagtaatccagtgccttcatgacctgcaaattctatgcctatgaagtaacatgaacagtttgtatgtatgtattctgttgatgcatacttgcattatttgtgagatgtacatgttgtggtaaaattttgcattcaccatatagaaatagtaactgactatccttgtttagttcgaaaactactgcaggtttagttattctctgttgccaagagtgcttgttatgattgtaagggttacagttctgtgactaaccatgtaacaaatatattaaggattatcaaattattct

SEQ ID NO: 22531 - DNA, 1570 bp, Oryza sativa
  ref <308>: DATABASE ACCESSION NUMBER: AK072704
  ref <309>: DATABASE ENTRY DATE: 2001-12-06
gaggcacgcacagggaagcaatagcaacgaattcaaccaaccaaccaaccaacccttctgctgcttcaatcgatcggcaacaaatctttctgggtggtctggtgctcaactcccccatcgccattttatgcccgaacctgtttctccagccaatttgatgaggattaatttccaaacgggctccgatcgatctccatgattaaccatccggcgtggtgatgagccgccgccgccgcatcgtcgtcgtctcccgatgcatcgccaggacgtgaggacgaaggaggccgaggaggagaggatggaggagaacaatctcctgcattttctagatagcccaaacgcgcattacagaaggaaatgtgaagaatacgtatccgcgcatgatgatgaagcccattgcgatgcatcagatgtagatctggccaatgcaagggaaagattggagcatctgttgaaacaacctgccaacaagttctgtgcagactgtggtacccctgatccaaaatgggcggccttgccttttggtgcgttgatttgcataaagtgctctggaactcatagaagtcttggagtacacatatcaaaggtaatttccgtgaatctagacgaatggacagatgaagaggtcaattgtttagctggttcaggtggaaatgctacggtgaacacaagatatgaggcctttttgccagagaactttaaaaagcccagacatgattgcacaacagaggagcgttgcaatttcattaggaaaaagtacgagtttcaacagtttgtgactgatccacagttttcatgccctttacgattgaataccaaacacgcaccagacaagaatcagcagcagcaaaactgcagtgcgcgacatggttttggccatgcttttaggaatagctggaagagaaaggacacagataacaaaggactaaagaaaatgacggatgtgggtatggtggaatttgttggattaattaaggttgatattagacggggcacaaatcttgctgttcgtgatgtgatgtcaagtgatccatatgttatgcttaacctaggacaccaaaccatgaaaacgaaggtgataaagaacaccctgaatcctgtatggaatgaaagactaatgctatcgatccctcacccggtgccgcctcttaaattgcaagtgttcgacaaggacacgttcagctccgacgaccggatgggcgatgtggaggtggacatccagccgctgatcgccgcggcgcgagaacacgagagctcggccgccatcgccggctcggtggaggtcacgaagctgctggcgagcgacgacggcacgctggccagggacagcgtcatctccgtcgtcgacggcaaggtgaagcaggacatcgcgctgaggctccagaacgtggagcacggggagctggagatcgagctcgagtgcgtgccgctcagccagtagtatagctatagctgctgtacacattttattgctactatagctggccgggatgaaaaatgctcgatctgcattcgctgtgggttgtgtgatcatatgcatggagcttaatttgcttctgtgttttactcc

SEQ ID NO: 22532 - DNA, 1853 bp, Oryza sativa
  ref <308>: DATABASE ACCESSION NUMBER: AK072705
  ref <309>: DATABASE ENTRY DATE: 2001-12-06
gagtaatacacatagtagtaggagtaggtgggctgtagtcatctctgctgccaccgtcgtctcgtgccttgcatgtttccgaatctctctgttactctcctacgcgtttgcttcaagctttgaccgagaagcaccaatccagctacatgttcttgacctgttcttcttcttcctgcctctgtatggtgttttgaatggtcagatttggtcttcgtcatgaacagaagctgagatctttggtgcaggatcctcacctccggttctgaaagaacccctgtttcccagttttgaagatacctgaacaatgaagccacctttggagaggaaccctaccaagaagcgccactcgtggtggtgggacagtcacattagccctaagaactctaaatggcttgcagaaaatcttgaagaaatggacaagcaagtgaaggaaatgctgcagcttattgaggaggatggcgattccttcgcgaagaaagcgcagatgtactaccagaggcgtccaatgctcatcacccatgttgaaaatttctaccggatgtaccgtgctctagctgagcgatacgacaatgtcactggtgaattgcgcaagaacatccctacaaggctgcagtatcagggatccttggcaggttcagactctgagctgcagaggtcaccctcaccatctcctgaaccacagaagtcctggacaagggagcagagcccaagggccgccggtttcgacgtcttcctgtccaacaagagcaatggctcaccctcaccggcctcaaggaaggagcctgaggatttggcttcacagtcagaatctgatgcaaagtctgaagatggtgaggatgatggcattgcctacacattgcaccagagagttcttgagcttgaggatgagctcaacaccgtgaaccagaaactgcacgacgcaaatgaaaaacttgaggttctggaagagaagcgcttgaggtgccatcgtgattctaaagaaaatggaaacggtgctgatcaaagtgcaataaatgagaagctacagtcttcacaagaggagattaacaatatcaaaaacagccttgaagttttgtcggaagagcactctaggctgttgggacagaacaagaaactggaggctgaaattgtcaatctgaaggaagaaattgcttcagatagacagcaatatgaagagaagctctctcgtagtgatgctgaaattgacaagtgcaggcaagaacttgctgatgcttctgagaagttgctgcaagagaagttgagcaacagttcggtggcagctgagctgcaagaaacgattgaaagcatcaggatcaaacttgaagaagtttctgaggagaaattacttgttgagaacaagtttaagcagctggaggaagcaaactctgaagctgaaaagtacaaccaagaactgtcacatgctaccgagaagctttcagaggagaagttcagacacgaggctgagattcttgcattgaatcaggccattgaaaatctgaaatccaaactggagagcattgctaaggagaaatcgttgcttaaatcatggtttgctgacctagagcaagtcgtggagcgaggaaggagaattttccccgaatagccggaattccgtcagaaaaaatcatagcttgcatttagcgaattagaacttttttttcttcttctaatacaccatgatacacacttgagaagtcctaccatgcatcagcattgtacttttcctgtctgattcttttccttgctgaggcgatgcatggtggtgatgtgctgattgcctgcgagtcttttgcgcggaacgtatttccctcggcaataaaatggttctaaatccatgtaacttgtatatgagc

SEQ ID NO: 22533 - DNA, 2491 bp, Oryza sativa
  ref <308>: DATABASE ACCESSION NUMBER: AK072706
  ref <309>: DATABASE ENTRY DATE: 2001-12-06
gatcaggaaggatggtcggtggcttcgacaaactgaaagtggagttcatcgaccaagatgagagtgtgcaggtcgttgcagacaccatcagaagctccggtgagattcctgaaaggtatgccaggcctgagatggaggccgatcctgtcatcatcgacaccgatggttacaatctgccggtaatagatatgtcaaggttgatcaatcctgagttctccgaggaggagattgccaagctcggatcagcctgtgaggattggggattcttccagcttgtgaaccatggggtggatggggagttgctgcaacggatcaaggatgacatcacagagttcttcagacttcctctgcaggagaagatgtccgtggcgatcccacccaatggcttgcaggggttcggtcaccacttcgtcttctccaaggagcagaagctggactgggtcgatttgctcttcctcaccacacgcccagtggaggacaggaccacagagttctggcctacaaagcctcccacattcagggactcacttgacaagtactcgctggagattgcaaatgtgtctgctaagctgttcaagttcatggccatcaacctgggcgtcgacgaggaggcactccttgcagcattcaagccagagcaacctcagagtgtaaggatcaaccattacccaccctgcagtcaggctaacaaggtgctgggcctctcgccgcacacggatggcgtcggcatgacactgctcctccaagtgaacgacgtgcaagggctccagatcaggaaggacggcaggtggttcgccgtgaagaacctccctggagccctcgtcgtcaatgtcggcgacgttcttgagatcctcaccaatggcaagtacaagagtattgagcacagagcagtaataaaccctgataaggaaaggatcacacttgctgcattccagagcgttccgctttccagcacagttggcccactccaggagcttctgatgaaaggtgaggcacgctacaagacggttgatggtgctgagttcaccaaaggctactttgccgcgaagctggaaggcaggagatacctggagagcttgaagctgggagtgtgaatgtgtcaggatgagtagtttttgcttctctttgattcttttgtttcggtgaatggataacgatgctacatcttcctcatcctggtacaattcagctggtattttccttgaccatacactcaactggagtattagtgcccatgagctaacggcacagagaacaatggaacatatggtagaactggctggcaggtatgatgtccgagattgcgtacaacacgcagttccttgggatccatttcatatgccagtaaagtattgtccaatccataatgaaagaagatcaaattgcactctggatgaactgcaattacctggtaaccacgatcaaattcgtatttcttcactccaaagagctccaaggtgctaacagtacgctttaagatccaattatctgtattatagtcttcaaggacccaaagtgacagattgaagatatcaagcgggtcaacattaagagcacataggtgaccctgagtacgatcaatcatgggagcaccatgaccaccactatccggcataggaattatcttccatctcttcccctccatgtcaaccgccacaatctcatttcttacagcaacaaaatgcataaaaccattaaggaacacacctctcgggccaccataactaactccaacaccatgattccatccactctcatggagattccataacccagttttggacgaatagatccccaccgctgtgatgcacccatctggaccctccaaatactcgagcacatggaaatgcgaggagatggctgggtcaaaacccaagcaggcaatggggtggtcttcaagataagatgagtcagaagcccagttggcctttggtaacatcacccacttcttggtcacaggattgcacacggcgtaatggaacggtgcattcccatcactatcgcaagggccagactggaagcagcggaagaggaggaggccattgcaggagtccaaggggaagagatcgttgcactcgcccaggaaggagaaggatggttagatgagaggtacccctttcccagagacgttggtgaagcggtacaccaaggaaggccagcactccttgttgaaagttgtgtagaagaagccggatagcatctggggcagcttctagcggtgctcatggtcggcgatgaggttgcgccaggaccggcagacgcacttgaagcggcacacagagcgaatggggaggcggcggaggatctcgatgacgagatcgtcggtgaggcggcctcaccgggttccgctcaccggggagattctccatcaggtgaagctgcggagaacgttagcctgcaatgcatgaagaaggattggtcggcaaaagcaggtcgaacaggtaaacgcattgagcagatggggattaatcaaagaaaacatcgaaatgac

SEQ ID NO: 22534 - DNA, 1329 bp, Oryza sativa
  ref <308>: DATABASE ACCESSION NUMBER: AK072707
  ref <309>: DATABASE ENTRY DATE: 2001-12-06
ttggcgacacctagcccttctcgatctctctctcgctgcagatccaaaccaacctcaccgtcgacgaggaagaaggcggcggcggcggcggaggcgaaggcggcgaagatgcagtacaagaacctggggaggtcggggctgcgggtgagccagctgtcgtacggggcgtgggtgacgttcggcaaccagctggacgtgaaggaggcgaaggcgctgctccaggcgtgccgcgacgccggcgtgaacttcttcgacaacgccgaggtgtacgcgaacgggcgcgccgaggagatcatggggcaggcgatgcgggacctcgggtggcgccgctccgacgtcgtcgtctccaccaagctcttctggggagggcagggccccaacgacaagggcctctcccggaagcacatcgtcgagggcctccgcggctcgctcaagcgcctcgacatggactacgtcgacgtcgtctactgccaccgccccgacgccaccacccccgtcgaggagaccgtgcgcgccatgaactgggtcatcgaccacggcatggccttctactggggcacctccgagtggtccgcccagcagatcaccgaggcgtggagcgtcgccaaccgcctcgacctcgtcggacccatcgtcgaacagcctgagtacaacctcttctcgcgccacaaggtggaatctgagttcttacctctttacagcacgtatggcctgggtttgactacatggagccctctagcttcgggagttctcactggaaagtatgccaaaggaaatatacctgctgatagtaggtttgccctagaaaattacaagaacctggccaacagatctctggttgacgacacactgagaaaggtgaatgggctaaaaccaattgcttctgagcttggtgtttcgttagcccaacttgctatcgcgtggtgcgcatcgaacccaaacgtctcatctgtgatcactggagccacaaaagaaaaccagattgttgaaaacatgaaggccctcgatgtcattccgctgctaaccccagaagtcgtcgacaagatcgaagcggtggtccaaagcaagccgaagcgcaccgagtcatacagatgaagcggtacagggggtgtgcagagtgtgctccagggatttcaggatttacccggtgggattcttttagacgatattattatcttccattgtcttatgtttggaagctgctttatgtgcctgggtttgtgtagttgggaaatggtgtccagtggtactctgctctatatacattttgtcatgtggaccactcacttgttgctgtcggtgatatatataccttggtcttttccgtgt

SEQ ID NO: 22535 - DNA, 1503 bp, Oryza sativa
  ref <308>: DATABASE ACCESSION NUMBER: AK072708
  ref <309>: DATABASE ENTRY DATE: 2001-12-06
cgccggagagagaagcaccggcggtcaataattaaaaaaaaaagaaaaaaatggctttcagaaaccatgacgctgccatggtcctcttcttcttcctcctcatggtgactacctacgccaacgcgcacggacacagcaagaagcccgaggagatcactcagggcgtttacggggcggcggcggcggtggcggccggccccggcggcacgttcgacatcaccaagctcggcgccgtcggcaacggcagggcggacagcaccggcgcggtgatggcggcgtggaggtcggcgtgcgccggcgccgggaagcagacgatcctgatccccaagggggatttcatgacgggggcgatggagctcaggggcccctgcaatggcgccgtgaccatccagctcgacggcaacctgctgggctccaacgacctcagcaagtacccgggcaagaagatgcccaactgggtcgaggtccgccatgtcgacaacttcgtcatctccggcaagggcaagctcgacggccagggccccggcgtctggagcaagaactcctgcgccaagaactacaactgcaagctcctccccaacacgctggtgctgaacacggtgaacgacggggtggtgagcgggatcacgctgctgaacgccaagttcttccacatgaacatctaccggtgcaaggacataaagatcagcggcgtgaccatcaacgccccgggggacagccccaacaccgacggcatccacatgggcgactcctccaagatcaccatcgccgccaccaccatcggcaccggcgacgactgcatctccatcggccccggcaccgacggcgtcaacatcaccggcgtcacctgcggccccggccacggcatcagcatcggcagcctcggccggtacaaggacgagcgggacgtccgggacgtctccgtcacccgctgcgtcctccgcaagaccaccaatggcctccggatcaagtcgtacgaggactccgtgtcgccggtgaccgtgtccaaggtgtcctacgacggcgtcgtcatggaccacgtcgacaaccccatcatcatcgaccagaagtactgccccaacagcatctgcaccagcaagggcgactccaaggtgtccgtcagggacgtcaccttcaggaacatcaccgggtcgtccaacacgccggcggtcgtccagctgctctgctccggcaagctgccgtgcagcggcgtcgcgatgcaggacgtcagggtgctgtacggcggcagcgacaagaagaccacggccgtctgcgaccacgcgctggggaagtccaccgggtgcctcaaggagctcgcttgcctctaatggattattaattcgatcatcatcgatctctttgtgtgtgttcatcgtgtttaagagacagatcgaggtttggagagcatatggatgtatccgcgtgtgttccttgattttgatcttccaagttaatgtccatatcctttctttctgtaaaattaagacccaaagctgcctcctc

SEQ ID NO: 22536 - DNA, 1950 bp, Oryza sativa
  ref <308>: DATABASE ACCESSION NUMBER: AK072709
  ref <309>: DATABASE ENTRY DATE: 2001-12-06
ggcgcgcagaggcgtaggcgagcgagcaaacgacacggcacgacagtacggcaccaaaccccaaccccaacaccggtcgcgctcgcgtcgcaccgccccggcagccaagagagagaagcccaggaaaggccaaggtgatcgacgagcgcacgcacgcacgcacgcggcgccgtcagaaggccagagcggggggagaggggaggaggggctaaatcggggagaggtctccgtcatctccgactcgcggcgcggccccctcgccgagaccgacgggccgacgcaaccgaggcgagccagcgatcgagcgggcggggggcaacgcgtacaaaaaaaaccccctccccttcccttcccttccctctcggtcgcgtcgtcgcgtggtcggcgaatattcgagcggcaacggcataacaccattgtcgcccgggacgcgcgctctttctctctctctctctcttcctggcgatggcggcggcggcgggggaggaggtggaggcggcgcggtgggcggaggcggaggacgagaggaaggaggggctgcggcggcggcggaggtacgggcttgtggagtaccgggcgctgccgggctacatgcgggacaacgagtacatcctgcgccactaccgctgcgagtggccgctcccgcaggtgctcctctccgccttctccatccacaacgagaccctcaacgtctggacgcacttgataggatttttcatctttcttgttcttaccatatacaccgcaacacaagttccaaatgtagtagatcttcaaagtctgcagcatttacctgatgtgctgagaaacgctgatcttcataagattcagacagaacttgtggcatgccttccttcgttacctcacctttctgacttgcaaaagctgaaggatgaattgaaaagctcatggaattcaattgaggtgcttccatcattgtcccgttggcacctcttggagttactatcaagttgcttgccgcacagatttactcattccaatgaaaccagtctgtctgttcttcaaagcatgaaggaagatatagcaaacatgattgcgccacagttgattaggccaattccgagatggccattttatgccttcttgggaggagcaatgttttgccttcttgccagcagcacatgccatcttctctcctgccactcccgtcgccttgcatacattatgcttcgccttgattatgcaggcattgctgctcttatcgcaacatcattctaccctccagtatactattctttcatgtgctatccattcttttgcaacctgtatctcagctgcataactattttaggagtggcaactattgctttctctttactccctgttttccagaaccctgagtttcggaccatacgagcatgcctcttctttggcatgggtgcatccggcgtgatccctgtcattcacaaattgatcctcttttggcaccaaccagaggcattgcacactaccgcatatgaggttctgatgggccttttctatggcattggggcactggtgtatgcaactcgggtgcccgagcgctggatgcctggaaaatttgacattgctggtcatagccaccagctttttcatgtgttagttgttgctggagcatacacacactatcattctggactggtatacctcaagtggagagacgtgcaaggctgctagaaattatctgtgtgctcgtaggatgtggatagattgtaggtgccctgcttgtgtcccgaaaaagaggaccgctgattctctctcgtcttcagaaacaaaagatgactgttgttgttggccaaaagactagacctggtctgttgtaaaatgtaacggaggacttgctagtactgtgagatacaaattgataatgagtgatgatcggtacctgtaaactgtggtgtggtattggctgatttttcagggtgcaactcacttgataaatcaggccct

SEQ ID NO: 22537 - DNA, 2323 bp, Oryza sativa
  ref <308>: DATABASE ACCESSION NUMBER: AK072710
  ref <309>: DATABASE ENTRY DATE: 2001-12-06
gggcgaccagacgaaaagcacaccaattccgtctcctcctcctccaccaccttctctctactcctcctaccttctcgccgtagcgtagctagctagagcctagagcggaggagcatatcctccgagatcaccggagaagaggcagcagcagcagggcgccgcgccggcgatgaggtggacggcgttcatgtgggagggcgcgtcgagggcgttcaaccaccgccccaccttcaccaacctcgtcctcgtcctcggcgccgccagtagtggaggactagtagcatatgcggattccaattcagatgatgttgttgggaagccccagggacctccaaagaagaaaatcgttgttcttggcaccggttggggtggcaccacgttcctgaggaatcttgacagcagactgtatgatgttcaggtcatttcacctcggaattatttcgcattcacgcccctgctcccaagtgtcacttgtgggacagttgagccaaggagcgttgttgagccgattcgtaggattttggagaagaaaggtggagatatcaaattctgggaagcagaatgctttaagattgattcatcaaacaagaagatccattgccggtccaatatagggacaaatcttgatggaaatggcgaattcttggttgactacgactatcttgtgatagcagttggagctaggtctaatacatttaacactccaggtgttgaggagaattgcttctttttgaaggaagtagaggatgcccaaaagatccgaaggaatgtgatggactgcttcgagagagcaagtcttccttacctggatgaagaagagaggaagaagaaccttcactttgttgttgtaggtggtggacctacaggcgtggaatttgccgcagagttgcacgattttgttaccgaagatctatccaagctgtatccttctattcagcaccttgtcaagatatcactgattgaagctgcagatcacatactgactatgtttgacaagaggattactgaatttgctgaggataagtttggaagggatggcattgatgtgaaaactggatacaaagttgtgaaggttgctaaggatgcaattaccatgcaaaatccagccactggagatatcgcggttccttatggaatggctgtttggtccactggtattggtacccggcccttcatttcagagttcatgaaacaaattgggcaggtacctagcaagaaactcagctcgactctttgtagctagctgagttatccatctaattctccgtctacatttgcagggcaaacggcgtgtactagccactgatgaatggctaagggtccgtgaatgtgatggtgtttatgctgtaggagattgtgctacgataaaccagcggagagtaatggatgatatctcggaaatattcagagtagcagataaagataactctggaaccttgacagtgaaagaaatccaagatgtcttggatgatatctacgtgagatatccccaggtagagctctatctgaagagcaggcaaatgaatggaatcgctgatttagtaaggactgccaaaggtgatgctgaaaaggaatctgtagaactgaacattgaagaatttaagaaagctctttctcttgttgattcgcaagtcaaaaatctgcctgcaactgctcaggttgcttcacagcagggacaatatttggctaggtgcttcaataagatgaaggatgctgaagaaaaccctgaaggccccatccgtataaggggagaaggacgccatcgtttccgccctttcaggtacaggcatttaggccaatttgccccactaggaggtgagcagactgctgcacagctccctggtgattggatctccattggccacagcacacagtggctctggtattctgtctacgcaactaaacaaataagctggcgcacgagggcactggtgatctctgactggagccgtcgctttatcttcggtagggactcaagttgcatatagtcaagaaggaaaatattttgttgtgacatattcatcagaagctaagtgcatcagtagtgcctgcctcccactcgagtttgtttctgcaaatatatattctttttggttaggaaagaataaaagttaccctttttttttcttacatagtgcaccacggaggaaaaattccctttgtacctttcttttgaagagtgttgtacttttgcggcatgagcaaacctgcagattctttagtagtttctttaccttaaaagataagcaaaagaaaaccactttggacctgacctctttttgttactgtcaaatcttgtttaaatgagttctgttatctttcc

SEQ ID NO: 22538 - DNA, 1147 bp, Oryza sativa
  ref <308>: DATABASE ACCESSION NUMBER: AK072711
  ref <309>: DATABASE ENTRY DATE: 2001-12-06
gagggttaaattcaaacaattctcatttttcaaatgtttcaagacctgccattctcctactcctcttgctcatcttttccctctctttccagctccaactcctctaatcctaactcaaacacctttcaatctatctctcaaagtacacttttcttctctcaacatgaatcaaaatcccttataaatcaaagcctatcattccaaaataattctgcacctataagggagagaccttttaagctccaaaccaatcgaacctttctcataagcagcccagatagagaagagtctcaaggaatctcacttccaggctcgcctcttttgacgacaagtagggattcatgctcctataaatcgatagtaaattacatgcagaaacactttaatacgccgagtctgtataagctagagcataagacctgtgggcttaaaagattacatagggatacacaggctttgaaggaggacaggagtaaagtagaatttgaaagagagatacaaggagcttcaataaggataaaaaagcttaagcttacgtctcctgtagtagctagtcataagaacagctcttgtgatgaggatgtgatggataccccgattaaattgaccagagataaagggttggggcagacaaggagacaaggtgagaatggaggacttagaatgttggtgctaagggaggatagagaggatgttgactggaagaaggtagaatatgagggtagtaatagcaatagcatgataatgccattcaatttggatgtgtacaagggacaatgttatgagaggtatctagaggaaaatcgacagagggtgttccctaataccaatatatttgatcatatagaaatgaataacgagaacaccattgaaatggagatatgaaggtacgtatccttaagaccaacagctaggaaagactcaatacaaaaaataaatgtactgtcttaatactgaagatgaagatgttgattgcttaatctacatatgaatttatttatatttatacattaaagaaaaacaataggccgcctgatcaggcttgtaagtcatcttggatatattttgtaaatttattgttgatatgccaagtcggtccctaaaaaagaccgaacttatacttaaagaattcaagcactccctgttt

SEQ ID NO: 22539 - DNA, 1724 bp, Oryza sativa
  ref <308>: DATABASE ACCESSION NUMBER: AK072712
  ref <309>: DATABASE ENTRY DATE: 2001-12-06
gggtttcgtttccttccttcttctcctcctcctccttctcccaatcgatcgcattcgaagcttcctccggtagctccggtgagggtgatggacgacctggacatggcgctgcctcaggccttcgagctcctcctcggcagagatcgagacgcctggccgcgcgggggccgcgttcctcgtcgccgcccactacggggacgtccgcgaaatgaagaggattgcaaaggagctggacgaggacggcaaagggatcgaggcgactgtggctaacacaagcttcctcggcatgaacgcccttcacgcactgggttggctcggcaaggtgccggcctaccggtatctggtagaggaggtcaaaatggacgtcaacaaggccgacactgctcagggattcacacccctggagcatgccgtctaccatggtcgcctgcctgccaccagatacctccttgatcatggcgctgatgtgcatcaaattcgctctacgggaaatgtctctcttcttcactcagctgcagtaaaagggttctctgaagtagcaaaatttctgctttctagaggagttaatgttgatgcagaatcagaaatggggacaccactggctcttgctgctttcagaggatatgatagcactgtcaaggtccttttggagcacaatgctgatcccaacaaggttacaaaccaaggcacttggtgcacctttagacttggcattaaccagctcttctgtgtcctgtgtgaagctgttggttcaggctggagctgaagtgaaagttgaggggccaaataatcatttggtaagagctgctgagaaaggcttaactgaagctattaaatgcatgttggaagctggtgcaaacccaaatgttcctgacaggctcgggagaatgccaatagagctggctgctgagtatggcacacgggaagatgttgagattctctttcctttcagctctgctattccaactgtggcaaattggagtgttgatggaataattaatcatgtacagtcagaaatcaagcaactagaggacgataattttatccaaaagagaaggtctgacatgaaacaacaaggggatgctgcatttaagaagcaggattatctaaatgcatcagtgttctacactcaggcactgaaggttgatccgtttgatggcacgttgttctcaaacaggagtctttgctggctccgcatgggtgatggagaaagggctttggatgatgcccatgcatgcgaaaagctacggcccaaagtgggcaaagtcctactatcggcaaggagcagctctaatgtttctgaaggagtatgagagggctcatagggcacttggtcgagctttagagttggaccctgaaagtgaagagatcgagaatttgtattgggagtcgatggaactgtgcggttgatccctgaaatgccagctacagatagaagaagcacacgcagaactggaagctccttttgtgttatgaaagatggaacgacgcaaacgctcagtgatttgctgctttttgtgtacatatacttaggctgtcaaaacagaaacaaatgtctggtcttttatgtcgtgtttcgtcgtgacatcttcctggagtggctgttagactaaactagcattatcacattctatctgttgctagtatgggcagaggatgatcaactgtctaagcaagctggaatgatatgaattctctgaaatgttatgcataatataattgtg

SEQ ID NO: 22540 - DNA, 1098 bp, Oryza sativa
  ref <308>: DATABASE ACCESSION NUMBER: AK072713
  ref <309>: DATABASE ENTRY DATE: 2001-12-06
ggatctcctccgctttctccagtattccacagtacacgcgaccttgcctgcaaaggggaggagggcgagagacggcggcgatggtgatgccgcggctgcaggagatgaaggagatcttcgacgtcgcacgaggcaaggtgaacccggtgattcttgacctggaggaatctctactggccaaggggaacatgacgcttgaggaggaggtcacaatccgggtcagcaagatgaccgcgagcgtgttcaaggtcttcgccaccgcggcgtttggtgcgtcgagttattatgccctcggcctcggacctaaaataggcgaacctcctattcctcggtttcctagaatcggcgtatctactggcattgcctggtttggtggaaaatttgtatattatacagccttgcgagcaggtgctgaattcattttgaaacgtggagaagaacgcatgaagatggagcttgctaatataatacttaataagcatagtgatgaaaaaaccctggtcgaagctgtaaaagagaacttctttgctgagcatctgtttagcgatcagtatcaagataggcaacttttcaggtggcatctacgcaatacttatgttgacagcgcttttatggaaagggtgaaggagatcgaagttaagaactcggatgatgggtctggatcaatttctgggcacagaactacaaacactagatcatttggagacctcatggaggacccgctagcttgtatacttggttcttcagacagcaacatacaaagcaacaagtctgctgagcacactggtactaccgtgaagagaagggaggtgcgagctcacagaagaagccaccggcatcatcatcatcatcatcatcgacatgctgacaagttttctgcgctgtgatttgtgatatctatatcagagattcagatgtgtgaatgctaggattgtccttcgaacttccagtcgcaggaggccgataggagtagatttctgggatgaatattttgcgtccacgagcaaaatgaagctcatatggatgttcgatgtttcttccatgtccaggaacatgtggttttgacttgcgatctgaccactgcagattatttgcctg

SEQ ID NO: 22541 - DNA, 1301 bp, Oryza sativa
  ref <308>: DATABASE ACCESSION NUMBER: AK072714
  ref <309>: DATABASE ENTRY DATE: 2001-12-06
gagagcagagagagtcttgttgcgaagtgatcatgaagccgcgtccgtctccggcggcggcgtcttccggcggcgttccggcgaggctccggccgcacctcacccggctcaccgtgttcctgatcgtcttctccgccgggtactcggttggcatcatgtcgtcgtccatccggccgcctgcgagcaagccgtcgcagacggtcatacggccgcgcgccgcgcacctctccggcaccgcctcctccacggatgtcccggcgagcaacggcagcgctgcggcggcggcgaactacccgcgctcgccgccgcacgatctgttccggttcagggaggagtgtggcgaggcgatacccagcgacgccgtcgtgcggacgctcctcgacaagctgttcgacggggagagcccgtacgagagcttcccgccgccgcacaccgccgcgctgctgcacccggctgcggcgaggccgcgcgggtggggctcgaccggcgcggtgttcgcggagctgatcgaggaggtgcggcccgacgtcatcgtggagctcggcgccttcctgggcgcgtcggcgctgcacatggcggccgtgtccaagaacctctcgctgtccccggccatcctctgcgtcgacgacttccgcggctggccggcgttccgcgaccgcttccgccgcgacgtcccgccgccgcgccacggcgatgcgctgctgctgccgcagttcatgtcgaacgtggccgcggcgggcgccgacgcgacggcgcgggtgctcccgctccccttctcgacggcgtccgcgctcgccgcgctctgccactggggcgtctacgccgacctcatcgaggtggacgccggccacgacttccactcggcgtgggcggacatcaacctcgcctgggccgtgctccgccccggcggcgtcatgttcggccacgactacttcaccgccgccgacgaccgcggcgtccggcgagccgtgacgctgttcgccagggtgaagggcctcaccgtccggccgcacggccagcactgggtcctctccccgaagccgccgctccgccgcgacggccggtgactcctcgccggcgaaaagctcgccgtcgccggcggggccacgcactcggcgacgtgacgtcggcgcccgacacgtgttcgtctcaaaaactcccaaccaccaccctttttcaaagctccattcttacacaagaatcaattcaagaatttggttcttctactttgtactgtgaatttataccaaattcatacacacgagatcatacgtactacaatgtattcaggtgagcagatg

SEQ ID NO: 22542 - DNA, 1678 bp, Oryza sativa
  ref <308>: DATABASE ACCESSION NUMBER: AK072715
  ref <309>: DATABASE ENTRY DATE: 2001-12-06
gagctggcccgcgaggtgctccgcgaccaggactccgtcttcgccaaccgggtcatgctggatgccggcgacgccgtctccttcggcggcgcacagaatatcgtgggcaacccgctcgggcctatgtggcgcctgctccgccgcgtctgcgtccaggagatgatgagccccgcggggctcgccagcgtgcacggcctccgtcggcgcgagttcaggtccaccctccggtacctccactccaagcccggcgagccggtggacgtcggcgcgcagatgttcctgaacaccatgaatgtgatcacgggcaccatgtgggggggaacgatcggaagcgagagcgagaggtcggcggtggggagcgagttcaggggtctcgtcgcagaggtcaccgagctcctcggaacgcccaacgtctcggacttgtttccggtgctgaagccgttcgacctgcagggtatccggaggaagatggagcggctcaggtcgcggttcgacctgttgttcaccaagatcatacagcagcggatgagatcccagcaagacgggggcgagatgacaacggacttcttggagtgcttgctcaagatggaaaaggaaggtagcgacggcaaaacaacctttaccatggacaacgtaaagggcttcctcttggagatggtggtcggcgggacggacaccacgtcgaacagtgtggaatggattatggcggagttgctgcagaaccctcaggttctgaacaaggtgcagcaagaactcgacagcatcgtgggccgggacgccgtcgtggaggagtcccacctcccgcagctccactacctccgcatggtgatcaaggagacgctccggctgcacccgccggtgcccctcttggtgccgcacagcccgagcgccgccgcgacggtcggcggataccacgtccccgagggctgccgcgtgctcatcaacgtctgggcgatccagcggaacccactggtctggaacaagccactcgatttcaacccggataggttcgccagggacggcggccacaagggggacttcaccggtagccagctggactacctcccgttcgggtccggccggaggatgtgcgccgggatggccatgggggagaaggtgatggtgtactcggttgccatgctgctgcaggcgttcgactggaagctgccgcagggcgtgcagcttgacctgtccgagaagtttgggatcgtgatgaagaaggccacaccgctggtggcaataccgacacctaggttgtctaagcctgaactttattattcgtgaggtcaccttaccttaaataattcagcttaagcagatccaggccagtgcaacaaattttataaggtgatggtgtactagcacgcaggggcggatccagaaataactaataggagagataaaacaaactatacaaagctatagccccctcttctaatggatgtatgacagaaaattttagtgggggctttacgagggctctcatggtttcaacgtcagtagtgaaggctcgagatcccatagcccctatggtagatccgccaccgctagcacgtgatgtttgttgtgaaaccgctaaggcttcatatgcgggtgggcccatatgtcattttttttttgtgtatattactcttagagagataggtttgtactggctcatactaaatctttattatgt

SEQ ID NO: 22543 - DNA, 1899 bp, Oryza sativa
  ref <308>: DATABASE ACCESSION NUMBER: AK072716
  ref <309>: DATABASE ENTRY DATE: 2001-12-06
gaggaggagagaggggcagccagcagcaggggcagaagcattagaagcgggcagcagtagatagagccatctatctgtacagatcacggcaaggagattagagagggagcgaaagatctttccttatttttttttgtatcaaaaatctcagaagagcaggaggaaagaggaataaatcgggagcgagggagaaggcatgatgctggaaggcaactcctgcctcatctcgcgctccctgccgagctcctgcgagccggagtcccagtgggcgtacctctcccacgaggtgctcaacggcaagcgcccggcgccggaggatgcggaagccgaggacatggacgaggttgacttcggcggcgggaagcgcagcaagccgccatcgccgcagccgcacacgccggacatatctgagggccatggctccagtcgccatgttgccgcctctggcggcggagaggagcatggcaacgggagcagcctcattggtgcgattggccgtgaccttaccatcaattgcctcctccggctgtcacggtcagactatggctcggtggcctccctgaacaaggacttccggtcgctcgtgcgcaacggggagatctaccgcctgcgtcgccagagtggggtggcagagcactgggtctacttctcctgtaacgtcctcgagtgggacgcttacgacccatatcgcgagcgctggatccaagtgcccaagatgccaccagatgaatgcttcatgtgttctgacaaggaatcacttgctgtgggcactgaacttcttgtgtttgcgatggcacacattgtgttcagatatagcattctaaccaattcatggacacgggctgatccgatgatctcaccacggtgcttgtttgggtcaacaagtgttggggcaaaggcatatgttgctgggggcactgattcttctggcaggatattgagctctgcagaaatgtacgactcggagacacattcttggacaccccttcccagcatgaatcgggcaaggaagatgtgctccggggtgttcatggatggcaagttctatgtggttggtggtgttgccagcaacaacaaggtgttgacatgcggtgaggaatatgacctgaagaggcgatcttggagggtgatcgaaaacatgtctgagggtctcaacggagtgactggtgctcctccacttattgctgttgttaacaatgagctttatgctgctgattatagtgaaaaggatgtgaagaagtatgacaagcaaaacaataaatggatcactcttggtaagttgcctgaacggtctgtgtcaatgaatgggtggggccttgctttccgagcatgtggtgatcggttgattgtcatcggcggcccaaggacttctattggtggtacgattgagcttaattcatggaccccggatgagcggccgcctgtgtggaatttgattgccaggcggccatctgggaacttcgtgtataattgtgctgtgatgggctgttgaatccactgaataaagattcaatatggtggattatttatgaaggatggtatgcacaaaggcagcctgttcaattgcttcagtcctgatgctccgtagcgatttctgccttctgtccagtttcagattcaactgggcatctgctgagtggcagcagtcatgtaaccccctgagttcttctaatacttctgttttcctcgctaatccatttcaacatttgcatttggatcaactgctcgtgatttgaaagatacgagactatgcaaaacagtgttatattaataatctaggaacagctttcagaaggcttttcactattgatgaacaacctgttaagcaatactcgattcatatgtggctgcaacaaagatattcatcaattatgaacaccatgccttatgtttgctggt

SEQ ID NO: 22544 - DNA, 650 bp, Oryza sativa
  ref <308>: DATABASE ACCESSION NUMBER: AK072717
  ref <309>: DATABASE ENTRY DATE: 2001-12-06
gccatgctccgcctcctcgcctccctcccctgcgcccccaattccttcatgctcaacaccacgctccgtgccctcgcctcctcccccgacccggcctccgccctcagcttcttctccctgtccgccgcgacagcggcagcagcggcggcggcggctcgtactcgcctcactccctcccgggcacgcgcgtatgggaaaggggaagaggaacgaaggagctagagccgtgccgagctccctcctctcccgccggcgagctagaagggcggcggacggctaggcgagctccctggcctaccggcgagcgcgcgggcgtcactccctcctctcccgccggcgccgctcctgtgcgtcagccatccgtgtgcggtccgtgcgaggcgccgctccgggcgtgcaggcttccgcgcgcctccttcctcgctcgccgtcgccctcccttccactggtaagtgattcgctctgctccatgtgcgtgcgtggcttcgagttcgagatggcgaatttgagtaaactccggagctcttgaacttttgaaattggttcggattctgcgtgccttgttcttaatcgagtgtggtttcaatgtacgcgtgtgtttctggaagttcggtggattggaggaagggaattggtttgaactttgaact

SEQ ID NO: 22545 - DNA, 762 bp, Oryza sativa
  ref <308>: DATABASE ACCESSION NUMBER: AK072718
  ref <309>: DATABASE ENTRY DATE: 2001-12-06
gcgagccgggaaagcgtcgcacgacacgactctcctcccaccgctcggccttcgcaccgccgccgccggcgccaccgctcgggagacgcatccgccgccgccgccgccgcccgccatggggacccgggaggtgtacgaggagaagctgcgtagcggcgcgcacctccaccgcgaccccaccatgaaccccggcctcggctccgcccgctgccctcgctgcctctcgctcctcacccccaactcctccggagagggcgactgggccatcacctccgtgctccacgacgccaccgccgtggctggttcgggcgccggcgcgatgctcagtgcggtgcacgggttcaatacagggattccgttcgtccagaagcatgtgaaggggcccaagtggctgcaacttcttgttggggtgcctccattgctcttgttctctggtaccagcgctttatttggggcatatgcgcttccaacgtttgctcagctcactgtaacatcttattatgccgcatcaagtgcctctcactatgcagtttcgcagattacccgccagatcgaaaggtcccatttgtcagacactaatgggaattccagatgagtttttctcactcaatattatgctacatacttgtttacgctctatatacgtggtacataagttattcctcccgttttttctgttgcactagtctgatagcttcggcatgttttgcacacacaaacctatatttatcataggatgaagctgcatgtccttaacatccc

SEQ ID NO: 22546 - DNA, 1709 bp, Oryza sativa
  ref <308>: DATABASE ACCESSION NUMBER: AK072719
  ref <309>: DATABASE ENTRY DATE: 2001-12-06
ggtcgtcgtgtcctctcctcgttgatcgatctcgaggagttcatcttcttcttcccccttcgcctactcgcctctcctgccgcaaattccaattccaattccaatcccgcttgggcgagcgatccaccctctgcttcggctgccatggcgaccgactcctcctcctccgctgccgccgataagaacaccgtcttccgcaagctccgcgccaaatcagacaacaagatgtgcttcgactgcaacgccaagaacccgacctgggcctccgtcacctacggcgtcttcctctgcatcgactgctctgccgtccaccgtagcctcggcgttcacgtctccttcgtcaggtcaacaaatttggattcgtggaccccagaacaattgaaaatgatggtttatggaggtaacaaccgtgcacaagctttcttcaagcagcatggttggacagatggtggaaaaattgaagcaaagtatacttcagagctgctgacttataccggcagttgctcgctaaggatgttgctaaaaattccactgaagatgggaacaacagttggccgtcctccccagttgcagcttcacaacctacaaatcaagctgatgcaattccagatcttaagctggcagaggcatctaaagaagttgcaaatgagaagactgagcctgaggttattcgttcaccaagggctccaactcattctttcaagaagccaattgttgcgaagaagcctggaaataagaccggtggacttggtgcacggaaacttacgtcaaagccaaatgaaagtctctatgagcagaagcctgaagagctagctcctgcgctgccaccagtgactgagaacagtacagcaaagagcaaatctcatacttcacgatttgaatatgtggaaaatacaccttctgctgggagcaattcagaagaaaaccaggtcattggacatgttgcgcccccaaaatcttcaaacttctttggggaatttgggatggacagtggatatcaccaaaaatctgcccctggcccatccaaagtgcagattgaagaaagtagtgaagcaagacagaagttttcaaatgcaaagtcaatttcatcttctcagttttttggagaccaggccagttttgaaaaggaggctcaagtttccctccaaaagttttcgggatcttctgccatttcaagtgctgatctatttggtcatccaaccaatagttccaacgtggatctgagtgcttcagatttgatcaaccggctttctttccaggcttcccaggatctgtcttctatcaagaacatggctggggaaactgggaagaagttgacatctttggcatcgaacatcatgtctgatcttcaagaccggatcctgtgagttcaatctacagtcgagactccgtgacatttcttcagccgttacaggattcgccgtgacaataagttgacggcatgcctgcttggcagatatgttcaggagttcctataacttaaaacttaaagacctggagctatagagaaaatgttatgtcgtgaatgctgtactggctaaagtcatgtaagcatatgcacctgtaacaagaatgtttttttcataaaattgttaaaaccgtcttagtgggatcttagatgctacctaaaagtgtcgttgcgttgtaatgaccgtttcataccatataatacccagtacatattttagccatatggaaggtaatttgtc

SEQ ID NO: 22547 - DNA, 2228 bp, Oryza sativa
  ref <308>: DATABASE ACCESSION NUMBER: AK072720
  ref <309>: DATABASE ENTRY DATE: 2001-12-06
gtcgccgccctcgccaacggatggggtcccgctggcccgggccactacccgcgccgccccgtcgccgacctggtcgacaagattgacctcgatgtgcccgccgcctgggatgcccaggaccaggacaccaggccattcgaggtgccgcaggagacacccacccaaaagaagcgcagcgtcgccgagctcatggacaatgacgatgacaaggctacgccacaccaccaggacagcgctaccaccatctccaagtccaacaagcgcgagcgcaagaagagcaaatatctgtcgccgccctacaccaacttgggcgggattgcccttgtccagaaggcgtctgattcgccaaagccatcgccacccgctgccgctgaagatgatgaatacaaggtattgccaaagccattgcaggagaatgtttctccacaagaggtcttgctttttgtgcgcaggactgggctggacgtcttccataggatacggtcaatgaaggccgtccatgccttcctttctttgtatacaagttcattgttggtcgaggatgctgactacaagtcctttatagcacacgagtgttctacggagaatgcttttacaaatgctgctgtggagacatctgattcttttgtaaattcacgtgctgctctgaaaccaggcaagtgtgctttgaagaggaccagaaaacaggggccaaatgagggtgggagttcttcgaccaagaccgagaagagggggaagaaatctcctgcggctgccctaggctgtggtgtaacaattacccctgctattcctatcaggcaagcgagggcagaagacataagaagcccgacgaaaccagagaatggtgcaaggggtatggcagttggtgtgcagcttgagaagatcaagccagactttaagagccctacattagcttcagcgaaggtagcaaaagaaccaggacaggagcaggacaaagcaaatggtggatctgttttgaagaccccagccaatgcttgcaagaatttatctgaccaacctgcaaaacagaattatgcaggtatggtggaagcaagacagttgcataccaacattcaagcatcatccaggtgtgcaaggcattgtagtagatgtgcctgtcagatgtgttccggtggaagcagtgaagtctgaagctaatattcctctacacagagatgggcagaatgctgctgtagatgtgactgacaaaagtgcacctcttcctaaaagtgaagacgtatccctatctcagccgacagatggaaataaagaacatgcaagcgccgaagtgcgtacggtccaagaatcttatgcttcccttgaagcgatggtgccggaaatgcttatgaaagcggaggtcgccaatggcactaatgtagcagcagcaagcaattccctcaaagatgagggccagagggccgatcagcctagcctgaagaagatggttcctggagctaatgtaaaccattcctctggtgaagctaccaatagtgctttccctgatatagcttattctactcctaagaaaaagaagaagaaaattgcagagcactttggaaacccagcagcccttcttttggactttgcaaagggtgttgttctgccctccaaagaggaattgctctctgcatttggtaagtttggtctcgtgattgagtctgagacggacatcgtaaaagatacccatagcgctcgtgttgtgtttgggaaaagtgctgaagctgaggcggcttacaacagcgcagaaactcttggtatgtttggtcccccgtttgctacaccaaggcttcattatcttcctccaatcaagttgagcgtgccttcgccagcttcaaagcctccccttacggatattaggaaaaacctggagaggatgatctcatccctggctggccattcatctgtcaagaaggcaactccatcagatggatcaaagcaaatgccagaaaaccttcttggggaaatgcaggggcttttggcaaaagttgacaagatgctcaccgggccttctgctactgctagtaatcctcattagccccctaccgcatggattattctaatccatccgtagttagatgtcttattgtctatgctgtttgtcgctgtcatcaattatagctgccaatctcgagctaatgataaattagatgttttgacgatttcggcagcaacgattgaaactattgtgaatggtagtccgtagccgttattaaaaaaaaaaaaaaagg

SEQ ID NO: 22548 - DNA, 2215 bp, Oryza sativa
  ref <308>: DATABASE ACCESSION NUMBER: AK072721
  ref <309>: DATABASE ENTRY DATE: 2001-12-06
tcttcctcccctcaatccccccttttctcacggcgtcgcggcccccccgaaataaagccgtcgtcgacacctcccccgagccgcaagcaaccccgcgattcccccgcatcgccggcgaatcggcggcggcgacgacgaggacgacgaggaggccatagggttgtggaggaggggtgggggacctgtcttcgatgcgcggcgcatggcggcggtgaacagcctctacgtcgccgcggcatccaccgcggccagcgccgcggcgctgcagtggtgggcggggtccctcctcgacggggatgccgacgcggcgggcgggggaggaggaggaggaggaggggactggctcggcacggtgctgggctcgcacgtgaccgtcgcgctcctggcgaatctggcggcgcacgtgttcctcgtcctcatcctctccctcaagacactattttttgttcaattaacctcttctgagactagaaaggtgttggaacacatcattaactatgtgctttacaagggaacttttctcccactggttgtgcctcctaattctcaacaaataatcctttggtcaagttggttgggccttctttgttccctgaagatgtttcaatcattggctagagaacgccttgaacagctcaatgcttcaccatcagcgactccatcaaaatactttcgtgtatattctgcactattgctggttctatcggctgatgtactatggataaagctttgtgttgggttctgcaagtcgtgtaattctcaactattttggcttatgttttttgagccacttagtattggctttgagacactgcagtcaatcatggtgcatggatttcagttgtttgacatatggcaacgacatcaaatggacagtggtgtggactatcttgatttccaaaaaacttataagcaagcagcaggatctttttctgagtggagaggcagactagtcagaaattttggttttgtcattgacttgataagcttattgatgtcacttggtcattactcaatgatcttctggctccgtggtatggcgtttcatctggttgacgctgttctcctattgaacttacgcgctcttatagcttcattttggaagcggataaaaacttatgccaagttacgaaaggcacttagttcactcgacggagcacttccagatgctacatatgatgaaatctgtgcatacgacgatgagtgtgccatctgtaggggaccaatggctcgagctaaaaagttatcctgcaaccatctatttcatctagcttgcttgcgatcatggttggaccaaggattaatggatggttactcatgtccaacttgtcgaagacctctctttctgtcatctcaaggtcacacaagatctacagcagaggtaggaaacgtccagttaattgcagaacaacttaatgcggggttgaatcagcagagggttcctggtcatgaacatcctattgaacatcagaatcctgcagatgctgtttggagaggtgctggtcttgattctagctgggcaccaccatggtcgagccctgggatggacaatcccagttcttccagcgccgtgacatcagtggggcttagtggagttcagatgatgatgaggcagttgacttcagtgactgataattatgggcatccagatgccacctggagtctatggcctgagccagttgcaggatcttcggttgttccatcctcttcctcgaggcctgatggtgcttcagctgctggcttgcggttccgaggcactgcaagacccgcgaatggtagcatgtcggaggttctctccatggtagatagagtacgagaagttttaccccatatccctgacgagctaattattgaggatctgatgagaacaaataatataaacgctactgtaaataatcttctgctgatgcaataaaagataaaccagcaatacaacatataagcacgatgtttaccggctataagttcatatatgaaaggatgtatagttaagttaaagacgaacctgggtgtccaagcacctcttggttcttgtaataagtgttttttttagtttatttcttcccaatgtactaaaatgccccggctttgtatagtaatcacagctgtataatattatgctcaatatggcgtaggatagcatgtgtagaagatgttatcatccaaataaaagtgtgtttgtcatcccaataaaattatttgtcgatgagagccc

SEQ ID NO: 22549 - DNA, 949 bp, Oryza sativa
  ref <308>: DATABASE ACCESSION NUMBER: AK072722
  ref <309>: DATABASE ENTRY DATE: 2001-12-06
gtgctgcctcaccttacctcgatctgcaagcaagccaagccaagcataggtagacgacgtgtagatacgtagtcctcctcctctctctcgattctgcacgcctcgtcgagcagctggctagcatatatacccccatacctgcataccatgctgcgtccccagctcaatccatcgtccagccaccaccatacgacgacgacgagcagcagcagcagcacgcagctgtacttcgcctcctcgtcgtgcatcgctagccttcgccggccgtcgccgccgtcgctgatcgccggtgccggctgccggacgacgcggcggagacagcagggtaggcagcgagttgttgtgaggtgcgcgtcctcgtcggcggcatcatcggcgtcggaggcggcgagaagagggaccggtagttcggacatggcgccggcggcggtggtgaaggtgaaggcggtggcgacgatcaaggtcaccgtcgaagggcttctcaacagcctgaggccgtcgaaggcgatcgacaacatcagggatctcatcggaaggtcgctcttcctcgagctcgtcagctccgagcttgaagcgaagacagggaagaagaaggcaacggtgcatagctacgcgcacaaggtggacgacgacgaccatggcgtcgtcacctacgaggccgacttcgacgtgccgaccggcttcggccccatcggcgccgtcgtggtcaccaacgagctcgggcaggagatgttcctcgaggacctcaacctcaccgccggcgatggcgccggcaactccaccgtcctccccatccgctgcaactcctgggtccagcccaagtccagcatcgacgagggcacgcctggcaagcgcatcttcttcgccaaggtatatagttaaaatatcttttttaaaaaaattgtcttcttctacaaaagaatatgtagtctagccagctagtggttgc

SEQ ID NO: 22550 - DNA, 2246 bp, Oryza sativa
  ref <308>: DATABASE ACCESSION NUMBER: AK072723
  ref <309>: DATABASE ENTRY DATE: 2001-12-06
gccgcctccgccgaccccgatccccatccatcccgccagcgaccgagcagggtcgccgtcgttcgccgtcgtcctgctgcttccgcccgcatccatcccggtgagcagtcacatcctccgccaccgccgcctgcgccgatccccatccatccctccagcgagcagggcgggcgccgtcgttcctcctgctgcttccgcccgcatccatcctggtcactgtgaaaatggaaggaaatgctagaggcggtgggcattctgaggcactgaagaactacaatctaggaagaactttaggtattggttcatttggaaaagtgaagattgcagagcataagcttacagggcacagagttgctataaagatcctgaaccgtcgccaaatgagaaatatggaaatggaggagaaagcaaagagagaaatcaagatattgaggttgttcattcatccccatatcattcgcctttatgaggtcatatacactcctacggatatatatgttgtgatggagtactgcaagtttggagaactgtttgattacattgttgagaaaggcaggttgcaggaagatgaggctcgccgaatcttccagcagattatatctggggttgaatactgccacagaaacatggtggttcatcgtgatctgaagccagaaaacttgctactggattcaaagtataacgtaaagcttgctgactttggtttgagtaatgtcatgcatgatggccattttttaaagacaagctgcgggagtccgaattatgctgctccagaggtgatctctggtaaattatatgctggacccgaggttgatgtatggagctgtggagtgatcctttatgctctcctttgtggtactcttccatttgatgacgagaatatccccaacctattcaaaaagataaagggtggtatatatactctcccaagtcatttatctgctctggccagggatttgatcccaaggatgcttgttgttgatccaatgaagagaatcacaattcgtgaaattcgagagcatcaatggtttcagattcgccttcctcgttacttagcagtgcctccaccagacacagcacagcaagccaaaatgattgatgaagatacccttcaagacgttgtaaacttgggttatgaaaaggaccatgtgtgtgaatctctgcgcaatagactgcaaaatgaggcaactgttgcatattatttgctattggacaatcgattccgagctaccagtggctatctgggagcagactatcaagaatcattggagaggaatcttaatcgctttgcttcatcagaatcagcaagttcaaatacaaggcattatctcccaggaagcagtgatcctcatgccagtggtttgcgcccacattatcctgttgaaagaaaatgggctcttggacttcagtctcgagctcagcctcgcgagataatgattgaggtcctaaaggcacttgaagacttaaatgtctgctggaagaagaatggacagtacaacatgaagtgcagatggagcgttgggtatcctcaggccactgatatgttagatgtcaaccacagctttgttgatgactcaattataatggataatggcgatgtaaacgggaggttacctgctgtgatcaagtttgaaatccagctttacaagagcagagacgagaagtatctgctggatatgcagagagttacggggcctcagctccttttcctggacttctgtgcagccttccttaccaaactgagggttctatagtaccccgtgttggcttcagtgaataaccaaacctagggttttatcatgtgcggtttttcactgcaataatgaataaaggacaccatgtaaataggcagctgtgactttcttcccggcccttagatagagaaggttgttgtttgagtgactagtgttatgttgagcaccaaaatgttggttgttacaggcttacatagtatatagatcttgataagctatctgggtgggcgaatgcttgatatctaattttttgcaggctgcagctatactgctggtgatgctgcagtacaagcttttctttttgctcctgcacacggttattatgcgtgtgcatggaaattttgctactgctagaaagaagctaggtaagaatatcagccccttgctgccgggttgtggtataaatgtagatgacagcaaatttagtgaaatatcaacaaatgtagtcgtatgatcatgctcatgtccccctatggagaatcgaggtatcct

SEQ ID NO: 22551 - DNA, 631 bp, Oryza sativa
  ref <308>: DATABASE ACCESSION NUMBER: AK099298
  ref <309>: DATABASE ENTRY DATE: 2002-08-28
gtgacgatagcaaggaagagagagcgttgaagatgctgctgaccaccccgttcgtgtcgtcccctgtgagggtccagggcaatgggggcagcggcgcctcgccgtgggcgggcgcggcgacggcgctgaggatccaggcggcgaagcagctgacggggcgtgtggtgacgacgaaggcggacaagacggtgggggtggaggtggtgcggctggctcctcacccaaagtacaagcggcgggagcgcatcaagaagaagtaccaggcgcacgacccggacaaccagttcaaggtcggcgacgtcgtcgagctccgccgctcccgccccatctccaagaccaagcacttcctcgccgtccccctccccccgcgcgacacccgccgcaagtcccagctcctcccgcctctccagtcccagtcccagtcccaagaccaggaccagccacccacgcctcctccttcctccgattgatggatttttcttctcccgtaatcgtaaattcgtaatgtaataatctgtgctgtactatgtactccattgatttttatttgctctggatttcgaacttccccagcagcaatgctatgttcccttttcatttcatctgctcatatgcatgttgttactcagcg

SEQ ID NO: 22552 - DNA, 1490 bp, Oryza sativa
  ref <308>: DATABASE ACCESSION NUMBER: AK072724
  ref <309>: DATABASE ENTRY DATE: 2001-12-06
gagactcccccccccccccctctttccctttttctagactccaccggaggcgaagggcgccaccaccgccgcgacggccatggacgacgacgccgcctcggagatcagcgactgggaggtgctctccgccgcctccgcccacggcggcggcggcgaagacgacggggaggacttcgtggtgctcgtgcccggcgagggcggcggaggcggggacgtcctgcacgaccacttcgccctcgtcgccccctccgacgtcgacgggttccccggcgaggagggctcgtggtcggggctcctctccgaccccggcgacaaagggaagggggaagggtttgattcggttccggaagggagattggatcctcttgttgaggaggcggctcagcgggagattgagcaggggaaggaagcggatgggacgggagaggatttggatcctgacgtaattgtggttgcagaattatcccgactcgaatcaccggagaattccgatgtgcaactggaagtggaagatgggggaagctcacttcctgaagcttctgaaataggtgatgcattggggtttgtccaagaggcgctggtgcaatggaagagtggtgatgtcaccatccggctgcggtgaaccggaaggcgaagcgaaggatggttctttgcctctggcacaatccccggttgctggagaaatctcactcgctgaagctgctgcggtaggcgatgcgatgggggctgtcgacagcggtaatgccgcttccggttgcggtgaacaggatggtgaggcaaaggatggctcttccttgcctctggcgcgagccccggttgccgatggaggagagaagcaggtggttgtgtggtggagggctggcggtcaggctgctgcaatgctgtgcttggaaggtgaagccgatttggtccttctccattgccgccgcattgctggggctattcgtgctggggaggaggatgtacaggatgaggcgcaaggcccggggacttccccatattaagattgcatttgatgataagagagcctctcagtttgcagaccgtacagctcgtctcaacgaagccttctttgtggcaagacatatacctatgctgaggacttcttctggtgctgtgttcccgtggtcaatggttcaataaaagatgaaccagcctacacaaaccttcataaaaggaagataatgtgttacgtagttagcagcagatctgcatgaggaacactagtaagagcaagagcatctgagttggtatttgccccgatatttttctcgtcggggcaccaatgtatgtcgatgcctgagatagtagatgttccttttgatttctaagctgccataccacatcttgtttattttgtccccccccccccctttctttttttttttacccatttgccttgttattaggtcaagttctgaagtgtcagtgtagtcctggacttttgtcagttgctctgtatgtgtttattatagtgttacagttctccc

SEQ ID NO: 22553 - DNA, 2073 bp, Oryza sativa
  ref <308>: DATABASE ACCESSION NUMBER: AK072725
  ref <309>: DATABASE ENTRY DATE: 2001-12-06
gaacgccaagatgcgcctcgtcaatctctcccaccgatcaatcgcgagacctgcattctagccgtgcgaattccggcgggcttccgccgtagatccccaagaaacccccggcaagaaatcgctgcccagatggatcgccaagaggaggaggacgacgacgcggcgcttcgagaagccggcggcggcgcctccttccccggcggctggctccggcgtctgtcccgcgagctgcactggagcttcgtgctcgccgtcgtggccgtctacggggcctgccagggtgtcggcgacgccgtcggcggcgtcgcggcggggtactactggaaggacgtgcagcgcgtgcagccgtcggcggcgcagttctaccaggggttcgtcagcgccccctggatcgtcaagcccatctggggtctactcaccgacgtcgtccccgtcgccggctaccgccgccgcccgtacttcctcctcgccggagtgattggggcgtcgtccatgctcacgctctctctccaccgcaagctgggcatcatgccggcgatcttggcgctgacggcgcagagcgcgggcgcggcggtggccgacgtgacggtggacgcgctggttgctcagaacagcatcacgcaccagccgctagccgcagacatgcagagcctgtgtgggttcagctcctccgttggggcattgcttggattctccatcagtggtcttcttgtccactccatggggtctcagggtgctcttggattactaagcatcccttctgcactggtgttcttggctggtgttttgctgaaggagaggcgagttacaggtttcgattacaagcaggttcataggaaattctacaaagcaattcagtccatgggggcaacactgaagcgtgccgaagtttggcggccgtgtgtgtatatgtatgtttctctcagtctaagcctggatatccaagcaggaatgttctactggtacactgatccaatagtgggaccaggattctctgaggaatttattggccttgtgtattcggtcggttcaatcggttcgctgctcggagttttactataccaaatttcactgaaggactgccctttccgcggcgtgctattctggggccaagttctttcaagcctggcaggaatgctcgatctgataatggtgacccggctcaacacaagaatcggcattccggattacgtctttgcggtgattgacaacagtgtctcccagatggttgggaggctcaaatggttgccgctcctcgtgctttgctccaagctttgtcctccaggcatcgaaggaactttctatgcgctgctcatgtccatccaaaatgccgggttgctgatgtctggctggtggggtggcctgatgctgcagttgctgaatgtgactcgaacggagttcagtaacctctgggttgccgtcctgatcagaaacttgtcgaggctgctcccgctgatgctgctgtttcttgttccccagagtgaccaaaactcaatgctcctcccggcagagatgcttcaggacaatgaatctactgaagctaggaaaggaggtcaagacactgctgaattttccgtccttgtcgcagatgattctagctgtcatgctctgaatgtggctgtcgaagatgaaagaatcaaagtggtcgatgctggaacgggtactgtggagttgattcctctcatgaacgagctacaagaccgtgggagttgactgacaagctcatgaacaggatacttgtcttccatccatgattcattctataccaaattaccaatggcgttctggttctgttctccactctttggtagactagttctttatgtatcatcagcaacagcacatcaataggttataggtgaaacaacagttagttttcctttcattttttgtaacagaaagaagcacagtatcatttggaaggatattgaggcagttccttcgggttttttttgggtgtgtgtgtttttgtgttttgttcaagcgtccttttgggacgtacgatttttagaggaatttcatgtgacttgaactgtttcatcatgtgaaaattctgtaaaattcatgaattcc

SEQ ID NO: 22554 - DNA, 891 bp, Oryza sativa
  ref <308>: DATABASE ACCESSION NUMBER: AK072726
  ref <309>: DATABASE ENTRY DATE: 2001-12-06
gaccacccattccgattccaccgcgcgcgcacgccatgagcgagccggccaccaccacccccacccccacccccgccggagaccacgacgcagccgccaccgcatgcaagcctgcggagacgaccacggccctgatcacctgcaggagcagcagctgcagcgcccagcagcagcagcagcagcagcagcagcaggaggagccgctcggcgacgaccagctgggtgagctgcgggagatcttccgctccttcgaccgcaacggcgacggcagcctgacgcagctggagctcgggtccctcctccgctccctcggcctcaagcccagcaccgacgagctggactccctcatccagcgcgccgacaccaactccaacggcctcatcgagttctccgagttcgtcgccctcgtcgcgcccgagctcctctacgaccgcgccccctactccgaggaccagatccgccgcctcttcaacatcttcgaccgcgacggcaacggcttcatcaccgccgccgagctcgcccactccatggccaagctcggccacgcgctcaccgtcaaggagctcaccggcatgatcaaggaagccgacaccgacggcgacggccgcatcagcttccaggaattctcccgcgccatcaccgccgccgcatttgacaacatcttctcctgagaatatagcatcagtggcattcacatgcatcgatcgcggctgttcatcagccgatcgcttcgtcagatgtttgggggagatcagatcagatcagaattcagaatcagatcagtggggtaaatttaggtcaggtgttcttcttcatatgtgatcgagctcttgtgaataacgaataaatctttgtaaaacaaacagaagtaaaacatacgaatttcagttt

SEQ ID NO: 22555 - DNA, 1245 bp, Oryza sativa
  ref <308>: DATABASE ACCESSION NUMBER: AK072727
  ref <309>: DATABASE ENTRY DATE: 2001-12-06
gaccaccgcctcggcgggctgtatctcagattaggagaacctgacaaggcaatccaccacttcaagcaatcggcgaacgactcgacgggcgcggacgtgtcgcgcgcacagtcggtcaagagccgcgtcgccaagtgcggcgacgcgcgcaagctgaggaactggatcacggtgctgcaggaatcgcaggccgccgtcgccgacggcgccgactgcgccccacaggtcatggcgttgcaagccgaggccctggtgaagctgagccggcacgacgaggccgacgctgtgctgggcggcgcgccgcggttcggcgtcgacgaatcgaccaagttcttcggcaccgtcgcccatgcctacgtcctcatgatccgtgctcaggtcgacatggctgctgggaggtttgaggacgcggtggcgacggcgcagacggcgtgccagctcgacccgagcaaccgggagatcgcgaacgtgcaccggcgggccaaggtggtggcgtcggcgaggctgcgcgggaacgacctcttcaaggcgtccaggttcgccgaggcgtgcgccgcctactgcgagggcctcgacagggagaccggcaacgccgtgctgctctgcaaccgcgccgcgtgccacgcgaggctcgcgcggtacgagaaggccgtcgaggactgcaacggcgcgctcgccatgcggccggcgtacagcaaggcgcgcctcaggagggccgactgcaacgtcaagctggagagatgggaagcgtcgttgcgagattaccaggtgctgatccaagaactcccggagaacgaggacatgaagaaggcgctgtccgaggtcgaagccaagctccggagccagaggaatgggggcattgcaagcagatcacaacagtgacgccatgcttctttaatctgtcggctacccgaaatcaactgcaagatctgaagaggacaagactttggacaaaacaatgcagcacgcaccattgcgcggtttgttagtgtcaagtcagtatgattctttttttgtgcactatacgccaaattacaagagaattgagagtaatgaaactgtacataatacttgctgcaccgagaagtatagctagttaatttgaatgtgggttggcagtgatagcaaccatgaaagtttctgaagatttaagtttgcctcacacaaaaaacatactgggttgtactttgtactacaaaactaatatccatcccaaacagaaaatgagtgagtatccatttgagc

SEQ ID NO: 22556 - DNA, 1023 bp, Oryza sativa
  ref <308>: DATABASE ACCESSION NUMBER: AK099299
  ref <309>: DATABASE ENTRY DATE: 2002-08-28
gatataggccgatgaggacagaagggggaaaaaacacaggcgcattctaccgagaggcacaggggttgcaagaagtcgcctaattctcctattgaattaggcacatcttcgcccccacattgcctctcattgtaaaatagtatcaactgataatccacaggaactaaacaacaattaaatccaattatggacggattggtaggcctcttgaaaatacgggtggtgcgtgggattaaccttgcctaccgcgacacaagaggcagtgatccatatgtcgtccttcgcctcggcaagcaaaaagtgaagactagtgtaaagaagaaatctgtgaatcctatttggcatgaagagctaactttgtcgatcatgaaccctattgcaccgattaagcttggggtgtttgacaaagacactttcagtagagacgacccaatgggagatgcagaaatagacctggagcccttcatggaagttctgaacatggacccggagaacattcggaatggttccatcataaaaacaattcgaccatccaaccagaactgccttgctgatgagagtcacctattctggaggaatggtaaatttgtccaggacattattctccgacttagaaacgtcgagagtggtgagctgcaagtgcaactgcaatgggtgaaaattcctggcaggcactaagtgtctcatggccattgggagatcttggctactgagatatcattgacatttccgaatgccaaaacatatattgtgcgaaatggatcatgtcaaccattggggctgtaaatactgtgcaaaaaatgaatcatgtcaagcacgttttgatgtggaggttgtgaccagcaaagggttcatcaggttagtcaatgtctgtaggaaaggaaaatgatgttaaaatgttgttgccgaaatgtattgggagcatgatcagtaaagcttgggatgacataatcaaatagtacaaacgataggaccatgtttgcctgtgcttttgcaacaaatcaatcacaaatactgtttccc

SEQ ID NO: 22557 - DNA, 1290 bp, Oryza sativa
  ref <308>: DATABASE ACCESSION NUMBER: AK072728
  ref <309>: DATABASE ENTRY DATE: 2001-12-06
gggtggttttggtagtggctgggagtacatttgatttgagccatggacgacaacggcgacgtccatttctgccacagagccaccgccgtcgtggcgctgcttcttctccaccttgtcgtcgtcgccaacgccgccgcccactcctgcgattggtgcaccccgcgccactccaccgtctccatcctccccacccccacgcacgccgcccatctcaccggtggcgcctgcgggttcggtgccgcaccaatggagctcaacgttgccgccgtcaccgccgacctcttccgccatggccatgcctgcggcgcctgctaccagttaaggtgcagagaccggagactgtgcggggaggacggcgtcgaggtcgtcgtcgccgacatggcgaagcagccggagcaggagggggagatgaaccggacagccggcggctcgctgcagtttcgcatcaccgaggacgccttcgcggccatggccaagcagggcgtctccgctcacgagctcacgaggcagcgcacgctagaggtggacttcaggaggataccttgcgagtacagggagagcaggaggttggcggtgagggtggaggaggcgagcaggaacccgacccacctcgccatccgcttcctgtaccagggcggccagaccgacatcgccgccgttgagatcgcgcaggcgaacgctacaccgccgtcgtcgtcgtactattcgtcgtggaggtacatgacgcggcgcgacggcgcgccgggagtctggacgacgtcgcgcgcgccggtcggcccgctgcggctccgcgtcgtggtgacggccggctccggcgggaaatggctgcgtagcgacggtgaggtgcttcccgccgactggaggcccggcgaggtgtacgacaccggccttcgggtcaccgacgtcgccgtgcgctcgtgcagcctctcctgtgccatccaggacatggacagcgatgatgacaggaggaagagctcagatgacaattcgatcgacgtgatgaagaagaaggcgtccttatgcagaggcgtggaggatgggattagtcggcggcggcggcggcgagaggcttggtacgccactgcaccggcgacgcggatgggaggcggcagagaaggagggagtcaatacgctttggaagttacaaagccaggggcttttatgtaaaagtgagaaactgataacctctcatcgcggacctgtgaaaaaatgtagccacccatcggtagcgcagcaaacttggaccttcttggaaaggcaaattttgccattcgacatggccacttcgcg

SEQ ID NO: 22558 - DNA, 2148 bp, Oryza sativa
  ref <308>: DATABASE ACCESSION NUMBER: AK072729
  ref <309>: DATABASE ENTRY DATE: 2001-12-06
gggagttggcgagcccgaggagcggaggcggccacaagtctaatccgcgtcgtctgcgcgttcgtgggcgaggaggagaaagaagaggaggaagagagggaagggggcttgatttgatttgggcgcgtctcgtggagtatccggttgccccttctagtgtgtaacttggagcaaatttggaccctgagacgcaaatcagtcatggctggttctcttgcggcgtctgcattcttccctgtcccagggtcttcccctgcagcttcggctagaagctctaagaacacaaccggtgaattgccagagaatttgagtgtccgcggaatcgtcgcgaagcctaatccgtctccaggggccatgcaagtcaaggcgcaggcgcaagcccttcctaaggttaatggaaccaaggttaacctgaagactacaagcccagacaaggaggatataataccgtacactgctccgaagacattctataaccaattgccagactggagcatgcttcttgcagctgtcacgaccattttcctggcagctgagaagcagtggactctgcttgactggaagccgaagaagcctgacatgctggctgacacattcggctttggtaggatcatccaagacgggctggtgtttaggcaaaacttcttgattcggtcctacgagattggtgctgatcgtacagcttctattgagacattaatgaatcatttacaggaaacagctctgaaccatgtgaaaactgctggtctcttaggtgatggttttggtgctacgccggagatgagcaaacggaacttaatatgggttgtcagcaaaattcagcttcttgttgagcgatacccatcatggggagatatggtccaagttgacacatgggtagctgctgctggcaaaaatggcatgcgtcgagattggcatgttcgggactacaactctggtcaaacaatcttgagggctacaagtgtttgggtgatgatgaataagaacactagaagactttcaaaaatgccagatgaagttagagctgaaataggcccgtatttcaatggccgttctgctatatcagaggagcagggtgaaaagttgcctaagccagggaccacatttgatggcgctgctaccaaacaattcacaagaaaagggcttactccgaagtggagtgaccttgatgtcaaccagcatgtgaacaatgtgaagtatattggttggatacttgagagtgctccaatttcgatactggagaagcacgagcttgcaagcatgaccttggattacaggaaggagtgtggccgtgacagtgtgcttcagtcgcttaccgctgtttcaggtgaatgcgatgatggcaacacagaatcctccatccagtgtgaccatctgcttcagctggagtccggagcagacattgtgaaggctcacacagagtggcgaccgaagcgagctcagggcgaggggaacatgggctttttcccagctgagagtgcatgagcgcttctgtagtttatccggcaagtaacctctttgagaagtgcagattctaacttggctagcaacacaggacaaatgattgttggtgggaaatttggcatgccgagcctgggttttgtgatgcacacagcacacattcagatttgaagattgagagatgcttcttattggcagcttgttcagaaagatgactaagcggtttgggataaaatcagctgattgggaaacattagcaggatgataagcatgactggtggtaccaatgaaaagggttgaaatcctttgcattgttcatttgttgtggagcaagagtggccgcagttgcttatcacacaggatgatggaggtgtttgtgtgaagcttattgctgaagctggattgtttttgacctgtgtttctaaaagaaaagggaaaagaagaagctgtggattgaggccggagcagcagagatattacaatcgacatagataaataagatgtaatactaatttagcccaggtggtttgtgtgtggagatgcaatccattgtagtaacagcctaacttgtacattcttgccatctttttcttattaattgaatgaatgaatcgcagacctcctgcgttttcatcaataattgaaatgacttctgcttcatcaagaattgaatgaattgtctgtctg

SEQ ID NO: 22559 - DNA, 2246 bp, Oryza sativa
  ref <308>: DATABASE ACCESSION NUMBER: AK072730
  ref <309>: DATABASE ENTRY DATE: 2001-12-06
gggcgccgcccctcccctctcggttagctgctgctcctgcacctgctgctgctgctactgccaatctgccattctcccccattcgacctctcccccgtttcctccgatcgactcgcttgcgcgcgggggaggtgtgatcgatcggttctctctcaccgcattgtgatcgatcgtctaggtcgtacgggcgctcgatctgcttcgaatcctccatttgctatgatgagctcttcttcgtcctggtctaccccaagctttgggttagccagggaatcctcttcattgttgtttacacctggccttgtgcaacacatgggtcctaatccatcgtcatcttggtccacccctgctcatccagtctctgatagtcccacgttttctttccccacgccatttttctgtgagcctgcgaaaggcagcagggtctatgcttataccaagactgctgatgatcttcctcataagcatacactatcaatttctgcaatgccagcatacataagcaaatcccatgaggagcttcgacatgaagattatcagagaggagacaaaggcggtgatggcctgcagaaaattatggttaattcagctcctgtacctcccatgcccatgttatcatctgttggagctccagttaatatgatcaattcaagtcaacctgctttcagtttgaagtccaaaacaaatttcagtactccattttcaccagcagcaactgctgatcaacaatctgcacagctacagttctcaacacaaaatcactattatacttccaacccattttggcctgccccaataggattggtgcgaccatgttcatcaacaggactgcaatcttccacgccaggtctaaactgtaccggcatcacatcatttccattcctgcccacaaagcaaccgtctgtgggaacccaatcatcaactttatttcctaccacttttgtgcatccatccgtggagttgcaaaagaatgcctccacccactgtgctagctcacagactgctccttgtacgacacacggaggaattctattcggcacggctgcaaatacagtctcattaactacatcatctactgagccaaccacatcatcccttggtccaacctcatgccctgctactcgacatggagatgcaccttctactggatttgcatgtcaggaaaatgtattcagcaactcagcggcatatacatctactataaatgcggatgttcccacgaataccatagatttgctacttccaaataacatccggctggtaaggcttagattttcttcaacaaatgatggtaatggaagtgttgcttcagaggttcattgtcatcatgatgctaaaacttcagaaacacgcatttctttgtgcatatatcctggagagaaccaagagctgattatcaaatcaatggtgcagcctgctaagagtcacactgggaaacaatctagtccaactggtggtcatccagatgatcaaagtggtcgcagcaaagtatgcaacagtgctgctggtctgccatcgtcaggacctggtgagaatcagaaggggaatagcagtgctggtcacaagacaccaaagtctccactggctgctccctcgttgcgaagcgatagcggagtctgtactgcctcgcctgtacagcgccgattactacaccgtgccatctattgtggagctcgccgtgggagagagggacgagccaggctattgctcacatgtgaagggcttcacggtcggcaggcatggctatggcagcgtaaagtttgatggagaaactgattggagaaggcttgatattggatccatcgtggagttcaatgagcgtgagattattgtgtacagagatgtgagcaatacgccgcctgttgggcaggaactcaacaagcctgctgaagtcactcttctgaatgtcaagtgcgtcgaacagaagaatgggttgcagttcacagaggggccggcagttgataggtacaaggagattttggtgcagtggacaaaggaccatggcgcagaatttgtgtcatttgacgcggccaagggagaatggaagttcagggttaagaatttcaatatgtagagtcctctgagaatctataattctcctatcagtaggctcctgtgtctggtagaagtaacaacatagtaatcctgtaaaaaatgtgttctttttgtagttcggtcacttggtacggatagctggatacttctggacgaaataactttagctataaaaactgcctttgttgcgt

SEQ ID NO: 22560 - DNA, 950 bp, Oryza sativa
  ref <308>: DATABASE ACCESSION NUMBER: AK072731
  ref <309>: DATABASE ENTRY DATE: 2001-12-06
gctctcgccttcgccaccttcgaatcgaaactaatcccccacacctccgcgtgcctccccccaatctcgagcgcacggaagccgccgccaatggcgctcccgaatcagcagacggtggactaccccagcttcaagctcgtcatcgtcggcgacggcggcacgggcaaaaccacctttgtgaagaggcatttgactggcgagttcgagaagaagtatgagcctactatcggtgtggaggtccaccccttggatttcttcactaactgcggcaagatccgcttctactgctgggatacagctggccaggagaaatttggtggactcagggatggttactatatccatgggcagtgtgctatcataatgttcgatgttacttctcggctgacgtacaagaatgtcccaacttggcaccgtgatttatgcagggtctgtgaaaacatcccaattgtgctctgtggtaacaaggttgatgtgaagaacaggcaggttaaagcaaagcaggttaccttccataggaagaagaacttgcagtactatgaggtgtcagctaagagcaactacaactttgagaagccattcctgtaccttgccaggaaacttgctggcgatggtaacctccactttgtggaaacacctgctcttgctcctccagatgtcacaattgatctagcagcccagcaacagcacgaggctgaactggcagcggctgcagcccaaccactgccagatgatgacgatgacctgatcgagtagatttgcaatgtgctactttacatcgtcttgcgaggagccctgtttttaagcacagttatatcctaagagatcttttttgcctcggagaaattttcgtggtgtccaaggttaaatatgggagttttgtcggatatttgaccagttcagacaagttttggttatcgttgattgatgctataaggttacttcgggtt

SEQ ID NO: 22561 - DNA, 2457 bp, Oryza sativa
  ref <308>: DATABASE ACCESSION NUMBER: AK072732
  ref <309>: DATABASE ENTRY DATE: 2001-12-06
ggttgcttcttgagttcctccatttctttttccacctgctgtgttcaattaattagaagaggaggcacgatcagggattctcagttcagtttcaagtctagcaacttctatctgaaggttgcaaagaatagaaaagctggagaatgcgtgtcaactttgagtctcgataagaatggatgaatcgaacattccatcgttcacgttaggtgatttcgaccctaactacgtgtcgaggtcattcccaactggtgagtatgatgccaccggatcggctccaacaccaccagttatggagccaccggcgggttcagaagcatccggcactatgagtgggagtgcatcgacgaacaccggctcaaagagatcaagaacttccggtgtttggcaacatttcgatgaggtggccatgacaggccctgatggaaggcaggtaacattcgcgagatgtagaatatgcaaaaataagttatctgcaaaatcatctggtggaacaggacatttgaagcggcatgccgaggcttgtgcaaagaagcaaggaatccaactacgacagcaacaactactactaaatcctgatggtacggtacgtacgtgggagtatgatcctatggtagctcgagaaaatcttgcccgtttaattgctagacaagatttacccttgaactttggtgagagtcctgcatttgaaaattacataaaaaattctcataatcctaggtttcaagctgttagtagacaaaccacaacccgtgatttgaaaaatgtctatgacaaaggttatgaatcactgaaggaattatttagtacatgcaccttttctgtcagtgtcacctcagacatatggagtagtagggctaaagaggattaccttagtgtagttgtacatttcattgatgatgattggcaaatgcaaaaaagagttcttggcttaaggttaattgatgtttcacatactggtgaaaatatagcagagagaattcgagaggttattgatgagtttaaccttgcagataaaatttttgctgtaacaatggataatgcatctgcaaattctagggccatggaaattctacaaccattattttgtatttatgctcaatcatttcttctgcatcagcgttgtgcatgccatatcattaatctaattgttaaatgtgggtttaagagagttaatgtacacatcgacgctgttcgtcaagcaatcacgtggttaactgcttcaaacccacggattgcacagtggaaaaggtattgttgtgcatcgggtgagcccccacgtaagtttttaaccgatgcagtccatcggtggaatgccacttattttatgttaaaggttgtattaccttacaaggatttacttactgttttccttcaaacacgtaatggcccaaaaaacagtgatggccagccaatactgactgatcatacctggcacattgttgaaaggttcaatcaatttcttgaaacgtttcatgactgtactcttctgttatctcaagtatattatccaacagctaatttaattttgcataatattcttgaaattgccactttgttgaaagagtatgaaaatgatgaccttttaatgcccgttgtctttaatatgaaacaaaaatatcttaaatattggaaagacatccccatgttgtattcttttgcatttattcttgatcctaggggaaaattacggggattcctcaatattctttcacttattggagatattattaatgttgattattctacctattatgctgatgtcaaaactaaattctatgaggtatttcgaaagtatgaattaaagtttcagggagatcgcttgcaaagacccccacctgtacctgcagcaggtaagaaaaaattacagtggagcagaatttggggcagttcatcttctagccatggtggtggtaccagttcatcagcagcaagtggggacgctagatcgcatggtcctgccgaagagttgtccaactatttggatagcgatgccatcaggcatgaaacgtcagacttcaacgtactcgggtggtggaatgatcataagatgtcatatcctgtgctatcaaaactagcacgggatgtgttgacggtgcccgtatcttcggtatcctccgaatcagccttcagtctatgcggaagaattatcgaggataggagaacaagtctgagcagcgatcatgtggaaatactattaagcgtcaaagactgggaacttgctgcagaacatgcccaatacactgctgacaaccaagaattggccgcacagttcgaaaacctttatttagatgacgaacaattagggtagctagtttatattttttaagtattgacctgttggctgtactcttttctttgtcatggttttctcaaatatgagtttttacatgataaagtttttaacgaggaagcatgtatcatgtaaacatcaataaaggtcattactcttttttcctc

SEQ ID NO: 22562 - DNA, 1089 bp, Oryza sativa
  ref <308>: DATABASE ACCESSION NUMBER: AK072733
  ref <309>: DATABASE ENTRY DATE: 2001-12-06
gtgaggtgacccatgtgcatcaatttgaatttatcagggaacgctttaagggtattggcaaagattccataatactaagctggctgcattcttttgttaagcagttttctgggtcagttactaaatcagactacataacaatgcgacttggatttatccagacacattgccgtgcgaacccaaagttcgatttccacagatacatggtacgagctttggaagcagattttaagaaagtggttggtataagctggtacttgtggatattcgttatgatattcctgctgctgaatgttaatggttggcacacatacttttggatctccttcgttccccttctacttttgctggccgttggcaccaagctagaacatgtcataacccaactagcccatgaggttgccgagaagcactctgcaattgagggcgacttggttgtgaatccatcagacgagcacttttggtttggacggccgaaggtgatcctatacctgatccattttatcctcttccaaaacgcgttcgagatcgcgttcttcttctggattctgaccacctacggtttcaactcctgcatcatggaccacgtcccttttatcctgacaaggcttatcatcggggccatcgttcaaatcctctgcagctacagtaccttgcctatatatgcaattgtcacacagatgggctcctttttcaagaaggagatcttcgacgagcatgtgcagcagggccttgttggttgggcgcagaaggccaagaagaggaaagggttgaaggagagcaacggcgccatggctggagctggatcaacaaatgggtcatcacagccatcttccattctacaaatggtgaggcgagccgccgctagcgaggaaggcagcagcaatggcggtgacatgcgcactaatcagtagtggcccggaagcagtgtgtgtttgtgacctactgaccgtcgagaaatgcagtgttgccgtgcacccagaaactgcgatcagctgtgctgtcagctatgttttgtttgttctattgtactactgtactctagcagacagtagtttgcatggcaatagtcaagaggagagttgtatg

SEQ ID NO: 22563 - DNA, 1357 bp, Oryza sativa
  ref <308>: DATABASE ACCESSION NUMBER: AK072734
  ref <309>: DATABASE ENTRY DATE: 2001-12-06
gtcttctcttgtttcttcccatcccatcctcttctcctccgcattttgctcttcattcatttgtgctgtgctctccacgcgccctcgcctctctttcctccgatcctccgcttcgttcgaatcccacaggtcagttgtggtgttcatatggatccctttttccgcagagcttccagtgaccccttgtgcttggaagacaactccgtccaacatggaattgaaagatgcccattcctaaggaacatcaatgagcctacaagtttttcattctcgtccgttaattttcctgttcctgcaagaggagacaagggtccaatttttgaagatggacccaattttgacatggcatttcgagttttccatggccaagatggggttgttccactttcacatggatcatttgagcgatttgagaagccaatgccaaagcccaatcctgaatttaaccccttggctgctaaagcagctaccatcagtctctctgcatttggaggttttttcagctttggtgatttctcaaataagcgcaataagaagaatagtaaccaaaagaagcccaacaaccttccccagaacggaggtcagcctaataaccatgaagcactgagcaatgagtggctggaaatgggtcaatgccccctggcaaagtcgtacagggcattaagtggtgtcgtgcccctcgtcgcaaagatgatgacacccccggctggtatgaaactgagatgcccacctgcagtagttgccgcccgtgcagcactatcacgcacagcctttgccaaggggcttcgtcctcagcccctaccgacgaaaatactggtgatggcgttgcttggtatggcagcaaacgttccccttggcatctggagggagcacacggagaaattctcagtgcagtggtttgccgcagtccatgcggcggtacctttcataggcatgctcaggaagtctgtgctgatgccaaagacagccatggcgcttaccatagctgcctcaatattgggtcagacaattggttcgagagctgagcgtatcagattgaagagggcagcaaaggttgctgctggtagccagggtgatgctagcaccagaatgagcctgaaaaccgggagatacactgatgatgtccagttctgggatccgcttgccctcagagttgagagtaccataggaacaggaactccggttcttgttccaactttccattgatgatgtgccttgggtttgtttcttcggtcgattattgttgtattcattgtgttgtgccttagtctttatactaaatattacgttggatgcttctcccatgaatctggggtccaaatttcagtgtacaataaattgcacgtgtacatttccg

SEQ ID NO: 22564 - DNA, 932 bp, Oryza sativa
  ref <308>: DATABASE ACCESSION NUMBER: AK072735
  ref <309>: DATABASE ENTRY DATE: 2001-12-06
gatccaaacagcttccttcctcccccctcctggctccgctcgctggatctctcctctttctctctcgcaccctctccccggcgaggtaggagggatggggcgggaggtggcggagagctgcgtcgacggggtggtcatgcagatggtggcggcctactgcggcggcttctacgccgccaagccggagctcgccgcccgtcgcatcgaggccatcggcttccaggtcggccaccagctcaccgagaggccagtgctgcaaagttaaccaaagtttctgttcaaaatcagatatactatggagcgccctcgatttagtgatcatcttgaagcaatcaaatttatctgcaaagacttttggtcagagttattcaagaagcaaattgacaatctgaagactaatcataggggcacatttgttcttcaagataaccatttccggtggcttactcgtgtttctgtagatccatctgtagagagcatggatgcaactgagaatgattctacaacactaggtgatagcgcagcccaaacaacaagcatgcttctgtactttccatgcgggataataagaggtgccttgaccaatttggggatttcttgttctgtcactgcagacatgtccaaccttccagcatgttcttttgttgtgcgcataaagacatgagctgcaataaatgatttgaataccattatatgcatgcttgtggtataaagtggtctgtacattcaaggaggggggaaacccgccgtgtagctggtcttttttttttttcctttcccctcttgttcttactggcacatgtttacttttcctcatacctgccttgtgcgcttattaagattggtgtaattctgtgatccaaaatgttgacaagggaagacaaatgtaatatttctcctgagagactggctatagctaacttttgttgtcg

SEQ ID NO: 22565 - DNA, 1808 bp, Oryza sativa
  ref <308>: DATABASE ACCESSION NUMBER: AK072736
  ref <309>: DATABASE ENTRY DATE: 2001-12-06
gactctcttcttcctctcctcatcagtcctcacggtctctctcgctcgctcacgcagtctctcaccacgactctcacgacctccccctgacctgacccagaggagcaggagagagcatagcacggcctgcacggatcgagcagcggcagcaggagctcgtcgcctctgcttaaacccccccccccccccaatatcggtctctcgccttgtcaccttacttgcttggctactactacttcaccacgcacagctggttggttggttggattagctagctactaggatcagtgcttcgcttctctctctctttgcgttgccgtcgtcgtcgccgctggtggtggtggtggttgttggtgagggagagatggaaggaggaaggggggtgacgagggtgctgctggtggacgactcgccggtggacaggagggtggtgcagctcctcctcagcagcagcgcatgcgccggctcattccacgtaatcgccgtcgacagcgccaagaaggccatggagttcctcggcctcaaggaagaaggcaaggagcaggccatcgacatggtgctcaccgactactgcatgcctgagatgactggttatgagcttctcaaagccatcaaggcgctgagccctctgaagccgatcccagtgatcgtcatgtcgtcggaaaacgagccccagaggatcagcagatgcatgaatgctggtgctgaagatttcatcgtaaagcctcttcaaagcaaggacgtacagcgtctcaggaactgctcgccggcgaacacgcagtgctgcgacgccgggagcgacggcaagccgccgctgctgctgctgccatcggaccacgtcgtcgtcgacgccaccgccgcgtcgccgccgccgccgccgtcccggcgtcgggcgcacttcgctggagttgccatggtcctgcactcgtcgagcgtcgagctgtcacattacttccctttcctcttcaagttcatcctgctggtgtacgccatcctgtgcctgggtgagctgctgcacagatggtcaaacggctgcttcctcaacctgtggtgtgcttgacgaatgaagcaaccggtgcagtccaaatgcaaaggcaggctgcaactggcaaagctctttcttgtttgcgatagctttctgcactgaaagagcagcatggagaggaggttaatgttacaacagatgatgatgatgatgatggaagttttaggtagattgtttgctttgagattctaacctggagcttggttcttcttggcctttgattgatgagaggagggaggaagaaccaatccttgtatccttgtacaaaaagcataatgaggcagtatctgatgtcctttttggttgggatcttggctgatatgtcgatgtgacattcagagagctttttccttgccctttcctttcgccgatggcaactcctcacctgtattgtagttcagatcccatgagaaaagaactacacaagttgactaatgcagcatcaggttcttctgatgggaaaagaaacaaaaattgcagatatcatagtacactttcgcctcaacggttgtaaacttgtaatcccattcagataggcgaaactgggcaatagaatgttgttttttctttcagttgtcacatttcaagctaatgacttgagatttttaaatgacagctatttacaagcctagtaatgtacaactgtgggtttacatattcacagtatcatctccttgtggaggcatgggatcacccatatttttgctacttccacatcttgagtcatgaacatattcatagctgtaagttcctttgatgttct

SEQ ID NO: 22566 - DNA, 1445 bp, Oryza sativa
  ref <308>: DATABASE ACCESSION NUMBER: AK072737
  ref <309>: DATABASE ENTRY DATE: 2001-12-06
gaggtggaggcaaggattgcatgagctaaggtgaggtgtgtccggcgtcgcgttcgcgtgcgaggtggtggtggtggtggctgtagtgtggaggtggtggggagtgtgaggagagggaggggatggaggtgggggagagggcggcgatggcgctgggagcggggttcgacctcacgtcggacttcaggctcaagttcgccaaggaagggcggctggtggagctcgacgaggccggggccagggacgtgcccgtgccgggtggcggcgtcggcggcggcgcggcggcggtgctacgcggggtgccgcgcgacgtcggcgtcgacaagggcgaccgcatccgcttccgctccgacgtcctcgagttcaaccagatgtccgagttacttaatcagaaatcttcagtccaagggaaggtgccttcaggctattttaacactcttttcgatttaagtggagcttggatgacagatgctaaagagactaaacatctagcatttgatggatatttcatctcgttgtacaagttgcacctaaaaacttctccattggttcttcgagatgaagttagaagtgctgttccaccgaaatgggaccctgcagcactatcacggtttatcaaaacttatgggacacacataattgttgaaatggcagttgggggtcaggatgtcatttgtgttaagcaaagtccttcttcaaccatttcatcagcggacctaaagctacacctggaagatcttggtgatttcctgttttctgatgggaggaatcattccccgatacatcgcaagaccagggatggcaagagcaaggtgcctgatgtttttgtcaggatggaacagcagcctaataacctacatctttctagctactcagaatcatcaaccaaagatggcctgacaattacatgctcgaaaagaggtggagatgcctctatagccagccattccaaatggttacaaaccgttccaagggttcctgatgctataatgtttaaatttgttcctatcacctctcttcttaccggcattcctggtagtggttacctcagccatgccattaatttgtatcttcgctataaacctgatcctgaagacttgcaacatttcttggagtttcaagtgcccctacaatgggcgcctttgttcaacgagcttatccttgggcctcaaaagagaaaaggctcctatccttcattgcagttcagatttcttggtcccaaacttcaagttagcacttctcaggtacttgattgttacattgcacaatctttttttttaaaaaaaaatttcttctttcagtttacaattcaccgtaacttttgaagcaccattatgtcagtaaacacgcactcgaaggtgcgaactagcagtggtggtgtgtgcatgtgcgtctgccctgtaaatgcaaagaaaaaggaaaacgtaaaactcgaggttcagtct

SEQ ID NO: 22567 - DNA, 2425 bp, Oryza sativa
  ref <308>: DATABASE ACCESSION NUMBER: AK072738
  ref <309>: DATABASE ENTRY DATE: 2001-12-06
gattctcatttcccaaagaccgcaaaaaaattttccttccatcgctcgccgcatttccctttccccctatgcggatccgctcacttgcatccaccgccattccccgcgtctgatccgtcgtcgttgtggaggatgagggaagggggagcgggcgaggggcagggcgcggccgtggatgaggcgacggggttcgaggtcgggatcgtcgtgcccaagctctaccgcggcgctgcggccgggtgcggcgaggtcgagaactgcgtggcgcggctggtgcgggagctggaggacgtagggctgatcgtcgagcgcgtccgcggcgtccccgcggagttcatcaagctgtctgcgcccatggggaccctggggagagttgcagcggagatgaacatgaagaagctaacttatatcggaatggaactgcagtttgaatgggaccaggttggagcattcgtcaggcagcccgacgggtccctgtttagctggcgagagcggtttgcctgcttccggcacttgatatacagcatcgtgaacaagaccgattctgatataactctcagctttgacgataaagagttccactggactcaaaatgagtcactcttaaccaggctggaagatgaaggaatcgtaaagctagtcttccctttgcatgatgaaattaaaaggaagcaactcctgagaagctgggcactcaagtggtttgatttcacatggcaacctattgatgaaatttactcttactttggaacaaagattgcaatatttttctttcctcggaatgtatacacgttggctgttctttccagctgtttttggacttgcaacccagctgatagattttgggtcattacagtggttggttcttccagctttctttttcttcgttatttcttgggctgtcttctttttgcaattttggaaacggaagaattcagctgtccttgctagatggggtataaattattcattttcggaatacaaaactatgggcaatgaactggaccctttaagcttttctatggctgatgacaatgttcagcagaggaaatttggtgctcccaaggagaaaagtatagtacaaagaaatgagtggtttggtgttctccttagaattaggaataatgctatcattgttttggctatcatttgtcttcagctgccatttgagttggcctatgctcatctatatgcgattacaaaaactgaggcgctaaggtatgtgttaactgcagtgtatcttgctgcaattcagtattacacaaggataggtggcaaggtgtctgtcactctaataaagtatgaaaacaaccaaggggaacagtctagtgctgatagtttggtttataaggtctttggtctttactttatgcaatcatatattggattgttttaccatgcttcactgcaccgcaacattatggcactccggcaagtcctaatcaagcgtctcattgtgtcccaggtattggaaaatctgattgagaattccattccttacctcaattatagctataaaaagtatagagctgttcacaagaaaaaacatgagaaagaatcgccagctgggaagtcagttcggttatctacaagagtagagaaagaatatctaaaaccctcgtatactgcaagcattggagaagaacttgaagatggtttatttgatgattttcttgagctaactcttcagtttgggatgatcatgatgtttgcttgtgcatttccgtcgatattctgctttgctgctctgaataatgtgactgaaattagagcggatgcattgaagttgttggtcatgttgaaaagacctgctccccgtgatgcagctacgattggagcttggctgaacatattccagttcttggttgttatggcaatctgtacaaactgcttgcttcttgtttgtctgtatgatgaggagggtaaatggaaaattgagccaggactggcagccatcctcataatggagcatgctctcttcttaatcaagtttggtttctcacactttgttcccgaggaacctgcatgggtgaaagcaaatcgtgggcgatatgtagctcaggcgcagaatgtctgctccaaacaactcctgagaagcattgcaaaactggatgcgaaattggagtgaggtatccaggttttatataaggcggcagtagttttgtagattaggatagtgcacaaatgtgtcttgtgcgagcacgtacaaattgtaggtaggtaacatcgtgcaaccactaactgttccaattggtaaatgtagatatcgctatataatttataaggtcctgcaagactgcaacatcaatgtaagaatgcaagggtgttcctttccttctaactatatatatttgttgagttgaactggggatgtatccccccatgtatgtgctgtgtattatctgaaattagaatagatttcact

SEQ ID NO: 22568 - DNA, 954 bp, Oryza sativa
  ref <308>: DATABASE ACCESSION NUMBER: AK099300
  ref <309>: DATABASE ENTRY DATE: 2002-08-28
ggttgcaaccgcgagcctcgctcgtctcctcttcctcctcctcctcctcgacatggtcagcgagcaaacggcgccggtggcgaccgccgaggcggagctggagagcagcgccgcgccgcccgtcaagcccgacgaggccgcggccaaggcgcagccggaggacgacgcccccgttgtggaggatgccaaggatgatgacgacgacgaagaagacgacgatgacgacgaggatgaggatgaagacggtgaacaaggtgcaatcggaaacgagggctccaagcagagcaggagcgagaagaagagccgcaaggccatgatgaagctcggaatgaaacccgtcacgggagtcagcaggattaccatcaagagagccaagaatatactgttcgtggtgtccaagcctgacgtcttcaagagcccgacgtcggagacgtacgtcatattcggggaggccaagatcgaggacctgagctcccagctgcaggcgcaggccgcgcagcagttcaggatgcaagacctgagcaaggtgatgtccaagccggacgcggcggcggcggcgccggccgacgaggaggaagaggtggacgagacagggatagagccccgcgacatcgacctcgtcatgacgcaggccagcgtgtcgcgggccaaggccgtcaaggcgctcaaggcgcacgacggcgacattgtgagcgccatcatggagctcacggcctgaagccccctcctgctgctgcattggcaccacctctcgtcccccatttcagtatcgtgtttttttttatggcgtttcgtcgtgggtttgcataagatgccctgtttgttcagctgctggactttgcatcaaacttttcatagcatgttcccatattagtgtcatcttaaatggagttttcagacttgtttgaacggcaacaccaatagagttcgatactttgagtcaattaagaggag

SEQ ID NO: 22569 - DNA, 892 bp, Oryza sativa
  ref <308>: DATABASE ACCESSION NUMBER: AK072739
  ref <309>: DATABASE ENTRY DATE: 2001-12-06
gacaccagttgagtcgaactgttgaggaatcgctcgctcgctcgctcgctcgccggcggcgcggacgaggagggggcgagatgttcttccacatcgtgctggagcggaacatgcagctgcacccgcggcacttcggcccgcacctccgcgacaagctcgtctccaagctcatcaaggacgtcgagggcacctgcagcgggcggcatgggttcgtggtggcgatcacgggggtggaggatgtcggcaaggggctcatcagggagggcacgggctacgtcaccttcccggtcaagtaccagtgcgtcgtcttccgccccttcaagggcgagatcctggaggccgtcgtcaccatggtcaacaagatggggttcttcgcggaggctgggcctgtgcagatcttcgtgtccaaccatttgattcctgatgatatggagttccaatctggggatgtgccaaattatactacttctgatggatcggtgaaaattcagaaagatagtgaggttcggttgaagattattgggacacgtgttgatgcaacagaaattttttgcattggcacaataaaagatgacttcctgggcgttatcagtgatcctggtgcggcagtgtaaattatccggtgacaagattacgcctcttcatgctcttgaacgggaatattccgatgaattgtagtgttaaaatatggaagccccactggaaggggctgtaagtgggttggaacctgtattttcatcactataaatggcgctttaccaagttggcactgttgcttgagtgtgttgtgggattcaactttcaagcagtcatttaactaatcaaactctgacctttttacggactgtacaattttgcactgtatccttgcaattaaacattcaatgcttcg

SEQ ID NO: 22570 - DNA, 1466 bp, Oryza sativa
  ref <308>: DATABASE ACCESSION NUMBER: AK072740
  ref <309>: DATABASE ENTRY DATE: 2001-12-06
gagtagcacatatagtactgcacgaagaactacaccatggcgcaaaatgtccaagaaaatgagcaggtgatgagcacggaggacttgctccaagctcagatcgagctctaccaccactgcttggccttcatcaagtccatggcacttagggccgccactgacctgcgtattcccgacgccatccactgcaacggcggcgctgccaccttaactgacctcgccgcccatgtcgggctgcacccgacgaagctctcccaccttcggcggctcatgcgcgtgctcactctctccggcatctttaccgtccatgacggcgacggcgaggccacctacacgctcacccgagtctctcgccttctcctcagcgacggcgtcgagagaactcacggcctctcgcaaatggtgcgcgtgtttgtgaacccggtcgccgtggcttcgcagttcagcttacacgagtggttcactgtcgagaaggcggccgccgtgtcactgttcgaggtggcgcacggctgcacccgttgggaaatgatagcaaacgattccaaagacggcagcatgttcaatgccggcatggtagaggatagcagtgtcgccatggatatcatcttgaggaagagcagcaacgttttccggggcatcaactcgcttgttgatgtaggcggtggctatggcgccgtagctgcagccgtagtgagggcattccctgacatcaagtgcacggtgttagatcttcctcacatcgtcgccaaggctcccagtaacaacaacatccagtttgtcggcggtgatctttttgagttcattccagcagccgatgttgtgctacttaagtgtattttgcactgttggcaacatgatgactgtgtcaagattatgcggcggtgcaaggaggcaatctcagcgagggatgctggaggaaaggtaatactcatcgaggtggttgttgggattggatcaaacgaaactgttcccaaggagatgcaacttctctttgatgttttcatgatgtacaccgatggcatcgagcgggaggagcatgaatggaagaagattttcttggaggctggatttagtgactacaaaatcataccggtgctgggtgttcgatcaatcattgaggtttacccttgatgctcctagaggtgtacatgtgcatctcaccatgtgacctactctagttcaaataattgaacaaaatgcataatatgttacttaaaaaccgatcggtttgatgttagtattttgatttccttttattcaggagtcagtagtgcgcacgatcacaccaaggccactgttctcattttcctatgtatgagctacaatacgcacgccgttggatggcacggcttatgcgcatcgtggctcaagtctcgggcatgttgttagcccaaaatttccattcctatattcaacataataagaggaagagaaaaccgaaaagctgcaaggcagttcgcagcacc

SEQ ID NO: 22571 - DNA, 3562 bp, Oryza sativa
  ref <308>: DATABASE ACCESSION NUMBER: AK072741
  ref <309>: DATABASE ENTRY DATE: 2001-12-06
gtggagacgggtggtgtgtgtggaaagcgcggggcggggcaggggcaaaggcagagaaaaaggctgctccaattggccctgccaccgaggcacgtggcctcttctgtccttgcccctctgcgctgcgcctcactcccggcctccctccctccccacccaaatcttcctcccccttccccttcaaggcctgggcctgggtgcttctccggggcggcactctggacggcggcggctgcgaagcgggagtgtggaagggttgaggtgtgagaaccaggtggttgctccaacctttggggttcaaggaagatgggtttcatgtcagcgaagctctttccttcgtgtgagagtatgtgcgtgtgctgtccagctctgcgcccaagctcgcggcgccctgtcaagcgttacaagaaactgcttgccgagatattccccaagacgcctgatggccttccaaatgagaggaaaatcatgaagttatgtgaatatgcagcgaagaatcccctgcgcattcctaagattgccaagtttctggaacagaggagtcacaaggagctacgttctgctcatgtgaactttatcaaaattatcactgaggcatacagcaagctactcttcatttgcaaggagcaaatggcatattttgccattagcctggtgaatgttcttactgagctcctggaaagcaagcaagagaacattcatattcttggatgccaaactttggcgaagtttatttatagccaggtggataacacgtatgcacggaatattgaaagcttggttcgcaaagtatgtgtgctctcacggcaacagggagtggagcacagtcttctccgggcagcaagccttcagtgcttatcagcaatgatctggttcatgaaggagcattcgtacatatttgtggattttgatgagattgtgcagtcagtcttggagaattatagagtggaagaatctgctgctggtgacgaagaaagacatgcaccgcagcataattgggttgatgaaatagtaagacgtgaggggagagctggcttaggtggtggtaatgatgtaaattgcaacagtacagctattagactgcgatcagctagggattcttcagccctgaccagggaggagcgtgaatctccagaagtatgggcacacatttgtgttcagaagcttgctgagctggccaaagagagtacaacaatgcgacgcatcctagatccaatgctttcttacttcgataaaaagaagcaatgggctcctcgacagggattagctttgcttgttttgtctgatatgtcttatcttgaaaaaagttcaggcaacgaacaattgattttaacttctgtcatccggcacctcgaccacaaaaatgttttgtatgatcctcagattaaatctgatatgatccagacagctactttattggcacggcagctacgatcacgaggaattgctgctgagcttgtagtagcaggtgacttgtgcagacacttgaggaaaacactagaggccatggagtcagccagtattgaagagctgaacttgaatgaatcacttcaaaatttcttgcaggactgtcttctagaagttgtcacaggaattaatgatgtgcggccgctctatgacatgatggcaattacactggagaatttgccttctatgcctgtggttgccagagcatcgattggaagtttgctgatcctttcgcacataatctccttgacatcaatgtctttaaacgctcctatgctgtttccagaagcactcctccagcagatactgaagtccatggtacatccagatgttgacactcgtgtgggggcacaccacatgttttctgctgttattgttcaaggaccaagccgtcagaggagtgaatcagactttctatatgaaacaaaaaaatggcagtctcggactacatcagtatttgcttcagctactgctctacttgagaagttaaggagagaaaaagaaagtttaggttctgataagacaggaaacatggatgatgagaaggaaaaaagcataagtgaagaggaaaataaacatgtttgggcacgtaaaaactcggcttatttttcaaagctggttttctctttcactgatcgatatgcagcactaactagttctgcagaggaggctaatattgtcatgctaactgaagatcaaaaaaatcaattgctctccgcgttttgggtacaggccattcagacagataacactccttttaattatgaggcgattggtcactcgtacagcctcacggttatttcttctcgccttaaggattcaaggaaccgtaataacattcagttttttcagttgcccctgtcccttcgtagtgtttccttaacctcaaatgggagtcctttccccttcttgccagccgtctatttttaccttggcaacaagcatgctagcttttgctgggaaagtctgtcacattactgaattgtttgatgtgctgaggtgctttacatcttgccatatggatccttatctaagaattggtgaagacttgcaactctatgtaaggttgccatctgatctaggtaactatggttctgatagcgatcaagaaatcgctagatctgtactttctgactgcaggacaaaagtggggattaatgatcagcgagtacttgatgtagttgcttgtgcactgtgtaatttaactgagatggacaaggatgtactggtgaaggagctcacagaaatgtttacacctgaagaggtgcccctgtttgggtcaaattcagcattggactggggcccattttcatttcaggccttttctgatgaatccctttcttttgatgaggagtgttcaagaacctcttcactatatggtgggtggcatgagtcaccaattacaaacaccggtagctcgatataaaagactagcaatgccacaatctgttccctcgtgtcttaggtgttggccagttgcttgaatcggcgttacatgtagccggccaagttgcgggagcatctgtttcgacctccccgctcccatacggcacaatgaccagtcaatgcgaagccttgggatcaggcactaggaagaagctctcaagctggcttgtcaatggccatgactctacgccagacaatcctgctccaagccttccatctgcgcagcatttcatcattcctaaagtaaattcatgcggtttcgagagcagcatccggacgactttggagccttgctcggcagtgaagctcccacccgccagccccttcgacaacttcctgaaggctgcatatcgtgcccagtagcagccatgacaagccttcgagattatgcctaaccatgtttagtagtgctaggatgtagtacctgagcatcagaactagattatcttttgaaagacttggccgatctggcttatcctttattatctgtagcactgttagttgtagtagcttgtgtatcaatgtatggctatgtctgtgtccctccagtaaatgacaatcgtatatgtactatgtagtatgaccatgtagcccactagtaaatgtttgtagggtatgtatgaccatgtatgaccatattgtttttttg

SEQ ID NO: 22572 - DNA, 768 bp, Oryza sativa
  ref <308>: DATABASE ACCESSION NUMBER: AK072742
  ref <309>: DATABASE ENTRY DATE: 2001-12-06
gttccacaagagtcaaggctcacagaaatctcaccacagataatcttgttagtttcttgagaaagatggaagctgcagatgtagccaaggaacatcacaaggaggagaaaaaggacaaggaacacgccaaagaggcgaaaccggagaaggagaagaaggagaagaaagagaagaacggcgaagaggcggcgaaaccggccaaggagaagaaggagaagaaagagaagaaggagaagggcaaggagaagaaggagaaggtggaggagacgacggacgtggccaagctgcgagccaagctggagaagctggacgccaagatcgacgacctcaaggccaagaagcaggagatcgtggcccgactcgtccagctcgaggagggtgcgacggcaaatgctgctgctgcagatgcggcaccacctgccagcggctgaggaggaggtgatctgggattcttaggcagttcttgcaattggacaagaggagaaattacaaacattttcagacatttgcaggatttgcagctagtgacgatctgtttctgaatggaagctttggtacagaaatttttgccttcttacgatgatgatggtctcaagtcgtctttgctgaagaccatggcgccattgagtgttgcttgtatgatatgatcaggaagtgaaatttatagcgcaaatgagtttcatttgcaagatggtgttggagattatgtatgtgtcacgataattttacgacaagatcgattcaaattttctaaaagaatcaattact

SEQ ID NO: 22573 - DNA, 1745 bp, Oryza sativa
  ref <308>: DATABASE ACCESSION NUMBER: AK072743
  ref <309>: DATABASE ENTRY DATE: 2001-12-06
gtgcggccgcgggagctccacggcatcgatcgccatcctctcctccgcaacaatggcgctcgcctcctcctcccgcctcctccaccgcttctcctcctcctctctgccgcgaccctgccggcgacgggtacccaggccacgcggccacagccgcttcgccgtgcggtgggagcaccgggcggcggcggtggtgctgctgctgccgagagctctcctcggaggaggattccaggatgccgatgcggctgagagtgacgacgaggaggaggaggatgcccatggcgtcctgcgcccgctcgacgctgacgacgtcaacctcgacctccacgcgcctccctccggccccgagcgctgggacgtcctcggcctcggccaggccatggttgatttctcagggatggtggacgacgagttccttcacagattgggcatacaaaagggtaccagaaaggttgtcaaccacgaggagagagggcgtgtcttgcgcgccatggatggttgcagctacaaggctgccgctggaggctcactgtccaactcgcttgtcgcgctatcaaggcttggtagtagccgctccactaactaccccgagcttagaatcgcgatggctggcagtgtgggcagcgacccacttggtagtttttacagggcaaaattgcgccgtgctaatttgcatttcttgtctaagccggtcaaagatgggactactggaactgtgattgttctaacaactccagatgcacaacgaactatgcttgcatatcagggaacatcgtcaactttgagttatgattcagatttggccagtctagtgtccaagtcaaatgtagtaattgtggaaggctacctatttgagctacctcacacgatcgaagccatcaagcaagcatgtgaagatgctcataagaatggctcacttattgcagttacagcatcagatgtgtcatgcatcaagcgttgctacaatgatttttgggatattgtaacaaactatgcggacatattattcgccaatgccaatgaagcgagggcattctgcgagctaagctcaacagatagccccatgtcagcggcaagatacttaagccattctgttcctctagtatccgtgacagatggtgtgcacggttcatacattggagtgaaaggggaagcgatatacatccctccaccaccatgtgtacctatagatacatgtggggctggtgatgcatacgcttcagggattctatatggcattcttcggggctcttcggatttgaagagcattggcctgctcgcttcgcgagtagctgctattgtcgttgcgcagcaaggtacacgcttacgggttcaggacgccgacagattggccgaatcattcacacttcacctagataacctggagttttgttcagatattgaaacagaccatgtttcaaacttctgatcgttttagctgaaagtcgtaggacttccatttgtatatagcatctgtttacttttaggcctagctagctcattgttcagtacagctgagctacccagcttgtcagtcctttcagacgtttgttacaatttcattccttaaatttggttccagaaaaggatgctacatacttcatggatttcatattgaactgaagatattactcctagataaggcagtggcaatagttcatgtgctttcattggttcttgtgtacactcaagatacatgacatattttttatagataatgagagacatgacatataatcttggcc

SEQ ID NO: 22574 - DNA, 1087 bp, Oryza sativa
  ref <308>: DATABASE ACCESSION NUMBER: AK072744
  ref <309>: DATABASE ENTRY DATE: 2001-12-06
ggcctttccccgttttcaaaactgacccctcctctctctctctctatctctcctcctccctcatcctcctctcctctctgtgtttctctcgttcctcgcttccttcgcttcgccccccttctggcatccttcctcgcgcggcctctccctcccatggtcctcatggccgccgtcgacgaccacgaccgccaccgagccggcaattcctcgtctccttcggaggattccccggctccggctccggctccggctcccgctcccgctccgccgcagccgtcgcgcacgcggctccacagcttctcgttccccaccctcagctggggcacccaccgcctcctccgctgctccaagaaccccgcctcgtcgccccctcccgcggcgccggacaccccgtcgccggacaaggagaaggcggcccaccgctccaccgacggcgtgggcggcggctgttcgcctcagcggggtccgcagcggccgtggaacctccgcacccgccgctccgccacggccgcgccgcgtccggagggatcggacgacgcggccgatgccgcgccggatcgagcgccatcgccgctggcggcgaccaagaagcgggtgttctccatcgtgctgtccaaggaggagatcggccaggacttcaaggcgatccgcgggactcgccccccgcgccggcccaagaagcgcccccgcaccgtgcaacgccagctcgacttgctgtaccctggattgtgcctagcggacctgacgccggagacatacaagattgaagagaggtgattggtgttatttgtgaaagctccaatgggaggggattttcagatgttctgatatcttttctcttcagatgttctgatcgttttccttttgttatgtgatcatgggctaacaaggttgcttcagaaccgtaatgttctggacgggttaggggaagtttagttgggaatctcctctaattatgtattggatgtggttgttgaggagtttaggttgtggaaattgattattgggcttgtaggattgttaattgtataaagtgtaatcatctgtacattgtactattaatctatgaagaattttcgttattacg

SEQ ID NO: 22575 - DNA, 1185 bp, Oryza sativa
  ref <308>: DATABASE ACCESSION NUMBER: AK072745
  ref <309>: DATABASE ENTRY DATE: 2001-12-06
gggaggagccgaggcggggggagggaggccatgatgccgccggcgataagcttggctcgctctccgacgtcgtccgcctccgcttctcctctctaccccgtccgccgatccgccgcagtcgccgtccggcaccaccgctgcccgtccttcgccaccaaacccgctgcaggagtttgctgtgccagcccggcggttgaattgttgccatctttgagcccagacatcctggttcgagatgcgcggctagaggattgctgggaagtagctgatactcattgcagctcgttctttccagattacacttttccactggaccttgttctacgtattgatcgttacattgccctcctatccggtttttcggttccacctggctgcatgagaacttgccttgtcgccgttaacagtaattcgcttagtagaagtatcagcattgaatgtggagatttaagagatgctgacttccaagaaaaacacggtctcagtaaggcctccatagctggcattcttacagtagacacggtggcagactatcttcccagaagagggcctctcaagcagagaagaacaggtattgcatatatagcaaatgttgcagtccgaaaggaagaacgtcgtaaaggaatcgctaaaatgcttgttgcagaagcagaggagcgagcaaagagttggggttgccgatccatggcattacattgtgatgtaaacaacattgctgcgctgcgtctgtacaaaaatctaggatacaaatgcatccatgtaccagaagatgctaagtggccagaacctaagatagcaaaaggagtgcgatacaactttatgatgaagctagtacccaagatgtagtgtatatgatcagaacagagaaactgagacacagcttcacacttgaagctattacccaagatttgaagtgtatacgatcagagtagagcaattgaaacatgtagatactacagtgatgtgcgagctcattcacttcacatgtatagtagctgtatagtggagactggacagtacattgtatggcatataattgctatgtattgttttgaagtagtaaccatgacatcattccttcactcagagctcctgagaagtagcctgaagaaggaaacaaaccatacagcttccaacattatttattgttgttctcaatatatgatgatatcccccttttcccct

SEQ ID NO: 22576 - DNA, 2300 bp, Oryza sativa
  ref <308>: DATABASE ACCESSION NUMBER: AK072746
  ref <309>: DATABASE ENTRY DATE: 2001-12-06
gatcccgacccgatcaaaatcgaagcttccgccgagttccccgtcgccgactcgcctggatcggcccgccgtcgagctcgcccccgaccatccgctcgattggaggccggggagctgcgtctggtggtgaatcgcatccgccgcggagcggttcgatttcggcggcggatttcgcgggggtagaggagatcgaaggggggcagagcagccatgagcgaggtgttcgagggctacgagcggcagtactgcgaggtgtccgcctccctcttccgcaagtgcaccaccgcctccgccctcgatggagagaaaaagaagcagaagctgtccgagattcagtccggcgtggaggaggctgagtcgctgattcggaagatggacctggaggcgaggagcctacaaccgagcgtgaaggccggtttgcttgcgaagctgagggagtacaaatctgacctcaacaatctcaagagtgagcttaagaggatctcggcgcccaatgcaaggcaggctacacgggaggagctccttgagtcaggcttggctgacactctcgcggtgagctccatgatttgtattactagctcaatttgaccatattgcagattttaataattggcagcatctagttttgtttgtccattgtgttgctgtagtttgtagttttaatctatatcacaataggtgttttacgtatatcacgggcacaaacgactgacaggtagcattcatgagctcataatcactgatactagctgtacttatatttttttaattgtgatacttgttattggatggttaattgaggctgaattaatggtggttgttttctttttttttccccaaatctgtaccatttatgtatgtatcactgacaatttaatggttcttaagttctgtattggtatgtgattaatagtgttatgctgaacttcagttagaataaggtatttaaatattttaatatttgtgcaatctggattttagttttttcattgtatttaaaacctttaaacaatgagagcttcattttgtaacatgttcttgccactcaaggtttttcctatatgtgttttttgtgtctgttacatggcaacgttgtaattcagtaggagtgtatatcatcagtttatttccagttgtggtttattttcagatctggacccttactgtcaccattatcaactgtactacagatttcacacaatctcaatgagttctctgtaactattttgttttgaaatttcctacataattttctcattcatttgttaatgtggacacaattgacagatgtgtattatacaagatatttccattctgatcttcatggtacaattctgtagtcgcatgagtagtgagaactgtttcttgtcaaatttgtgtggtccaatttggtccttgatgaatatccgttgttctgattaaaaaaaaatgctgatctgtcaggagaataggaaatcggagttaacaccctcagaaactgtcctttctactttcagtaatctgcttaatgtttttgcgaaatgaatacattatccagccaatgtattcctggatgttgaaaagcttttgggaatgctacctttgcattctttgtccgtcatatttttctgctgatataatatcttatatcataatgcctcagcattacattgattctgatttcttaaacattctctcaaagttaatgccgttttttcttttgttgtttttcatgttgtaactgggattattatgtaaatcaggcgtctactgatcagaggggaagattgatgatgacaacagaaagactgaatcagtccaatgataagattaaagagagccgaagaaccatattggagacagaagaacttggtgtgtcaattcttcaggatcttcatcaacaacggcagtcactgctgcacgctcatactactttgcatggggttgatgataatgttggcaagagtaaaaagatcctggcggcaatgtcaaagaggatggacaggaacaagtggatcattggggggataattgcagctcttgttctagccatccttctcatactgtactttaagctcgcttattgagcttgctttctggtagggtcttcaaagcaatttccgctcagtaaatgtgtgataaaatagttgcctgaatgttgtacattgggcaacacatatctctgcaagcacacacttgtttccccaaacttatggtatttgtgtggctcatcgcccatgtcatgtaatgtacagttaacgtgcactccaatatgtgaaatgtctaaaaagggcttaaaatgaaaggtgactcatttatcc

SEQ ID NO: 22577 - DNA, 1368 bp, Oryza sativa
  ref <308>: DATABASE ACCESSION NUMBER: AK072747
  ref <309>: DATABASE ENTRY DATE: 2001-12-06
gacctcgcaaatcacaagcaacatcaccacagatcgatcgagacagctactgacatcaacgtgaaaaagggaagaagaactaaccatgtccatgcaggagatgctccgcattggagacgacgacggccggagcgatgctctggaacgcgagctcaaggagaagctgaggttgcgcggcgatgcctcaccggcgaaatgcaccaggcaggagcagcggtggcggtctgatcatggcatcgtcgacgcccgcgagaggttcgtgcaggcgtacggccgcctcagggacgatctcgtcggcgacgactcgtgcgagctcaccgacgaagccaggcgctggcttgctcagatgatcgactacaatgtacctggaggaaagttgaaccgagggctgtcagtgatagacagttacctgctgttgaaacaaggaagtgaggttactgaagatgacttcttccttgcttgtgtgcttggttggtgtgtagaatggtttcaagcatgtgcactactacttgatgacatcatggacgattcacataccaggagagatcagatttgctggtaccggcgacctgaggttggcctcaggggtataaacgatggtatcatactaaaatgtcacatcttgataatgataaaaaagtatttcagagaaaagccttactttcttgatatcttagaaatatggagcgagatagctctgcagacttctctggggcagatgcttgatcttattagcacacatactggagcagatgatcttgcaaaatacagtattgaaggctaccgtcgcattgttaagtacaagacagcgtactactccttttaccttcctgtggccaatgctttgctcttatctggcgcaaaacttgaagacttcagtggtctaaaggatatacttattgaaatgggcatatattttcagatacaggatgactacttggactgttttgctgaccctaacaccataggcaagattggaactgacatcgaagatcataagtgttcctggttaatagtacaggctcttggtcatgctgacaacaatcaaatagaagtactacataggaactatggcaagaaggattcaagttctgtttccgaagtaaagaggacttacgcggcgcttgatttgaaagatatcttctccgagttcgaacgtcgatgctacaaccacctggtcacctctatcgaagctcagaaggatcatgcagcacgggagatcctgatatcatttctgaagaaaattcatcaaaggaagaagtagttaataagttataacaattatgacctgtatgagcttatggtaacatttaaaaatgatcgaaatctatctccccataagttataataacactatctccggtttcg

SEQ ID NO: 22578 - DNA, 1559 bp, Oryza sativa
  ref <308>: DATABASE ACCESSION NUMBER: AK072748
  ref <309>: DATABASE ENTRY DATE: 2001-12-06
gagtggctaagagaggaagaaggagagaaacatctagagtgaataagaaagatggggttcgtccgtgccctgttcctgctggcgatggtgtgcgtggcggcgcacgcgaaggactaccccaaggaggagggcgcgaaggcggaggggccggccgccgcctcggggggcggcggcggtagcacccacgacgtggtgaagctgggcggcaagggcgacggcaagacggacagcaccaaggcggtcaacgaggcgtggacggcggcgtgcgctggcaccggcaagcagacgatcgtcgtccccaagggcgacttcttgacgggtcccctcaacttcaccgggccatgcaagggcgacatcgtcatccagctcgacggaaacctgctcggctccaccgacctcgccttattcaagtcgaactggatcgagatcatgcgcctcgaaagcctcgaaatcagcggcaagggcaagctcgacggccagggcgccgccgtctggagcaagaactcctgcgccaagaaatacgactgcaagatcctccccaacactttggtgctggacttcgtgaacaacggtctcatcagcggcatctctctggtgaaccccaagttcttccacatgaacgtgttcaagagtaagaacatcaccatcaaggacgtgaccatcaccgcgccgggggacagcccgaacacggacggcatccacatgggcgactcctccaagatcagcatcattgacacggtcatcggcaccggcgatgattgcatctccatcggccccggcaccgagggcgtcaacatctccggcgtcacctgcggtcctggccacggcatcagcgtcggtagcctgggcaggtacaaggacgagaaggatgtgacggatgttaccgtcaagaactgcgtgctcaagaagtccaccaatggcgtccggatcaagtcctatgaggacgccgcctcggtgctcaccgcctccaagtttacctacgagaacatcaagatggaggacgttgctaaccccatcatcatcgacatgaagtactgccccaacaagatctgcactgccaacggcaactccaaggtcaccatcaaggacatcaccttcaagaacatcaccggcacctcctccacgcccgaggccgttagcctcctctgctccgacaagctgccgtgcaccggcgtcaccttgaatgacatcaaggtcgagtactctggcacaaacaacaagaccatggccgtctgcaagaatgccaagggcactgccaccggctgcctcaaggagctttcgtgcttctaaacgatcaacccacgctacatcctgccaccaccaccattattttttcatttctatttctattttccaggtcacttatagtttttctctggcgatgctctgattggattgttctgatgcagtcggactatccgactgctctatagtcagattgtctgcagtggtaccggactatccagttagttctaagctgtttgtaagtttaagaaatttttggaaatacctattcatccctctaggtgacatatacaatcctcaagactctttcaacc

SEQ ID NO: 22579 - DNA, 381 bp, Oryza sativa
  ref <308>: DATABASE ACCESSION NUMBER: AK099301
  ref <309>: DATABASE ENTRY DATE: 2002-08-28
tagttgccaaatcccaaatccgccgcggagcgaaagggtgggagatcggaggagaagaaggaagatggtgaaggtggcgacctacttcgccatgaccttcggcgcgttcctcttctggcagtccatggacagggtccacgtctggatcgccctccaccaggacgagaagaaagagaggatggaaagggaacaggagataaagagaatgcaagctgagctaatggcccaagcaaaggagagtgaatcatgattatcatttggcaatggttttagtagttgctttgtcaaatttcttccttggaatgtactttccaagtgataatgcttggctgatgtattctccacagctccaataaacaagagatcttataactttttgtc

SEQ ID NO: 22580 - DNA, 1132 bp, Oryza sativa
  ref <308>: DATABASE ACCESSION NUMBER: AK072749
  ref <309>: DATABASE ENTRY DATE: 2001-12-06
gaccatgactgcaaaatttccaagtttctcgctagtttaaatgcacgccgctagcttagctactctcttccacccacaacccccaagcatcagcatcacaacccaccaatcgaatcgatcgaacaagacacgacaccatgcgccgccgcgtctcctcctcctcctcctcctcctcgtcctcgtcgccggcgaggcatcacaaggcgcggcgcagcaggaggaagctcgccgtcgacgaggactgggaggccgccttccgcgagttcctctcccgcgaccacgacgacgacgacgacgaccacgacggtcagcatgtcgttgttgcgccgttgatccgtggtagtgacaagtgcgtccacggccacgaggtggtggcgtcgacggtcggcggtggcgcaagcggcggacgacgacgagccgacgacgacgacggcgagcggcggcggcggcggcggagggagaagcggagctacccgtaccgcggcatccggcagcggccgtgggggaggtgggcgtcggagatccgcgaccccgtcaagggcatccgcgtctggctcggcaccttcgacaccgccgagggcgccgcgcgcgcctacgacgacgaggttcgccgcatctacggcggcaacgccaagaccaacttccccccatcgccgcccacgccgccgccgccggagaagccagcggcggagaggagcccctcgacgacgccgacgacgaccacggaggactccggcgactcgcgcatactcatcgagtgctgctccgacgacctgatgggcagcctcctcgccgccttcgacatgaccaccggcgacatgcgcttctggagctaacgaacaacagagcagattcaggacaacataaacggcacgtctttgcaaccttgacatgcgactcgcctaataatcttgtcaaacaagggccgccagcttaattagctttttccaaaggtggggaacaattttgggggatgcaattaggacgcacagagatgaccccaacttgtcaatgggaattgaactctgatgacctttgtaatgataatcaaggcaccacattgtggggttaagcaaagttttggcaaattagctttgccttgcaggaataaatcagcatttctttttttttc

SEQ ID NO: 22581 - DNA, 2066 bp, Oryza sativa
  ref <308>: DATABASE ACCESSION NUMBER: AK072750
  ref <309>: DATABASE ENTRY DATE: 2001-12-06
ggatgccacttctttggtttcatgccaaaagaatctgatctttgaagaattggggatttagggttccaagaactgggagtctttcatgctgataagtgataaggatagcttatccacaatttgggatcttccctatggctgttggaatgaatttgatttcctgatttcttttccttccttttttttcttgtgtttcttgtaatgatattattgcttgctgtaacaagcaagaatgaagagatggagatttgaggacagtattaaatgcaaaacactttctgattttacaagattttgtggataacaactgcaagatcttgaaacttcttgatgattcaatccaaatgagtagcagctcaaccctcttacatgatgaaaaaatgtgttttattttattttttgtcaggtttttgaaggcccccttgtgaattccctgttgtccatcagacaaggaggcctcaagatgtacatcatagaggacaaagggggtgccattgccctcatgctggcctccctcttcttcctggggacatggcctgcggtcctcaccctcctcgagcgccgaggccggctcccgcagcacacctacctcgactactcgatcacgaacctcctcgctgcggtcctcatcgcgctcaccttcggtcagctcggcgatagcaagcccaacatgcccaatttcttcacccagctcagtcaggataattggccttcagtgctgtttgcaatggcagggggtgttgtgctcagtatagggaacctctctactcagtatgcatgggcatatgtaggtctctcagtgactgaggtcatcagctcaagtatggttgttgtaataggcacaacactgaattatttcctggacaaccgcatcaacagagcagagattcttttccctggagtggcctgcttccttgttgcagtcattcttggctctgctgtacatgcctccaatgcagctgataatgaagaaaaactaaatggctccacaaatatctataaacttggggaaaatggaagtgtggaacctaacaaagaagtcatagaaaaagatgctcccaaggacttggagaatggagcttctgcaaccaaatatgttgccaaagctgaagcaggaactgcggaatacttgattgagctcgaagaacggcgttcgatcaaggtgttcggatcaagcaccttcatagggcttgggatagtgttcttctcaggagtctgcttctcactcttctccccggcattcaacctcgccaccaatgaccaatggcacaccctgaaacaaggtgtaccacacctggtggtgtacaccgccttcttctacttctcgatctcgtgcttcgtcatcggcatcggcctgaacatcctgttcctctaccgtccaatggccggtgtgccgaaatcatccttcaaggcttacctgaatgactgggaaggcaggcagtgggctctcctggctggcttcctatgtggctttggcaatgggtttcagttcatgggtggtcaggctgctggctatgctgctgctgatgctgtccaggcattgccacttgtgagcacattctggggaatactcctgtttggggagtaccggaaatcgtcgcgaaagacgtatatcctgctcgggttcatgctgttcatgttcatcgtcgcggtcgcggtgctcatggcttcatcaggtcacaggagcaccaagtgattgattcaaatcctttcatctcttgccttaatttggtgtttgcaagcgcaaaccactcttgctgtcagaaaacaaagaagttcaggcagcaatgcagggggggacttcagtccaggtctccaggaagcagatcatgccaacatggaatgaaactccattcatgaaatttccatttggatggagctgtacataaggggaaaaaaggaacaaactaagatagtttgtggatttgtgattttaagtttgtgtcagattatataaatgtaatgttatccctttctctgaattctaaaagacccatttgcagatagcatagggaaatttggagttcacctgaatgataagaaagatagtaactgttttggtttct

SEQ ID NO: 22582 - DNA, 734 bp, Oryza sativa
  ref <308>: DATABASE ACCESSION NUMBER: AK072751
  ref <309>: DATABASE ENTRY DATE: 2001-12-06
gcttctccctcaacctacggcgccgaccacctccaaaaccagaccccgaaatctcgaggagcttgtcttttttcggtagcaatggcgttggagcagaccttcatcatgatcaagcccgacggcgtccagaggggcctcattggcgaggtcatcggccgcttcgagaagaagggattctacctcaaagccatgaagctcatcaacgtggagaagtcgttcgccgagaagcactacgccgatctgtcctccaagcccttcttcggagggctcgtggagtacatcgtctccggccccgtcgtcgccatggtctgggagggcaagcaggtcgtctccaccggccgcaagctcgtcggggccaccaaccccctggccgctgagccgggcaccatccgtggcgacttcgctgtcgacattggcaggaatgtcatccacggaagcgactcggtcgagaacgccaggaaggagattgctctgtggttccctgagggcatcgccgagtggaggagcaaccagcacccatggatctatgaggtctaaaatgccttgtcactatgaacctggagagttggcatctgaagatctaccgtgctatttagctgctattttatagttgagaattgagatcagcatctcaagaacctttgtctgtgcgaactgaagtttttcttcattatgttgcatgttatgcatgcatttaccagttgctcttgatatatggtattgctttaatcctt

SEQ ID NO: 22583 - DNA, 1244 bp, Oryza sativa
  ref <308>: DATABASE ACCESSION NUMBER: AK072752
  ref <309>: DATABASE ENTRY DATE: 2001-12-06
ggcgcaccctcgacccggaggaggccgactggttctacacacccgcctacaccacctgcgacctcaccccgcagggcttcccgctccccttccgcgccccgcgcatcatgcgcagcgccgtccgctacgtcgccgccacgtggccctactggaaccgcaccgacggcgccgaccacttcttcctcgcgccgcacgacttcggcgcctgcttccactaccaggaggagcgcgccatcgagcgcggcatcctcccggtgctccggcgcgccacgctggtgcagacgttcggccagcgccaccacccctgcctccagccggggtcgatcaccgtgccgccgtacgccgatccccgcaagatggaggcgcaccgcatcaaccccgcgacgccgcgctcgatcttcgtgtattttcgggggcttttctacgacatggggaatgatcccgagggcgggtactacgcccgcggcgcgagggcgtcggtgtgggagaacttcaaggacaacccgctgttcgacatctcgacggagcacccggcgacgtactacgaggacatgcagcgggccatcttctgcctgtgcccgctggggtgggcgccgtggagcccccggctggtggaggcggtggtgttcgggtgcatcccggtgatcatcgccgacgacatcgtgctccccttcgcggacgccatcccgtggggggagatcagcgtgttcgtggcggaggaggacgtgccgaggctggacaccatcctggcgtccgtcccgctcgacgaggtcatccggaagcagcggctgctggcgtccccggcgatgaagcaggccgtgctgttccaccagccggcgaggcccggcgacgcgttccaccagatactcaacgggctcgcgcgcaagctgccgcaccccaagggcgtcttcctcgagcccggcgagaagggcatcgactgggaccagggcctcgagaacgacctcaagccatggtagccgccatggatgatgagctatatacacacagattatagagacgagacatggattggatcgcgagagatgtacattgattggttcgtttcttctgattaagccgctgttaatttcttcttctttctttcttttttctagttttttttccttgttgttttttctttcaaggaggcgatccgtgttcatgtattgtgcaattgtgcgtgcttaattaatcgttgcaatgtgcacgatttcttctatagtgaaattagccttttccctttt

SEQ ID NO: 22584 - DNA, 786 bp, Oryza sativa
  ref <308>: DATABASE ACCESSION NUMBER: AK072753
  ref <309>: DATABASE ENTRY DATE: 2001-12-06
gattctctgttcttgcgaggtgcttcttgttcttgaggttggccatggcggatcaccagcggatgaggattcaccccgtcgacctggaggccggtggccggcaccggcccacggcgccgctggtgcccggcggctcgttccgctccgacaagggcgacccggcggcgctctacctggtgttcgaccccaaggcgccgcgctactcggtgacggcgacgaacccgaacgcgcgcatcggcatctactacgaggccgggtccagcctcagcgtgtggtacgacgcgcaccgcctggcgcgcggcgcgctcccggcgttctaccagggccaccgcaacacgacggtgctggccgtcgtcatggccgggcaggcgcagctcggcggcgcggtgatgtcggcgctgcaggacgcgcagcgcacgggcgccgtgccgctcgtgttccgcgccgacgtccccgtgcgcgtcgagctcggcagcctcaggctgtggaaggtcacgtcgcgggtgcgctgcgacctcgtcgtcgacagcctcggcgtcaacaaccccgtcaacatcaaggccagcaactgcaagttcagcttgaagctgtgacgacgccattgatgcttcgattctttgatttagttcagttcttgcctagttcttgccatcttggtgatggattctttcaggatcgagtgctttgtactatttgcattggtgcactcctcctgcagcttgtgtacatcctgtgtagttgagagagataataatatatgcatgattagtatatttttcgtagtgt

SEQ ID NO: 22585 - DNA, 1792 bp, Oryza sativa
  ref <308>: DATABASE ACCESSION NUMBER: AK072754
  ref <309>: DATABASE ENTRY DATE: 2001-12-06
gcttgaccaggtgaagtttgtggacgcaggccgaccaagtcggcgccaggcggcgagcggcggcgttcgggctcctctccggcgtgtcggcagcggggttcgtctccggaacactcaccgcgcggttcctccagacatcaaccaccttccaggtggcggcggccgtcgccgcggcgacggccatctatctcagggccgttgtcccagattccggcggagccaactccttcgttgacgaagcatgtgatcccttcctacaaggctcatcctgctccgccgcgacttcgtcttcgtcctcctccgatgaggagatctcaccgagacttccgccgcacaagggcggggtgccgtcgttgtcagacatggtttcgcttctcactggcaggttaagttctttcttgcctaactgcaattcgtgccgatactcatattcttttgttagagtttattgacacctatgtttgatggaattttgactataaactgtaatgtgctgatgagtcattgctgctgcctgtagtttgaccctgtcaggggcagcaattgttaccttcttttacagtcttggggaacatgggcttcagactgcattactgatgtctatcccccacctaatctgacaagtattcagtttcaatgtcagttaaatttaacacgaattttcttttacggttgatgtgtctgcagtactacctgaaggcacagtttggttacagcaaagatgagttcgctaatcttctgttaattgctggtgctgcaggaatgctgtcacagctgactgtaatgccggtcttggctcgatttgttggcgaggatatactgcttattataggactcctaggaggatgtactcatgttttcctgtatggcattgcatggtcatattgggtacttcctttggacttggcaataattctcttgtagtcttattagactcttacccaaaagaatgcaattttggctatatccaaatgtatagacagaactacgctcttgttttgcactaatttgcaatcaggtttagttgcttgctggttcagcagtgcaatagtgcgtttccagcattcactaaaccaatatcagtcatccattacacatatcttcgctaacgttgtcttaatcatctacgggtaccatatttatctgcggtgtttataattctgagtgcttttgttcacccttctataagaaccaatgtatcgaagagtgttggatcaaatgagcagggaattgctcaaggctgtatatcgggcataagctcgtttgccagcatattagctccactaatttttacccctctaacagcatgggtcctttcagaaacagcgccattcaaattcaaaggtttcagtatcatgtgtgctggcttttgtacgctcattgccttcattatcagcatgaggatgcgagcagggcaatctggtgcaagtgagatgttggccattgtgcagcatgagcaagcatgatgagtatgctagtagattgtaaatttggccaacctgaaaccattgtaaatttacatactgtacattgtaaatttggccaacgtgaaaccatcccattgtctactatcctgatgggcgaatgactattcccctattcctctgcaaatctccatcagggaagggaaggattcttcttcagatagtaaattgacaactgctatgtcatagaagccagcccagcttgttgtaatatcacctagtagtgtatattgctggaatgatggcctacatatttcggccggagcttcagacatgagttaatgccaatggtagtacagatttcaact

SEQ ID NO: 22586 - DNA, 1827 bp, Oryza sativa
  ref <308>: DATABASE ACCESSION NUMBER: AK072755
  ref <309>: DATABASE ENTRY DATE: 2001-12-06
gatcattgggatgctaatgaaaccaggataaaaggggatgaattctgaagaaaacctgaagaaaccaggggagagcaaaggctccgtgccaacgtgcccgcggggaaatgcctcagccctcagccatagaccttacctcatggccgtcgtagcccctccttcccttgcccttccccaacctcctcagaacccaacccctaaacctcgccgccggccgccgcgagacgtcgcctcatggacgtccgccatcgcgcgcccggcgaagcagggcgacctccccgcggcggccgctgcgctctccgccatgctctcctcccccgcggcgcccgtccccaacgacgtcacccttctcaccgtcctctccgcctgcgccgactccccgtcctccccgctcgcccgccgcctcgcgctctccgtccacgcccgcgtgctcaagctcttcccctcccacctcctcctctccacctgcctcgtgcgcttctacttcgcgtcccgcttgccccacctcgccctccagctgttcgacgccatgcccgtgaggtccgccgtcacctacaacacggtgatctccggcctcatgcggaacggcctcgtcgccgccgcgttcgaggtgttcgacggaatgccggcgccggataaggtctcctggacggctctcatcgacgggtgcgtcaagaacgggcgccacgacgaggccatcgactgcttccgcgccatgcttctggacggtgtcgagccggactacgtcacgctgatagccgtcatctccgcgtgcgccgaggtcggcgcgctggggctcgggatgtgggtgcaccggctcgtggtccggcaggggctggagcgcaacgtcaggatagccaactcgctcatcgacatgtacgcgcggtgcgggcaggtggagctcgcgcggcaggtgttcagcggaatgaggaagcggacggtggtctcctggaactcgatgatcgttgggttcgccgccaacggccggtgcgcggacgccgtcgagcacttcgaggcgatgcggagggaggggttcaagccggacgccgtgacgttcaccggcgtgctcacggcgtgcagccacggcggcctcaccgacgaggggctaagatactacgacctgatgagggcggagtacggcatcgcggcgcggatggagcactacggctgcgtggtcgacctgctcggccggtcggggcagctcgaggagggcgatgcgggtggtgaccaccatgccgatgcggccaaacgaggtggtgctcggcgccctcctcgccggctgccggatgcacggggacgtcggcatggccgagcagctgatgcagcacctgctcgagctggaccccggcggcgacgccaactacgtgctgctgtcgaacatctacgccgccgtcggcaagtgggacggcgccgggaaggtccggagcctgatgaaggcgcgggggctgaggaagaggccgggctacagcgccgtggagatcgacggcgacgtgcacgagttcgtctccggcgatcggtcgcatccacaggcggaggagatatctcagatgcttgggttgctcatgcatgagatggcagggcatgattatgaccatgtaatcgattgcttggatgggggatgaattcagaccctggagactggagaatgcagaagactgatattctgaagtcaaaagatagccgacgttagattagagaactgttgtatatcagtagttcagtacatttagctgtcctgccactatgattccccctcatctgtgtagtcacaggagtgaagtccaacatgaattgaattatcgcaaaacacactgatttttctggacg

SEQ ID NO: 22587 - DNA, 2016 bp, Oryza sativa
  ref <308>: DATABASE ACCESSION NUMBER: AK072756
  ref <309>: DATABASE ENTRY DATE: 2001-12-06
ggcctccccaatccgtcccgtctcctcgcccgccgccctcgactcccgtctcctcgcctgccgctggcgccgatctccatcctgctagcagaggtggcgccggcgtcctcctcctgctcccgccgcattcgctcaccggtgagcatcctaatccatcccatccggcctcggcctcggcctcgaatttcgtctcctcacccgccgcttgcgccgatccccatcctgcgagcagaggtggcgcccggcgtcctccttctagcttccaccgcatcgtcgctcgccgccactgccatttgaggcccacacagcgttggccccaccagtcggtctcacatcggctacaatggctagaaggttctgtgagtaaagccgcttccccatttggcccccgtgccattcccgtccgatttggccatcgtcgtctccgtctccgctgcgtctccgctgcctctcccgcgccgccgccgtcgcagtagccgcagaaaccctagaccccggcgagagagcgggggagctcacgggagagcagcaaatggagtatggtgcagcaacgcgtggcgcgctcctcgcggccgccccgctctccggcgcccggcgtagctggttgcccctctcatcgccgccgtcgccgccctctattcagattcagaatcgactttattcgatatcgtcgcttccactaaaggctcgaggcgtgagaagatgcgaggcttctctagcaagtgactacacgaaggcatctgaggtagctgatttagattgggagaaccttggttttggaatcgtgcagaccgactacatgtatatcacaaaatgcggacaggacgggaatttttctgagggtgaaatgattccatttggacctatagcgctgaacccatcttctggagtccttaattacggacagggattatttgaaggtctaaaagcatatagaacaacagatgactctatcttattatttcgcccggaggaaaatgcactgagaatgagaacaggtgcagaaagaatgtgcatgcctgcgcctagtgttgagcagtttgtggatgcagtaaagcaaactgttttagcaaacaagagatgggtgcctcctaccggtaaaggttctttgtatattagaccgctactcatgggtagtggtgctgttcttggtcttgcacctgctcctgagtatacgttcattatatttgtctcgcctgtggggaactactttaaggaaggtttagctccaataaatttgatagttgaagataagtttcatcgtgcaacccctggtggaactggaagtgtgaagaccataggaaattatgcctcggtcttgatggcacagaagattgcaaaagaaaagggctattctgatgttctctacttggatgctgttcacaaaaagtatcttgaagaagtttcttcatgtaatatttttgttgtcaagggcaatgtcatttcaactccagcagtaaaaggaacaatattgccaggcatcacaaggaaaagtatcattgatgttgctctgagcaagggtttccaggtcgaggagcgacttgtgtcagtagatgagctgcttgaagctgctgaggttttctgcacaggaactgctgtcgtagtgtctcctgtgggtagtattacctatcaagggaaaagggtcgaatatgctggcaacaaaggagttggtgtcgtgtctcagcagctatatacttcattaacaagcctgcagatgggccaggcagaagattggctaggctggactgtgcaactgagttaggaagtaataaaatgttcatcaacatcaaaagatggacatgattatgatcatgtgtatccttcagttttgtagttttgttggtgtgacatcctgctgtatatgtatagacggcagtgcattagcgcgaagcagtttttgctaaggaacgacaccatgcatccagcttttatgccttttgcatgagaaatcaaacgtggaaggctttcctgactgaaatatcgacaattataaaactattttgctatgttgattac

SEQ ID NO: 22588 - DNA, 1038 bp, Oryza sativa
  ref <308>: DATABASE ACCESSION NUMBER: AK072757
  ref <309>: DATABASE ENTRY DATE: 2001-12-06
ggttgcctccgaacccttcaagctccgccgattcctctcctcctcctccgcctcctcctccggcgtcgctcggcgtcagcagcggcgccggccatgggttgcggtggctccaaggaggacgtggccaccggcaacaccaccgcccccgccgccgccggcagcagcaagctgttgccggaggaagtcctccgtctccgccagccaccgctcctcctcctcgtcgtcttcaaatggatgcacctccgtctccgtcaaggacgtcgcgacgaaaaaggaggaggagaccgaggcgcgacgccgtcgaggtgacgtcggccgaggaggccggcgggcggcggcggtggtggtcaagaaggacgtcaccatcgccgctgccacgctcgcggtgaccgaggcgatggcgacggcggcggagccgaaggaggaggaggaggaggaggaggagctgcccgagtccaccatggccgacgagggcgccggcggcggtggtggaggcgggcgccggccaaggccgacgagacaaaggaggtcgctgttgtcaaggaggatcaggagaaggctgaggaggagaccaaagccgaggaggaggagacgccgtcgtctccagctccggcaactgaccttggggaatcgaaagagcagaacaccatggaggccaaacctgccgtcaacgacaacggcgagcacaaggtagaggaggtggccaccaccgtcgtctcagagtcatcgtcgccgtcgccgtcgccgtcggaggcagagaagaaggagaccgccgccgagaaaaccaacgacgtggctgtcccggagtcttcctcgccgtcggaggcggaggagaagaaggacgccgccgccgacgagaaaaccgccgccgccgtggcagcggcagccgcaagcgaatcatcatcaccggcgaactaaacggaggcgagaccgatcgatcgaagagacgacgtgtaaaccatatcccatccatcatatccatgtacctggaattaatccgggagatccatggatttataatcaatcaatcgacgtgct

SEQ ID NO: 22589 - DNA, 1006 bp, Oryza sativa
  ref <308>: DATABASE ACCESSION NUMBER: AK072758
  ref <309>: DATABASE ENTRY DATE: 2001-12-06
gaacctctccaaatctctcgatctcccattcgagcgagatgaagctctccatccagtcattcgcccgcaagctctccctcccgtcgccgaagcggacgtggagcagcggcggcggaagcagtaagagggatggtggcatgtccaagaacgggagcggcgtgaagcgggccatctcccgcagcgaggcgtcgtcgttcgcgtcggcgtcgtcggagtcggagtcgtcctcggacgacgcgctgatggcgaggtcgacaccgaggtcggtgctccccgcggagatctcgcggcgggagctggaggccgtgctccggcggctcgggcacggggagcccgacgacgaggagctggacgccgtcgcggccatcgccgccgaggccgaggcgggcggcggggaggacgagctgatggaggcgttcaaggtgttcgacgccgacggcgacggccgcatcaccgccgaggagctccgcggcgtcatggtcgccatcctcggcggcgacggcgacggctgcagcctcgacgactgccgccgcatgatcggcggcgtcgacgccgacggcgacggcttcgtcgggttccaggacttcgcccgcatgatgatggccgccaccgccaccgccacggcgacggcggacggcccgagatcgtggtgatccattcctccgttcccgccaaaaagatcggacggccgtgatgcgctctgatgtggtgtgcttcaactttttttggcgcgcactagacgatggaaaaaaagccagcactactagatgcgctgctaattaagtactctactaatccaagatgaagagggaatattattattagcctaaacccaacctgtaaaatccattaagagagagtaatcccaaggcgaatgcttcgttctttcaatttttcaaattttaatcctccaacttggagttggagctgtaagcctaacgttgctgtgtgaatcggacttgtatcttgctgcgatcgagctactataaaacattctttagatctt

SEQ ID NO: 22590 - DNA, 2139 bp, Oryza sativa
  ref <308>: DATABASE ACCESSION NUMBER: AK072759
  ref <309>: DATABASE ENTRY DATE: 2001-12-06
gtttttctcactgtggtatgacgcgatccaggcccctgaatcggcgtggcagcacgacatgtactcggatgtcgcggcaggcggcggcggcggcagcggcggaggcgggagggtctcggctatcgagactggcaccaagctctacatctccaatttggacttcggcgtctcgaccgaggatatcaaggagcttttctctgaattaggtgatcttaagaaatacgtaattcactatgacagaagtgggaggtctaagggaacagctgaagttgtatttgcaaggcgtggcgatgctgtcgcagcagtgaagaaatataacaatgtgcaacttgatggtaagccaatgaaaatagagattcttgggaccaatactcctacagctgcagctgctcttccagcaaataacggaggctacgttagaaatgttgctaagagtgcaccaaggggtggcccagctggactaccgcagggtagacctcgtccaagggggggtgggaggcgccgtggtggcggaggaggcagtggtggtcctggtggatccggtggtcgccgtggcaaagagcgtagccagccaaagtctgctgaagaacttgatgctgacttggagaaataccatgcagatgcgatgcagaccaactagatcttcacggtgttgatatttcaacatgaaatctgaaggatgtttatctgcttgttcctgctatttgtgctaccatgttcagtggcaacaacaaaacctttgtttgtcgggtcttggtttactgaattgtacggttttatgtgtctacatagaactagagttaagtggatgctggtgaacactgttatgaatattacttggttgccacttatgttcctttttctgcggagtgaaggcctgctcgagttgctccacatacagaagttactgaagatgtatgaggtgctagtatcttctgactcctttaacatacatcatcttcaacggcattgttgcatggttatttggacattgttcctctctgtacaagggttataaggctcagccatcctcaatgaggtatgcatcatctcttatctgtttatctatatttactactgtttattggtctttttatttatttgcttctgtttcatgtgtttaaaggttcttttattctcatcttgcaggtggctggtgctttttttgttatttatcattctgctattgttgattttgggcttagcaatattcttctacccgttagtgattcatatgacagcggctggaggggtcactttcattttaaagttgatttcctccttgcaaaatctgcaccgtcatatgattattctatcttctagccagctgatcgtcagtttgaagaagcatcgaggtgcaaattctgatttaaaatttgctattgatatttgatagttattcaagtcttaacagcatatgtaggctttggacttcatttcttggccctccatccattgccttcttattctgtgtgatgttagcattgcagtggatcttcattttcattaaaaatagccatcaaactcctttagtatcccaactaggtatgtcatgatcatgtaactgtgctgggaagatccatctattatgctcatgtttctgccctgccgttcagttttcaactgttgcactcagttttcaacagaaggatccatccatcttgttgctcatcaataaggatttctcagtttattgattatttgagtatcatccaagtgttggcctacttgattggaggtgttgaataacaaatttcataaccttataagaggcaaattttgatggctggctcgatggtcatgtttgtcaggcaatgtcaatggcatcagttcagtattttggaaatggtacggtgtagtcatcatttagatggcattaggttaactgggattgaaataatcgtttagattctttgcccagattcaattacataaagcaaaataggtttacttttttttttttttttgggtttgcaatgtggaaagctcctaggtgatagatgtgaaaatttcaatttgctccttctgttgtaattgaggcttgaggtttattctgcgttgcagttttttgccctcaagcattgctgtcatctgcttgacttcttcctttggtgaacatgttttcgcagtggcctttgc

SEQ ID NO: 22591 - DNA, 1034 bp, Oryza sativa
  ref <308>: DATABASE ACCESSION NUMBER: AK072760
  ref <309>: DATABASE ENTRY DATE: 2001-12-06
gtccccgaaacgaaatggcagtggcgttccactgaaccaggccaagccagacggacaagacttcgccgcagccgcgtcctcctcaccgcgccgccgtcgcaatggctacggccatcgcagcctccgcgttcctctcctccgccttcgccagggacaggccgctcccccgccagcggcgcgcggcgaggcccgcgacccgccgcgccgccgcggggggcctgtcggtgcggtgcgagcagagcgagaagcagaagaggcagccgctctccgcgctcgtcccccgcgagcagcgattcatgttcgaaggcgacgagctctgcggccccgacatatggaacacaacatggtaccctaaggctgcagatcatgtaactactgagaagacatggtatgttgttgatgcaacagacaagattctaggtaggcttgcatccaccattgcagtacacatcagaggaaagaatgaggccacatacactccaagtgtggacatgggggcttttgttgttgtggttaatgcagagaaggttgctgtttctggcaaaaagcggtcacagaagctctacaggaggcactctggacggcctggtggaatgaaagaagaaacttttgatcagcttcagaaaaggattccggagagaattattgaacatgcagtgcgtggcatgcttcctaagggcagactgggaagaagactgtttacccacctcaaggtgtacaagggagcagaacatccccatgaggctcaaaaacctgttccactgcctatcaaggataaaagaatacagaagtctgagaagtagataattcctgtggagactaagaaagacacaacaatctcacgtaaattcctcccctcgagattttgtccaatctttgggatgtgatgcatctgtctgtttggggaatggagtgtaaaattttttgtaatttacttcctccaaaagtttgtgtttctaagtcatagttcttgttgattacatatcatgtacctaataccgtacgattttaagcaatccgatatttccatatcc

SEQ ID NO: 22592 - DNA, 1379 bp, Oryza sativa
  ref <308>: DATABASE ACCESSION NUMBER: AK072761
  ref <309>: DATABASE ENTRY DATE: 2001-12-06
gatccacactgccaacatctgcaagcagcagccagcagcagcagcagctcaccatcacttgggagttcggagctggtcagcattatcaagcttgagctgagctaggtacgtaggcgggcttgatctcgtggttgacacacgagctcatcgtcagccatggcgtttagctctagggccgtcgtcgccgtcgcttcggttgctctgctcgtcgcggctctggcctccaccgccgcagccgagggcaatcccgtcgagtacacggagagttactacgataacacgtgccccaacgcgcagaacatcgtgcgatcggtgatggagcggagcgtcgccgccaacccgaggatggcgccggccatcctccgcctcttcttccacgactgcttcgtcaatggttgtgatggctccctcctcctggacagtacggattccacggagagcgagaaggaggaaaaagccaacgcctccctcgccggcttcgacgtgatcgacgccatcaagtccgagctcgagcgcagctgcccggccaccgtctcctgcgccgacgtcctcgcgctcgcctcccgcgacgccgtcgccatgctcggcgggcccagctggggcgtgctgctcggccgcaaggactcgcgcttcgttaccaagaacgccacggaggagctcccggacccgagaaacggccacctcgacgtcctcctcggggtgttccgcgagcacggcctcgacgaacgcgacctcaccgcgctctccggcgcgcacaccgtcggcaaggcccacagctgcgacaacttcgagggccgcatcgacggcggcgagggctacgacgacatcgacccgtcctacgcggcggagctccgtcggacgtgccagcggccggacaactgcgaggaggccggcgtgccgttcgacgagcggacgccgatgaagttcgacatgctctactaccaggacctgctcttcaagcgggggctcctcgccaccgaccaggcgctctacaccccgggcagctgggccggcgagcttgtgctgacctactcccgcaaccaggaggcgttcttcgccgacttcgcgagggcgatggtgaagatggggaacatacgcccggacccttggactccgacggaggtcaggatcaagtgctccgtggccaatggtcattattgatggccggccgtcatatctccttttgtttaagctttgagtccacccaactctttttggactcatctgtatttgtctaaatcaaaattttacgtttactgtattcgtttgtatatgtcaatttttgtttcttctaacgatgcattcgtatatgaattcgtatatgtgcaatatgatgtgatgcgaaattaaaaatgtgtattggcacgttttgaatgacc

SEQ ID NO: 22593 - DNA, 1859 bp, Oryza sativa
  ref <308>: DATABASE ACCESSION NUMBER: AK072762
  ref <309>: DATABASE ENTRY DATE: 2001-12-06
ggcaggccgaacgcccgcgccgtgtctgcttatgatgcttcgttctctccgcgctccgtgtccgaccttcttcagacttcacacctcgcgcgccgccgcagctccgatcggaagacgctcgattcgtctccgactccgacgaccagaagctaccggcgacgcgagcggagaagcgcggaggggagggggcgcgcgccgccatggcgttcgagaagatcgtcgtggccaaccccgtcgtcgagatggacggtgatgagatgactcgagttatttggaaatggatcaaagataagcttatattccctttcttggacttggacataaaatactatgacttaggtctacctaatcgtgacgctactggggacaaagttacaatagagagtgcagaagcgaccctaaagtataatgtagccatcaaatgtgcaactataactccagatgaaggacgcgtgaaagagtttaatttaagtgcaatgtggaagagtccaaatgggacaataaggaacattttgaatggaactgttttccgagaaccaatcatctgcaagaatattcctcggcttgtacctgggtggataaagcccatatgcattggacgacatgcatttggtgatcaataccgagcaacagatacagttattaaaggtcctgggaagttgaagttagtatttgatggcagagaggaacaaatagagttggatgtgttcaactttactggtgctggtggagtagccttgtctatgtataatactgacgagtctatttgggcattcgctgaagcttccatgaacatggcttaccagaaaagatggccactttatcttagcaccaaaaacacgatcctcaaaaaatacgatggaaggtttaaagatatatttcaggagaactatgaaacaaaatggagagccaagtttgatgatgcaggaatatggtacgaacatcggctgattgatgatatggtggcctatgcccttaagagtgaaggtggctatgtttgggcttgcaagaactatgatggagatgtgcagagcgatctaattgctcaaggttttggatcgctaggtctaatgacatcagttctggtgtgccctgatggtagaaccattgaagctgaagctgctcatggtacagtcacacgccattacagagttcaccaaaaaggaggcgaaactagtacaaatagcattgcttcaatatttgcttggacaaccggactaggacatagggcaaagctcgatgacaataaaagactgttagattttgtacaaaaacttgaagctgcttgtgtgggaacagtggaatctggaaagatgacaaaggatctagctcttcttgtacatgggccaaatgttagccgagataagtatcttaacactgttgagttcatcgatgctgttgctgaggatttaagaacaagattgtcagtaacatccaagttatgaaggaatgaatagggcaacggcaggggacatgttaggatcccatgatacaaagtttatacatttttactttgaataagagcgattgaagcattggtatgcgcagctatcaaccacggtgctctgataaaatctggtaaagattgtatgcatactccatacaacaatggaggtggaggaggatattttgctcgaaataagaagtttgaacttttattcgtcagacttctacttataactactttgatgattaaatcatggccgtgtagcttagttcttctatgccaaaagagcaagtagaactatcctaaaggtacccaccacaagtggtgtttgtgctttgtaccatacaaacaagactgtttatttactacggtatatagcttggaataaaaaagcaggtgcagatctgttggt

SEQ ID NO: 22594 - DNA, 1450 bp, Oryza sativa
  ref <308>: DATABASE ACCESSION NUMBER: AK072763
  ref <309>: DATABASE ENTRY DATE: 2001-12-06
ggcaaggttcagtgagtaataaagccaagatacaggagcgatcggctccgcggcgttcgtcgctgtaaaatccattgttcatcgtctccctcaccggcgtttgtgttcatgatctccttgccgttgccgtcgccttcggcggcgacctgagcggaggcggaggcgtcgcagccgtcgtcggcgccgccggagttgtaccacctcgcgcagagcaggtagcagaagaagttgatcacgctgagcacggcgagcatccagtagaagaggtccagcctgtccttgtccaggtcgttgtcgccgagccacccgccatggccgccgccgccgcggctcgccgtgacacggttcacgagcgacacgagcaccgagctgaggtagaagccgaaggcgtaggagcagtaggtgagcgccgtgaggaaggactgcatgccggcgccgcgcgcctgcttgtagaagaactcgatgagccccacggcggtgaacatctccgacacgccgaacacgaggaactgcggcacgatccacagcacggacatcgcccgcggcggcgcgccgccggcggacagggacaggtcgcggcgcctgtgctcgacggtggcggcggcgaccatggagagcggcacggtgcagaggcccacgccgatccgctggagcggggtgatcccggaccgcgcccctgtggcgcgcctcatgagcgggacgaggaggagctcgtacgccgggacgagcgccagcagcatggcgtaggggatggcctgcagcgacgccggcgggatgcggaacgaggagccggcgccgccgagcgcggtgtccatggcgctcccctgctgcaccgagaacgtctgcagctgcgccagcacggtgttgaagacgatggtgcacgcgaagatgggcgccacggcgaggagcgtcttggcctgccgcacctcggccgccgtgcacagccgccacgggctctccggcttcgtgttcggcccctgctccgccgccctgatgcacgccttgtccaagaacctgcacacgtttccgtcacggatcagtcacacgcagacgcagcaacgtgcatggcgcgcggcaccgccgccgccggcgccggctgctgggacgaggagctcacctgaacttgctggcgtggcggaagctgccgccggcgaggtgcgccggctcgcaaacgccggcattgacgggatcggaggagctggaagggcagatttgcttcctcttggtgtaggcggcaacaaacacctacaggaacagtatcagtattgtcagggttgaaggtaaactaacctgcaagatttttttttaaaaaaaattaaaaattatatcgaaatgagaagatttttgaagataaaagctcttcaagaataaaccattttgcaaaaaaaaatcatggtactgttataatatttttgtttaaaaaatatggtgttaatttgacatgaacagc

SEQ ID NO: 22595 - DNA, 570 bp, Oryza sativa
  ref <308>: DATABASE ACCESSION NUMBER: AK072764
  ref <309>: DATABASE ENTRY DATE: 2001-12-06
ggagcggccgccatggccgtgaccggccacagttcagtcgcaggtgtaaacgccgatttcgcggccttagccacgaagggagtcgccgaacaaaggatagtccccaccctgtccggctcggtgatgacggcagttagatcggcggatggggaattgcggcagcggtgagccggtgactgtggggaattacggcagcggcagcagcgccggcaggggaggctgctactgttgttcatacacgagtagccccggcacgttgggcagaagcttatcgaggtcggagagaggtgcccgcttcatctccagaggagacagtaagtaacctacccctttggcctttgctcgagtgctagattctctcacaaattgctgtgatttcgctagtttggacactcgtagatctaattgggtcaatctagcatatgttaatttatccattgaattgtttgcaatatgtcaatttctgaaggaaataatgggaatacttcagaagcgattggaccccggggcttgaatttccggatagatccatagaaaattaaataagttgagattgaagttcttcgtttc

SEQ ID NO: 22596 - DNA, 2385 bp, Oryza sativa
  ref <308>: DATABASE ACCESSION NUMBER: AK072765
  ref <309>: DATABASE ENTRY DATE: 2001-12-06
gtgtagtaggagaaggagaaggcacgcacctcaagatatacctactgtttattcccttgtcctgccacgttgctccaagaagcagctcagctcgccgtgccctgcagctctaccggcagcatcatcatcacctgtatccccgaaaggcagcttcttccggttgtagctaccgagctaccagtaccacccaccctgagagccaagaaatggcggcctgattgggcccccccgtgagctccgaatccgccggcggccaactgccggatctcctcgcagccagcgcgccgccgggagggacggagattggcggcggaggaggggaggtgtccaggccaggtcaggtgggatctccgcttgcttcgccggcttagaaatcggcatctttgtcttgcagatgtgagcttgcaagtgtggggtctccgcgtctttttccaggtggcaggcatggaggtgaggctgctgcttctagtgttcatatgtctgcatgctcttctttgggcggcttcggctcagcagccagaggaggcgacggtcatagttaagggatcgacaaaaatcgctgaaacgaataaaaattatatatgtgctacaatcgattggtggccaccagagaagtgtaactataatcagtgtccatggggccaatcgtcaattctaaacttggatttggatcatcccttcctggctcaagccattcaagcatttgataatttgaggattagactgggaggctctttgcaagaccgagttgtttatgatgtgggtacaaacagtccatgcgccccgttcacaaacatgtcaaatggtttatttggtttctcagatggttgtctaagcatggataggtgggacaaactgaatgctctattccaaaaaacaggtgcaattatcacatttggtctgaatgcgctctatgggaggtacaatgtccgtcgttctttctgggctagcaaatggaactctacaaatgcatataattttgtaaaatacacaatctcaaagggatatccagttgactcatgggaatatggtaatgaactgagcgggcatggaattggggcaagagtcgatgctacactgtatggaaaagatgcaattgaacttaaatccatctttcaacagttgtacaaggcaccactctcccagccatccctgttagcccctggaggattctttgatcagcagtggtacactcagctacttcagacttctggtcatggcgttgtcagtgctttgacgcatcatatttataatcttggtggagggaatgatgcccaccttataaggaagatattagatccaaagtatttagatcgttcagaagatacttatagggatatgcaactcgcccttcaaaggcatggaacatgggcttctgcctgggtcagcgaaagcggaggtgtattcaacaatggcggtgaacttgtgtcaaacactttcatcaatagcatctggtatcttgatcagcttggaatggcatctaagtacaatacaaaaatattctgcaggcagactctgattggtggccactatggtctacttgacacccaaacttttttgccaaatcctgattactatagtgctctactatggcatcggcttatgggcagggaagttctttcagttgatatcaatgcgccgcgtaaactgcgtgcttatgctcattgcaggaaacagcagcaaggaatcaccctcctgttgatcaacctgagcaataccaccggatacaacgtcaccctccagaatgacatcaatgtcaaccttgacaaaacagccagccttcataagcacaattctttctcacacagcctcagaagagcggtttcatggctggggcgcaagccgtcaagcgacgtcgcgaggagggaggagtaccacctgacggccaaggacggcgacctccagagcaagacgatgctgctcaacggcgcaccgctggaactctcggacgacggcggcgttccggccatgagccctgcgctcgttgctgtcaactcgccggtgtacctggcaccgacatcgatcgcctttgtagttcttccaatgtttgaggccaaggcctgttcttgagtgatcaatcttgccttcttgttgagtattacgcccttagaatgttccatttgttcttttctggtttaaatagcaaaacccttggaatgtaagcctttagaatgtaaaagaatggagtgttccatttgttcgttttctggtttgaataacaaagcctttagaatgtaaaagaatgtaccaaaacccttcgaatacaagaaggatcacaagaatttaccttagaatgcatagaacgattacaagaatttaaacatattgtgagtaaattacaagaatgtaaacaggttttgagtaaataacaattgaattgtgagc

SEQ ID NO: 22597 - DNA, 1210 bp, Oryza sativa
  ref <308>: DATABASE ACCESSION NUMBER: AK072766
  ref <309>: DATABASE ENTRY DATE: 2001-12-06
tgcgttctgaaagaacacggccatctcacagacatggccgcgccaccgtcacctctcggcctcgcgcgccgcgtatccggcgccggcgccgccaccccggccgcggcgtggtcctcttcctgccgctccaggcgcctccgccctcgtctccttccttcaaagaggtggagtggagtggtgaggatgggagcggccgtgggaggggagcaggagggcgaggacgaggaggtgaagctggccaaggagatggccgccgcccggaggcgatgggagactctgattagggagcagaagatcaagactcttacacccagggaagctggctatacattcaagctcactgacaaggtcctccttgatgttaggccctcgaatgagcgtcaaaaggcctgggtgaaaggctctacctggattcctgtatttgatgtggatacatcgtttgatttgggtggcgccggcaagaaattcaccaactatgtgatgggtggctggtggagtggcagctcaacaatgacagttaacaagaactttgtacaacaagttgaggagaagttttctaaagatacagatatcatagtagtttgccagaagggactgagatcattggccgcttgtgagcaactctatggtgctggtttccaaaatttattctgggtacaaggaggactggaagcagctgaagaggaggactttgagcgagaaggtccccagcctttcaagcttgctggtattggtggggtttcggaatttttcggctggacggatcagcaacgagcgcaggctgtgaaagaagggctgggctaccgtctgatcttcacaggccgtttggttggagcactcgtgcttgtcgacgcattatttcttggcgctcaaaggattggccctctgcttcaagaactgcagtctcgctaacgaatatcggtctatgagcaaactgctcttgtgacgtccaagcttttcgagcacctccggctgtgagttgttgcggctccgtaatgtaagcccattgtacatgtatgggggaaaaatcaagctttccatgttttgaatttatggctgtagcctgtaggttactaggtttcatctcgtttgggaggtagaatttccgtaggaatctctttctttcgtatacaatttggtcaaatttattgttcccaaacaggcctggatcattgctatcaagtttcaaggaaattaatggtagttcttt

SEQ ID NO: 22598 - DNA, 1322 bp, Oryza sativa
  ref <308>: DATABASE ACCESSION NUMBER: AK072767
  ref <309>: DATABASE ENTRY DATE: 2001-12-06
gctgcgcctcataccactcagtgttcaccattgctgaccctccctctccaatccaagctccaacaatggctaaaccatccttgctcctccttcttcctctgctcatcttctccatcggcgcggctctcgcccgcgccgatctcatgctggacaggttcgagcagtggatgatcaggcatggccgcgcctacaccgacgccggtgagaagcagaggaggttcgaggtgtacaggaggaacgtcgagctcgttgagacgttcaactccatgagcaatggctacaagctggctgacaacaagttcgccgacctgacgaacgaggagttcagagccaagatgctggggttcagacctcatgtcacgattcctcagatttcaaatacctgctccgctgacatagcaatgcctggagagagcagtgatgatattctgccgaagagcgtagattggaggaagaaaggggcagtggtggaagtgaagaaccaaggagattgtggttcttgctgggcgttctccgcggtggcggcgatagaggggatcaaccagatcaagaacggcgagctggtgtcgctgtcggagcaggagctcgtggactgcgacgacgaggcggtggggtgcggcggcgggtacatgagctgggcgttcgagttcgtcgtcggcaaccacggcctgaccacggaggcgagctacccgtaccacgccgcgaacggcgcgtgccaggcggcgaagctgaaccagagcgcggtcgccatcgcgggctaccggaacgtgacgcccagcagcgagcccgacctggcgagggccgccgcggcgcagccggtgtccgtcgccgtcgacggcggcagcttcatgttccagctctacggcagcggggtctacacggggccgtgcaccgccgacgtcaaccacggcgtcaccgtggtgggctacggcgagtccgagccgaagacggacggcggcggcgcggcgaaaggcggcgagaagtactggatcgtgaagaactcgtggggggcggagtggggcgacgccggctacatcctcatgcagcgcgacgtcgccggcttggcgtccgggctgtgcggcatcgcgctgctgccgagctaccccgtcatgtgagcctcgtggcccgatcacacggtgcgtgtgaagaatgaagaatttgtgttgtgtgtgtggcttgaattgggattgtttatagtctacttagtgatgtaattatgtatgtatgtatgtataaacggaaaaccattgtgtcactgtataaagttataaagaaagcacgaacatctctgatatactgacaaattatgaacttgtttgttc

SEQ ID NO: 22599 - DNA, 1663 bp, Oryza sativa
  ref <308>: DATABASE ACCESSION NUMBER: AK072768
  ref <309>: DATABASE ENTRY DATE: 2001-12-06
gggtagcaatactgttaacttctgcaacaaatcatggattggaaccacattagcatgggaaagcaaggccctaaaatcaaggcatatgaacaagatcttttccatgtccgttcaacaagcaagcaaaagcaaagttgctgtaaaacctctggaattggataatgcgaaggagccaccccttaacttatacaaaccaaaggagccttacacagccacaattgtctcagtcgaaaggcttgtaggccctaaagctcctggtgaaacatgccatattgttattgatcatggtggcaatgttccatactgggaaggacaaagttatggtgtcattcctccaggagagaacccgaagaaacctggttccccaaatactgtccggctctattctattgcatctactaggtacggtgattcttttgatggaaagactgccagtttgtgtgttcgtcgtgctgtttattatgatcctgaaactggaaaagaagaccccacaaagaaaggtatctgcagtaatttcctatgcgactctaaaccaggcgacaaagttcagataacaggtatcgtgctcctttcagatggcatataaatatcattcttatatgttccaacgataaacaatagcccctaactgaaaatttaggcttttaacctttttttcttatctgaagttcacatctgtgatgcaatgtttttttctgaaatcttttggatgggtatgtatagagggcatattagcttataagctttctgaaagatgtggctggagaaaatattagcttataagctttctgaaagatgtggttgtgggagaaaacaatctgaagaagagatgtctttcaatattattatgacttgttttgtaacttatggcttgcatgtggtattccagcctcaagcttatcactgaagttactcttcacatgcaggcccctcaggcaaaatcatgcttctacctgaggatgatccaaatgcaacccatatcatgattgctactggcactggtgttgctccctaccgtggctatctacgtcgtatgttcatggaggatgtcccaagtttcaagtttggtggtctggcttggctatttctaggtgttgctaacactgatagccttctgtatgatgaagagttcacaaactaccttcagcagtatccagacaatttcaggtatgataaagcactaagtagggaacagaagaataagaatggtggaaagatgtatgtgcaggacaagattgaagagtacagcgatgaaatttttaaacttttggatggcggtgcacatatctacttttgtggtttgaagggtatgatgccagggatccaggacacactcaagagagtagctgagcaaagaggtgagagttgggagcagaagctgtcgcagctcaaaaagaacaaacaatggcacgtggaggtttactaagttactaaaaaggcacgggctgtgattttgtgattgttttgcagcgagttgaaacataaaacagtaaaaagcgatgattctcgttgcattgtaaaattgtcaatcttattcataagcttctgcttgacatggtgaataaaatgaagcatatgctaattttgacttagtattgtgaaatcataccagcttttcatgggcatcatgcatgataaaaatgtgaagtagtgggactttcct

SEQ ID NO: 22600 - DNA, 2592 bp, Oryza sativa
  ref <308>: DATABASE ACCESSION NUMBER: AK072769
  ref <309>: DATABASE ENTRY DATE: 2001-12-06
gggtggacctcgcggcccaataattccaccgccgcacgcctctctcccttcctcccctccttccttcctccccgcctcccgctcgttgccttcgccgccgcctcacgccgccgtgatttgagttaggttttttttttttttgctctgaccagacttgccggcgaaggaaccaccggcgggcaccgcctctcctcggcaatcgttgccggggataaagtggggtcgttaagggagcggtaggtttgggggtttgggattatagatcgaggaagatgaagcaatccatatcgtctatcatctttgtatctactcacgctgctgctgctaactataggatcatttcgcttctgcctctttctgacccgactctttttggtttttgcctcgtcgataatgaacttgagtacactcagaagcttgcctattagcttagtgtaaatagtaggcttgttggagtttagtttgttagaaattattagtctctggttcatttcagctagcaaccatggctgcgatgaacgaaaaggtattggataaatgtggaagaaacataagtagcctcaagagaaagcgggacaacccagctgcacgttgcgctgatgccggcaacacctctaaattgcataagcatcccgccgataactctgttgttaggttttatgttgatgaaggtcacaaggcaaagatcaagtgccatttcaaaatgcagattatacagagttatcagaatttcatgactagtgctttacctaagcgaattctgcttcgtcaaggtggtgaatggaaagactttccaaagcaaattgtcaagcttgcccacagtgattttaggactaagaagacaatcacagaaggtgaacaccagacccatctttttttgctggattttgtgcacatgacattcatagactcaaagacaggccttcagaggccaatagcttggattgatgagaatgggaagcagtacttcccagaattttttattgaagataagacactgtataggaaaaaggaattgggaaatggtaataatgtatacataattgtcgagcccaatgggacacaagaaatgaacgaccactttggaacatcagaaagttcagcagaaagctcgaattttgaatctagcactgatgatgtttccagccctaagagagccaaggctgagaggagtgtcgcaggaaacaaaactggtggtgtcaaagaaactattggagagaatgagccacacgccttgctgcctattccctgcagatctctaccacaagataagctgggtgaccattcacgtgttcaactagctatttctgctgttcagaaattgttgctgcagggtctgggcactgttcttggttccaaggacatcgttgggatctacagaacaccagcagtagataaccataaagaatttcgttataatcttttcaaaaagcaggcagagcatactaaatgtaagcgtggcaatgcaaatgtccgctatgcctggcttgcttgctcaaaagatgctgtggatgaaatgatgttgaatggtgtcatgcactttgagaagactgttaagtgcccagactacggaattggcacaatccttgctccagcaaattgctccaatacctgtgtgaattactctgatgttgatgaaaatggcattgtccatatgatgttgtgccgtgttgtaatggggaacgtagaaatagttcaccatggatctaagcagcatcggcctagtaacgagtatttcgatagtggtgtagatgacattaaaaaccctcaacattacattgtgtgggatatgaatgtgaatagtcacatctattctgaatttgtagtcaccatcaaattgccttctagagtcaaagattctcctgccaccgaagaagattgtcacaatttatcagaggtttcatcactgatcttgagctctggttcgcctgatagtgtatcacaggacatgaaccttcaggcttctccagcattgggaggtcattatgaagcccccatgttaggagataaagtggaaagggctccaagcacgccttggatgcctttctccatgttatttgcagcgatttcaaccaaagtttctgctgagaatatggacatggtcaacagttgttacgaagaattcaagagcaagaaaataagccgagtcgacctagtgaagaagttaaggcatatagttggtgacagaatgcttatatcaacaataatgcgactccaagataagttgccccctatgtcgaggcatgaagcacccaaacacgtgggccaagatgatggctaaaccatgaagtcgtcggtgcggatggtgagagaagcaactggccgacttgactagtggagagaagcttatctcacataagttgtctgcgtctgtatatgatgcgggtttgtcttttcggtcctaggattcatgttgtcaagatttctgtcatcggtttccgatgcgaaatgatgatttcagctttactcgtggacctgaggttacacataaaattgataaaagttccttgtttaccctcctgtttctttttcttctctttgcataaaaacatgtaatgttatatacatattgattaatgttattgtttcgcc

SEQ ID NO: 22601 - DNA, 1431 bp, Oryza sativa
  ref <308>: DATABASE ACCESSION NUMBER: AK072770
  ref <309>: DATABASE ENTRY DATE: 2001-12-06
gaactttaggatagagtccatttcttgcctgatcagctcctcccaaagctctaggatttggttccattcttgcacaaatcatgaatgaaatcagaaaattgaagcgcgggatcagcaccaaacgaggtgatcaccccgtccaaaatggccaaaatccagtcgatgaatgggaggagcaacaacgatactggccttcgccacgggcaccgccggtgagtccgatgggatcgccgcggaccccaaatgggagccagaagaagccagttctcggcaaggtgaagagcaaggctaagaaatggatgcacctgctgcatcacaagaagaagccgcaagaagacatgatgtggaccccccgagcaggacccagtgcagacgacagcaaggagcacaacgatgcagactacggatccccaagcacagctcgacatccccattcctcgtgtgaatcagcatgtgcacctgaggttttcttggaagcatcatcaaggcagaattccccactccagagcccaactgcacacaaggagcaaccatacttcaaggtcagcagcaggtttgagtcagaaatgaaggaagccaatgaaatgctgagggaatcaaagcagctccgtgtcaacacaaccaaaccgaagactgtaacatttgcgccaatcttagaacaggggccagaacctgtaaaaaatgattggcacagcaaagaactgtcagaaacagcaaccgagatattcagtcatgcatatgctatagtctgtgaggcagtcctcaggatggtctctataatccaaggcgcgatgtcatcatataatattgacagaaggcaaatgttagagaagatcgtatcgttcaagagatacatgatgctgaagctggcacctggagaaggtgataaagtactctcagaagtcattactgaggctgtcctcgatatgtttgacgcctgtgtgagaatgttgagaggcctttggtacagagggcaaaggaagtgtattcttggtttctgccagaaaggagagaagagttacctcctgttccactgtccacccatccttgtgtgtatgaagatgcagaagaattttactcattagagaattgactacggcttgaagcatgagatcaagactctatgaaacaagataagtagagagatgtttaccttacaatgtccgaagaccggaggcgaagacagagtgttcggcccaagtatactttgttcatagaattacatcataccttacaatggctgcatgtgaaaccaaaaggaggtttctgtggctgtgtaccagaaactaatgtacaagatttcaatcttaagtgtctcttcagataaagctcagtatcagatattagattcacaatcagtgaccacaaattccacaatgtaggcagtacagaaatattgaaagaaaacaaaaatcctccaactgcagaacc

SEQ ID NO: 22602 - DNA, 602 bp, Oryza sativa
  ref <308>: DATABASE ACCESSION NUMBER: AK072771
  ref <309>: DATABASE ENTRY DATE: 2001-12-06
ggccgccgtcagagaccaccactccacacatcgtgttatttgagataccggcgagccggccggccggagacgaggaggatggtgttcttctgcttcttggtggaccagaggaggaaggtccggagcagcaagccggcggcggggatctgctcgcggtgcggcgggtgcgcgagcgtggcggacatggagacggcgacgcgcttctgctacctgctcaccgtgcacagggccacgtggcgcgccatcatctgcaccttctgcggcgccatgctcaagtcctaccgccactacaggctctacgccggctagctctacgctacctacgatcgccggccgccggcggtgatggccggagagagagagaggaggaggcgagctacttgctgcgtacgtctctgtgctctctgcgaggtgtgcttgttgcgttgggccttggctactagtactactattggaggagtattaattaattggctttgttgatttcttgcaaaatgctaagctttgcatgcagcttgtaatccctgtgcatgtagtatgttgtacatatgctggagatgaagagaggaagttgattaaatttttgttaccggtttcaaagc

SEQ ID NO: 22603 - DNA, 2349 bp, Oryza sativa
  ref <308>: DATABASE ACCESSION NUMBER: AK072772
  ref <309>: DATABASE ENTRY DATE: 2001-12-06
ggcaggtctctctcatcatctcatgatcgattaggtcttcgtaattcgtcgcaaatgtgttggttcgcctcctcttctgcactcgatcggtgccgttcacgattaggaaacacgagctccatccaatctgagatatccgggctccatttctttctccgatctacgcgtcctcacgttcgcgtcgaagcctcgctggagccgccagcgacggccacctgccctgacagcggcggcgatccatccagtgattcatcgatcctccctcatttcttcagatccagaatgtcctggatacaatttcttcagattattcagtgacaagagtagtacagtaaatttcttcagaattattcaaagacagagtggtgctcgtttgtttaattgtttatatgagaaatgcacggtttcttgcgagatcttgttgaacaaatcatggattcaggagtgacgagacagcgaaagttgatgtctttttagggtcccaccatcttgaggccttggcattggcatagcataatccggaggagggagagccgcatattctgattctctctcctcctcctcttcttctccctccaaacacagcgccgggaaagcgaccgctgggctcccactccgcattaatactcggcctcctccgattttgtttgttttgtaactttgttcatccaatccagcctctctttcttgctttcttggagttggaggtagtagctcggatgaggtcaaattctttgccccctaagcttcctttctcttctcttctccccactgataatcttgttcctcctcttctttgttcttgttcatactatgcaagggtataacttggtgtagtttccggttcgattctgggattgtttgctctgcatttcgaggctcatcaagttgggttcttttttgcttgcttatctgattcatttgatgatgggaggttggtttggatgtgtctgtaggttcatggagaggtggagatgcgtcagtgtgttggctctggtgctcttgctgtcaaatgcttcccatgggagagatatctctgtccagcactctcagcaaactttgaactatagccatactcttgccatgactcttgtggaatatgcttctgctgtgtacatgacagatttaacagctctttatacatggacgtgctcaaggtgtaatgacttgactcaaggctttgagatgaaatctctaatcgtggatgtggagaactgcctacaggcattcgttggtgtggattataatttaaattcaataattgttgcaataagaggaactcaaaaaaacagtatgcagaattggatcaaggacttgatatggaaacaacttgatctgagctatcctaacatgcctaacgcaaaggtgcacagtggatttttctcctcctataataacacgattttacgtctagctatcacaagtgctgtccacaaggcaagacagtcatatggagatatcaatgtcatagttacagggcactcaatgggaggagccatggcatccttctgtgcgcttgatctcgctatcaatcttggaagcaatagtgttcaactcatgactttcggacagcctcgtgttggcaatgctgcttttgcctcttattttgccaaatatgtgcccaacacgattcgagtcacacatggacatgatattgtgccacatttgcccccttatttctcctttcttccccatctaacttaccaccacttcccaagagaggtatgggtcaatgattctgagggcgacataaccgaacagatatgtgatgatagtggtgaagatccaaattgctgcaggtgcatctccacatggagtttgagcgttcaagaccatttcacatacctgggagttgatatggaagctgacgactggagcacttgtagaatcatcacagctgaaaatgttaggcaactccaaaaggatctcgccagcaacatcatcgtctccaagcactctgtcgatgtcactattgtagaacctagttcacaaacatattgaaagcaattatggatagtctacggtatttcttttatccgatttagagcaaaggatggatccttcctcttttctcgaagatgaaggcttgattagaaattcattcagatttggatgtacatacagggttcttttcatagcttgtgaatatgtagagatgtacataggatgatagattcatatttcataggtgttagttttttattttttccttttctgatgcatatgcttatgcattttgtaaatgcaataaaaacaagaatagttccacccatgtatgaatatccatacaattatctgtatctgccactgtgtaagtaaaagatatatgattatctgtgactttaggcg

SEQ ID NO: 22604 - DNA, 970 bp, Oryza sativa
  ref <308>: DATABASE ACCESSION NUMBER: AK072773
  ref <309>: DATABASE ENTRY DATE: 2001-12-06
tggcacaacctgaattcggcccggccctttccggtttccaacttggaaacgggaggttcccaacccagaggccatcaacgcaagaacacattctcacctcgccggagacaaaaaaaatggcgaggtggccgccgccgtcgccaccggacggcgagcactcattcggccacgaagccatcgcgctgtccttcttcgtggcgtgcgtcgccgccaccgtcgtgatggcgtcgtccatgtgctcggcgtgcggccgcaagccgaaggcggacgacccagcgcccgacgccgccgccgccgccgacgtgaacgcggagagccatggcgacggcggcgaggagggggaggaggaggagaaggcgccggtggtgacgctgtcgccggagctggcgacgcacgggccgatcgccggcgtggcgccgccgccgtcggcggcggcgaagcggcggatgtcgatgaccatgagcctgagcaagaacctgagcatgaacatcccggacaagatgaggctgagccggcgggagcggcgggacaaggtggagccggaggacacgctgtggaagaaggccatcatcctcggggagaagtgcaagatccccggcgagagggagggcgaggccgacgccgacgccgacgacctcgccgccggcagcttccgccgctcgagctactcgcggcccatgtcgcgctccatctcgctcgccgtccaccaatcgcacgtcgacgctcctccggccaccaccgccgccaccgccggcgcctcgagcgccgggagttcttgacgcgctcccgggtcccggcccggcagagaggaagtgacgtggcagcctcggtatccgtgtgtatacgtatgtatatgtacgtgtgtataggtggcagggttgttgcagggagatgctagtgtgaatgtgtgatgatggtcaaaatgcattcagattcatcagatattcagttggtggtttcactctctccc

SEQ ID NO: 22605 - DNA, 2558 bp, Oryza sativa
  ref <308>: DATABASE ACCESSION NUMBER: AK072774
  ref <309>: DATABASE ENTRY DATE: 2001-12-06
gaggtgcgcgccgcgtaagccttcgcctggcctggccaagctcttccgcgcgattcgcgtttcgctggggaacgcgacgccgcggcccgcccgcgtggtggattttcatttatattcgtaggggcacgcggaaaaaaaaataatgtggaggttcaatcccttcggggggaaagtacaaaatggattggaaggtcgcaccattgatgttggcaacattaagattacagtacgcaatgctattgcacaaggaggtttctcttgtgtatatctggcatccgacgcaatgcatccatcaaagcagtacgcaatgaagcacatcatctgcaacgactcagaattgcttgatcttgtaatggaggagatccaggtgatgaacctcctcaaagggcatcctaatgtggttacactagttgcccatgatgtttttgatatgggccgcacaaaggaggcactacttgttatggagttctgtgagaagtccttggttagcgcaatggagagcagaggtactggttattatgaggagaagaaggcacttttgattctcagagatgtatgcaatgcagtttttgctatgcatggtcagtcaccaccaattgcacatagggatctgaaagctgaaaatgttcttcttggattagacggtgcatggaaattgtgcgattttggaagcacatcaacaaaccataaatgctttgataggccagaagagatggggattgaggaagatatcatccggaagcatacaaccccagcatatagggcccctgagatgtgggatctttacagaagagaagttattagtgagaaagtcgatatctgggccttggggtgccttctatatagaatatgctacttcaagtctgcatttgatggagagtccaagttgcagatacttaatggcaattatcgtattccagagcaacccaagtatagtgccgctgtcacaaagttgatcaaagatatgctggaagcctctccaaatgacagacctgatgtcacgcaggtctggtttcgtgtaaatgaactactacctctcgagttacagaaaaatctacccgatggagcttcgtcaggcatttccatgagtttgcaagatgaaggtgcttataaaagaacacatgtgatgcctagaaggaacccgcctcctcctccaatagaacaatccaatagttcgttatctcatggaagctcaaaggcaggagatgcacctctaggtgcattttgggcaacacagcatgcacagggttctcaagttgcagataataggaactctttgtttgatgaggaaccaataaaaccatcaccttcatcaaagcataaccaaagcagaggggatatcagcatcagtgcccctggagatagacatggtcgttctggccaggctgtccggggtacaccaagtaactctgtatcaaacaatgggcttgcaagtggtgctaacacaaatctgttcatggagtcacaaagttctttgaaaactaaagaatcacaaccaaaatcagagaaggatcccttcaacagctttgtcgctgattttgaagcaaacaatctccattctgggaccaatgttgctagtaaggaatctgagcttgaagcagaagtgtccaatctgaaggagcagttgaagaaaacatcatcagagaaggccgagatgacagccaagtttgaaaagttgtctgcaatatgccgctcccagcgccaggagattcaagagctcaagcgcactcttgccgagactacacctccatcaagcaaagtcagctcaagattaccagactccgggccacagcgtaaggagaagattgaaggaacggtgtgggagcttgagcaaggaatgctcgcaaactcattacctagctctgaagccaaaacatggcaggcattccctgaccccaaatctcaacctgctcaggtcagaccaaaggttgatcattctaccaatggagcgcaaaacctggcaaggaacgcaaactcaagacaatcaccagatggttggggtttcgggccagatagtttcaggacatcaccagggagtactgccgctcagatcaacaggcccactgctcaggggagttcctcccagagattcagctcaggagcagcgaagaaagtggagcaaccatcagggtgggccggattctaacttctcgtggccattcggcaattgtccattctcattccgaactactagctgccctatgctgcaattgcgagttgaagattgatgagtgtggctatggttcttgccctggcgtagggtgccatgattggttattttcaacattgttcatagttggtcaagccgacctagacattggtgttctgcggccgttttgccaataccttgtcaataaacacatcttcaaatctaattacaacgtctgtatgtactttacgtgtgaagcatgaacacgtgatggcaatgagccctggcacaacgcacaacagccatgccatttacatgctacctcggtactccatattcaatccttatccgcagggtaatgccgtgctaatctcaccgtctttgtaagatgtatacaaatggattgccc

SEQ ID NO: 22606 - DNA, 1136 bp, Oryza sativa
  ref <308>: DATABASE ACCESSION NUMBER: AK072775
  ref <309>: DATABASE ENTRY DATE: 2001-12-06
ggaggatggtcccatggcttccttcctcttctcgcgcggtcattcttccccttttcccctccgccgcgggtgggctggtaagtcggtaggtaagggatcaatcggtttcgatctcacctcgttcgctgccgtttgttgattgatgatcaggcacaccaactagccggatagattgcccgcttgctcgtccttttctggtgcttgatccgttcggtttggggggggtctagtttcggcgatttgcttctgctgttgtgttagttttctgaacacagtatctctttcgattggtttatggctaattgtggtttgctgtgttgggtacaatatgcgcgatcggttggtttgtgtcaattcatgtttggtgcgatggatttgtcatggatattttgggcttgatcaaaggctagatgaactgaagttttcgctctgaattggtcatggttaggattgctcactggcctcagattattgttcggttcctttcaagttcgtgatgcttggttttgtttgagaccgttcgtctgcttgcagctatgcagtttttccttcggatctagtaatttttatgataaggtcaagtcatatcagaaaatttaaggtctgttcagagctttcaaatcaccggctttaacttgttcaatttcggcaagacatactcttcagattatcttgaatatggttgtgtgtcatcttaaccggaccatgtattgctttttggctttgataaaaatcgtcactatgtgctagggcgttggaatgattcttctgtgtcagttcttagttaaagtttaacatcaggatttctcgcgaggatttaaggagctctttttgaccgccttccctgtggattaatttatcctagtacaggaactacagattacttgctgcttgacctgctcagtttgaggtacagatctcgtgatttccctgtttactggtgttagttttaggaaccttgatgctttggtttagggctatggttaattgcaatttattgaaatttcaatatgtcaatattgtgcagttggtttgcttccattacaagcaactgtccaagaacattttatttgtaatacgaacatttataaaccagagaaattgaagcttgttgtatgggattggtcattgttagg

SEQ ID NO: 22607 - DNA, 572 bp, Oryza sativa
  ref <308>: DATABASE ACCESSION NUMBER: AK072776
  ref <309>: DATABASE ENTRY DATE: 2001-12-06
gaaaaagcacactccagaacccaaaacagctgcagtgccatcagtttcagtttcagtttgagtgagctcgagggagcttagggtggctgccatgctggtggtggagctgggcgtgtggctcatcccgctcaccctcttcttcgtcccgtgccggcggatcgtgctcctcctcaagcagctccaggggttccaccggagcatgacgcggccgcggcggcgcgcctccgccgacatgctcagccgattctccgggctcaacgacaacatggtcttcgtgctctgagaaagtctgaagaaggtatatgtgggtgcttttcttggttgatctagtcggaaactcagatggcttttggccatggtgctggattattgctgatgctaattcagctcgtgctgtagctcttcatctctttctctttttgttcgttggaagatccaaaggagttctctctctgaatttttcatctttctgtgtaccataagctagctccagtaatctgagatgtacatgaacttactgcatttttcatcttgtgtaccataagcaaagctcaagtggtctgaacttacct

SEQ ID NO: 22608 - DNA, 965 bp, Oryza sativa
  ref <308>: DATABASE ACCESSION NUMBER: AK072777
  ref <309>: DATABASE ENTRY DATE: 2001-12-06
gattctccttcccaccccaccgccgcctccaccctctctctcgcgccgcagcgaagcgcctcccgcagcaatggcgccgacgtcgaagctgtcgcagggcatcaagcgcgcgtcgcggtcgcacacctaccaccgccgcgggctctgggccatcaaggccaagaacggcggcaccttccccaaggccggcaagcccgccgccgccgccgagcccaagttctaccccgccgacgacgtcaagccccgcgcccccagcacccgcaaggccaaccctaccaagctcaggtcgaccatcacgccggggacggtgctgatcctgctcgccgggaggtacatggggaagcgcgtcgtgttcctcaagcagctcaagtccggcctgctcctcatcaccggaccttttaagatcaatggagtgcccatccgccgtgtgaaccaggcctacgtcattgccacatccacgaaggttgacatctctggtgttaaggtggataagtttgatgacaagtactttgcccgggacaagaaggcaaaggccaagaagaccgagggtgaactttttgagacagagaaggaggcaaccaagaatctgcccgacttcaagaaggatgaccagaaggctgtggatgctgagttgatcaaggctatcgaggttgtcccagacctgaaatcctatcttggtgcccggttctctctcagggacggcgacaagccccatgagatgacattctaagttagtcggtacaagtttcaagttctgaggaagtctttttgcctagtgtgtttctgtacttctgaattttgtacccgggtagtgaactctccatttctgttgaagtctgcctgtcaaatattatgagaagattaagagaaggattatctactttggtggttcatggttaccgtacctactcaaatgtgcaatgcataacatttgagccataattaagctattgcgttgcaagttg

SEQ ID NO: 22609 - DNA, 1162 bp, Oryza sativa
  ref <308>: DATABASE ACCESSION NUMBER: AK072778
  ref <309>: DATABASE ENTRY DATE: 2001-12-06
gatcgccacctcggcgcatccacgcaacccacccgtcgcgagtcgcgagcagatcaaaaaccccatcgccgcggcgatcaccggagggaccaggccgggcggccatccgtactccgccgcgatgatgaacgacggcgatgtggcgcggcagctgaagcagatgacggacttcatccgccaggaggccgtcgagaaggccgccgagatcgaggccgccgccgccgaggaatttcaaatcgagaaactacagctggtggaagctgaaaagaagaggatcaggttggaatttgaacggaacgagaagcaaggtgatatcaagaagaaaattgaatactcaaagcagctcaatgcttcccgacttgaagttctgcaagctcaagatgatttagcgatgtctatgttggaggcagcagggaaagagctactgtacataacccgagatcaccatgtatacaagaatcttcttaggatatttattgttcagagcttgctgcgtttgaaggagccagctgtgattctgcgctgcaggaaggaggatcgtgagcttgttgaatcagttttggagtctgcaaagaatgaatatgcagacaaagcaaatatatatcctcctgaaataatggtagaccgtaatgtctatctgcctcctgctcccagtcattatgaggcacatggaccctcctgctctggtggagttgtgctagcttcccgagatggaaagatagtctgtgaaaatacattggatgctagactagaggtggttttcagaaagaagctaccagagattcgtcgaagccttcttgggcaggtagctgcttgaccgattcataaatacaggatgctgcacaataccgttttcttctgcatgatggtgtcaaagaaagcattttggcagttaaaatgatttatcactttgctcaagtctgttacatatatattttttatagggagccactgtcatcaaactacagaccttagtattgccgatagcgaataaattgatatgttcatgttgctcacgatttctcataataaggcctaagaggtgtagttatcccatttatatgttcatcttttctcacagaagacaatccattgtcatttattcatctgttatttgtttttgttttcatggaaataatataccaaggcctctcttagaatg

SEQ ID NO: 22610 - DNA, 2268 bp, Oryza sativa
  ref <308>: DATABASE ACCESSION NUMBER: AK072779
  ref <309>: DATABASE ENTRY DATE: 2001-12-06
ggctctcgctcgatcctctctctctgcctttgccgatcgtggtaagggcagagggagggagagagcggcggcggcgacgccgaaaacattcttcaggcagggcgagaaggtcgtcggccatgtcaacgaccttctcggacttcgatccgatcactgagcgccgccatgtcgagaggcagaggcaagagcgcaggcgcgtcatggttgcagccggcgccgcgtcggtcattcttatcatcatcgtcatgggcggcgcggccgtcgcctacaacgcgagcttcggtgatggtggctcctcttcctcctccggttcagcgtcaggtggcggcgcgcagcccagcctgcacggcgtgtccaagatcatcaaggcgatgtgcgcgcagacggactacaaggacacctgcgagaagagcctcgccaaggccgccgcgaacgccagcgcgtcgtcgtcgtcgtcgtcgcccaaggacgtcgtgcgcgcctccgtggccgtgatcggcgacgccatcgagaaggcgttcgacaagtcgagcgtgatcgtcagcgacgacccgcgggtcaaggccgccgtcgcggattgcaaggagatctacgagaacgcgaaggacgacctcgaccgcactctcgcaggcatcgacgccggcggcgtggacgggctcaccaagggcgggtaccagctccgcgtgtggctgagcgcggtgatcgcgcaccaggagacgtgcatcgacggcttccccgacggcgacctcaaggacaagatgagggacgccatggagtccggcaaggagctgacgagcaacgcgctggccctcatcgggaaggcgtcctcgttcctcgccgcgctccacctcccagcgtcttcggcggccagccaccggcggcttctcagcttcgccttcgatgaggacgtcacaaagcagcccgaagtgaaccgttcgtccgggaacagcctccggcggcttctcagcttcgccttcgatgaggacgccacgaagcagcccgaagtgaaccgttcgtccgggaacagcctccggcgacttctcagcttcgccttcgacgagaacgccccaaagcagcccaaagggaacgacgacgacgtcctggtctgggtgaaccggcaggagaggaggctgctcaaggccaagttccagaacaagctcaagcccaacgtcgtcgtggccaaggacggcagcggcaagttcaagaccatcaacgacgcgctcgccgccatgcccaagaagtacaccggaaggtacgtgatctacgtgaaggaaggggtgtacgaggagtacgtgacgatcaccaagaagatggcgaacgtgaccatgtacggcgacggcgccaagaagaccatcatcaccggcaaccggaacttcgtcgacggcctcaccacctacaagacggcgaccttcaacgcgcagggcgacgggttcatgggcgtcgcgctgggtttccggaacacggcccgcgcggcgaagcaccaggcggtggcgctgctggtgcagtcggacaagtccatcttcctcaactgccgcatggaggggcaccaggacacgctctacgcgcactccaaggcgcagttctaccgcaactgcgtcatctccggcaccgtcgacttcatcttcggcgacgccgcggcggtgttccagaactgcgtcatcgtgctccgccgcccgctcgacaaccagcagaacatcgccacggcgcagggccgcgccgaccgccgcgaggccaccggcttcgtgctccagcactaccgcttcgccgccgagtcggcgctcggcgacgcctcccgccccgccgtccgcagctacctcgcacgcccgtggcgcgagtactcgcgcacgctcatcatgaactccgacatccccgccttcgtagacaaggccggctacctcccgtggagcggcgacttcgggctcaagacgctctggtacgcggagtacgggaacaagggcgccggcgccgccaccgccggccgcgtcagctggccggggtacaagaaggtgatcagcaagaaggaggccaccaagttcaccgtgcagaacttcttgcacgccgagccatggatcaagccgaccggcacgccggtgaagtacggcatgtgggcgtgaaaaatatttgtgcagacacccgggcacctgcatgcgtgcgccatgtacatatgctttcgagaggagacggtccaatgtgaatatctgatacctgcctgtttcatgtacattctgtgtgatttttacttgtgcgccgtgcatgcacatttcaacc

SEQ ID NO: 22611 - DNA, 863 bp, Oryza sativa
  ref <308>: DATABASE ACCESSION NUMBER: AK072780
  ref <309>: DATABASE ENTRY DATE: 2001-12-06
ttggcgtaggagaaaagaatcactacttcactagccagctagctgcacctactccgtccaatgccgtccttcgtcgacggccccactctccggtcgctgctccggccgtccaccaatggccgccggacgaaggcctcggacggcggaggaggtggtggtggtggagggatctttaagatgttcaagctcatgcccatgctgacgtccgggtgcaagatggtggcgctgctcggccggcacaacagggcgctcctggccgaccacgcgacgacggtgacgctgttcgggcaccggcgcggccgcgtgagcctcgccatccacgaggacacgcgcgcgccgccggtgttcctcatcgagctccccatgctgaccagcgcgctgcacaaggagatctcctccggggtggtgaagctggcgctggagagcgacacccgcagcgcgcgccgccggctcgtggaggagtacgtctgggccgtctactgcaacggccgcaaggccggctactccatccgccggaaggaggcctccgacgacgagcgccacgtgctgcgcctcctgcgcggcgtctccatgggcgccggcgtgctgccggccgcgcccgagaaggagggcggcgtccccgcgggccccgacggcgagctcacctacgtccgcgcccgcgtcgagcgcgtcgtcgggtccaaggactccgaggcgttctacatgatcaaccccaacgagggcggcgtcggcggcgacagcgccggcgacggcagcgcgccggagctgagcattttcctagtgaggatgaaatgatatcgaagttagtatatatacttcacctaaatcgaaatacatatatactactttgcctttctcttgtg

SEQ ID NO: 22612 - DNA, 3019 bp, Oryza sativa
  ref <308>: DATABASE ACCESSION NUMBER: AK072781
  ref <309>: DATABASE ENTRY DATE: 2001-12-06
ggctgccgccgccgccccgcgtctcctcctcctcctccctggccggcggcgtgaatttgaactactccgtccggccagcctccgccgctccatgccatattcatcccctcctccttaaatcctagcaccctgacacctccagtcgccttccctagccctatcaacccttgtgtttgtgaatggttggatggattccatctcggtgaatgatctcgcgggatttttttttgggcacaattgcgatccgatccgggtatcccaccgatcgaccgaagccgggagggcacgggcgatcaactggtccgaaacaatgtgcttgctgatgtcacaatgtatataggattggcaacatggtcagaggctatgagcatggttatgtgctgaaaataacctctgttggtgatgtcgcagatatcagtattctggaaaatggcataaaatgtgggcatccagttctgttaattgctggtaatattgatcaggacactgtttcaatccagtccttgtggccaataagattggaagtgtatcggagtatggagactgcaagaaaacctggatgatatcactttccaattggaggctgaaagtgagctcaaaggagaagaaattttgggtggaagatgctttgaatgcaatggaagtgttatggttggtacccactatagtccatatcagaagtggagaaagctattgctgttgctggtgtctatactcttttgaggctggcatctaaagttgacttcatcatagaatctcgagaatgattagcagaaggttgaggttgaaattgtaaggaaggccttcagtataatccctgaaaaggcggtgagttgaggtgtcgcttggagcattctgcattggtggcaaattaagacattcctggcttgagagttgagacgtggttgtcgacgccatagagagcgagaacgtacacctggtcttctgcaacctgcaaaccaatggcagctagctctggtaatctctgcacctgatcccatgcacgcctttgactgtgctatcttgcaaatctagcatagggataccacgttgcagaatatggattctgattgagcaacggcacttggcttttctgtgaaactgtggcaactaaatcttttgcttacatacagataggacggctgcacttagcaacactacacccgtagctaagtgaagtgatttcatgaatgggtgtagcgttttctttaaccttcagtaaaagaatacttgatgccaaataggagtagttttcaacttaacatagggatagaaagtaaagtaaaatgggggtgaggggttcattggatactcaagagaagtctgtgattatgtaaggcccggaattttaaacaggtgcgtgcgcatttggcttgtcacacacacataggatgcccccctctgcttggctgcgtgttcgcttgtttctgcgtgcgcctgcacagctgcaaattttcaccagtgccagcagttgggaggtagcagtagcagtggtaaactagcaaaggcaaattcacagtggggggcctggctatccatccatctccttgaccttttttacctggagcatggaaggaaattccaaaaaccctcttgagctctttcgtgcttagacaaaaagaaaataccgtttgctccaagtccaaaccattgtacttttactgtaaggcaacccaagcacacatatagatactgctacattatgtctgcgtatgcatatagtgaccgttgttttgggtctttgtggttggtaaccactccttgcactgacagtatgactctacttattagacctgtgctgccgtgcattagatgtagtagtagtataacgttactgctagtagtattttgtttgtgaaggttagtaaaataattgatggattgtaaacaaagtctaccactatagtagcagtagtaatacaagaatagtaaaaaaacacaagatccgggtcggccggcctaggggtggaaggtggccgtccacgctccgtgcaaatgtgatcttcttcttcatcctagagaagaggagaggccaacggccggccattaatattccctcttcgatgcctgcataaaaagctgtgtactgtactactacccctctctctctctctctctctctgcctcactggcacctgtagtttagcgccgttgcacgctgcctctgtgtgtgtgacctggctggctggggctgtatgactttgcctatttggtgcctcgctgtactcttgggcccggggtctacttgcgaaaaaattttttaaccaaacaagatggaggaaaaagggcaaggattgaggaatatctctgtggtggagatgggtgattatacttgaatttgctggtgtttttttttctcattacttttgcacctccaatctttgcaactttcctaccttttggggaagaattaaatgtctgttcaagtctacaggggaatttaggccctgtttagttcacaccaaactttacccaaacttccaactttccattacatcacatccaaaactttcctactcacataaactcccaacttttttttccaaactaccaactttccccaaacttctctccaatttcagaaactaaacacacagttagtttttttttctatgcacagagttgaatagaaatttcagttaccccaagatatactattttaccagccatgatttttgaatcagtagtgcattagacatatccaaccaacaaatgaatgtagttgtagattatcccccaactaataatgtgcgtgtgcaatgattctgtcatttgcaaattgcaattgccgcctcaaaacgcaaatgccaatatgtgacacctgtgaagtgaaaatggtgttggcatcataaaatatttaaccaaccccaaagcatgggtaccttctaagttagccacacaactaatttaacagtgtactgctatcacacagctgtacaactggcatatcattgctatacaccagtacaaagtgctcgtgcccaccgttttatgctgtaatctctctcaacaactgaat

SEQ ID NO: 22613 - DNA, 2892 bp, Oryza sativa
  ref <308>: DATABASE ACCESSION NUMBER: AK072782
  ref <309>: DATABASE ENTRY DATE: 2001-12-06
gactcctcctcccctcacctcaccttacctaagaacgccacccattgccggagttgataccaaacaaggaattcatcaatggcagcgcatacagtgacggacccactggaggagctatggaaccacacgatgtcgatggacaagacgcacctgatgtgcttctacccgagcaagatcaccatgggtggcgtctggacgggcgacaatccgctcgacttctccatacctctcctcctcttccagatcctcctcatcacctccaccacccgcgccgccaccctcctcctctctcctctccgtctccccacctacatctcccagatcctcgccggcttcctccttggcccctccgtccttggccacctccctcacttctccaacctcgtcttccccgtccgtagcctcttcgtccttgagtccatggcccttctcggcctcgtctactacaccttcatcgtcggcgtcgagatcgaggtctccgccatcacccgcgccggcatccgtagcttcggcttcgccattggctgcacgctcccgcccttcctcgtcggcgctctcaccggctacgtcgcgctcagcactgacgacaaacacaagggtgacacgttcctcaacaagctctccttccccatcttcctcggctccaccttctcctccaccgccttcgccgtcctcgcccgcaacatcgccgagctgaagcttgccggcaccgacgtcggccagctcacgctctctgcgtcactcatcaacgacaccttcgcctggaccggcctcaccgtcgccacggtgctcggccactcgcgctgcaccatcacgcagaccacgtggacgctcacgtcgggcgtcgtcatcttcggcgccagctacctcctgctccgccccatgctcctgcggctggcgaggcgcgccgccgagggggaggcggtcggcgaggaccgcgagtgctggattctgatcggcgtcatggtggcggcgctggtggcggacgcggggggcacgcacgccatattcggcgccttcgtgttcgggctcgcggtgcccaacgggccggtcggggtggcgctggtggagaaggtggaggacttcgtggtgggcgctctgctcccgctcttcttcgccctcagcggcctccgcaccgacaccgccaagatcaccaacatgcattctgccgtgttgctcatggtcgctgccatggtcgctgcggtcttgaaggtcgtcgccgcaatcggcgtcgccggtgtgttcggcatgccgctcggtgacggcacgtccatcgggctgttgctcaacaacaaggggatcatcgagctcgtcatcctcaacattgcaaggaacaaagggattatgagtgaccagtcgttcacggtgctggtgttcgtgtcagcgctgatcacggcgatggtgagccctttcctgggcatggtggtgaagccggcgcggcggctcgtgttctacaagcggcgcacggtggcgtgggctcacccggaatcggagctccgcgtgctggcctgcgtccacgtgccgcgcgacgtgcccgcgctactgacgctcctcgacgtggtgacgccgtcgagccgatcgcccgtgggcgtcctcgccctccacctcatcgagttcgtgggccgctcctccgcgctcctcctcatcaacgcctcggcgccatcgtcgtcctcctacgacgcctccgtccacgggcgcagccacacggagatgcagttcaagcacatctcccacgccttcatggcgtacgaggagcagtcggtgggcgtgtcggcgcgcaccatggccgccgtctcgccgtacgcctccatgcacgaggacatcacctccgccgcggagaaccagcactcggcgctcatcctgctcccgttccacaagtaccggtcggtggacggcggcctggaggtgtcccacccggcgatacagccgctcaactgcagcgtgcagagcttctcgccgtgcacggtgggcatcctcgtggaccgtggcctcgcggcggtgccgggtggcgggtaccgcgtggtggctctcttcttcggcgggagcgacgaccgggaggtggcggcgctggcgacgcggatggtgaggaacccgaccatcgacctgacattgctccggttcgtccagaagggaggaagcttcacggcgagcgagttcgacgcgctgaaagagcggaaggccgacgaggggtgcctgcgcgacttcctggagagggcgaacgagggcggcggcgcgacggtggagtacagggagcgcggcgtgttcaacgcgagcgagatggtgggggagatacagagcgtggaggccatggggaacaaggacctgttcgtcgtcgggaaggtgcccggggggtcagggctgacggcgggcatggcggagtggagcgagtcaccggagctggggcccatcggcgacctgctggcgtccaaggacttccagacgacggcgtcggtgctggtgctgcaggcgtacgggaggccggcggcagtggtgggagcgggagcgggagcaatgtcggtggattttggcggcgacagcgtggcgatggcggagaggacagccagtgggcgtaggccatgggcacgaccgggtgtatgatcatcgatcatcggagaatttttctttctagaattggtgaccgttgagatagatgtaggaatagctgataatatggtgtggataattgcatattatggtataaaatttatacatagtgcaaagcttaaacatagttcttggaaaaataaagctaaataaccatacactagcatgttgttaatcaagcagtcatcgttgtgatgcaacattttgttatttagagggcctgaggatgagaacaaatgcagggaggtttggaaatatcagaagaaactcaggagcagtttcattttc

SEQ ID NO: 22614 - DNA, 2674 bp, Oryza sativa
  ref <308>: DATABASE ACCESSION NUMBER: AK072783
  ref <309>: DATABASE ENTRY DATE: 2001-12-06
gatcgcagacgagacgaagcagaaaaaacccctacacggtagccctccggtcgctgccggtgggtgacccgccccgcccataacggcacactctccgtactctcctccaccccccaacccccacctctccccactcccctcccctcccctccccgccgcacaccgccgccgcaaagcccgcaagccgcagctctctcgatcggcgaggaggttccgacgaagctggggaggctggcggcgatggagagcagcagcgaggaggagctggaggaggacttccctggccacgagtggatcaccccgcagtcctccatccgcgccgcctaccagtcgcagaccgagaagggcatcaggaaaatttgctctgagctactggagttgaaggatgctatcgaaaacttgtgcgggaatatgcagtcgaaataccacgctttcctcagaatatctgaggaggttgttgaggcagaacaagaattaattgagttgcagaagcatgtgtctgcccaggggattcttgtgcaagatctaatgagcggtgtgtgccgtgaactcgaaatgtggcaaaaacattgcaaggatgaacatgtggaagagaaagaccttcaaacagaacttgatgaaattttgtcatatgatacccaagattccaaggttagttttctggataaattagatactttgctcgcggagcacaaaatagaggaggcattgcttgctttggaaaccgaagagaagaaatgtatggctacggatgatcctggcaaagaattagatgcagagatttctacctataagacagcactatctaaaaggaaatcaattcttgaggatcagcttgttaggtattcagaacagccttctttatctattaccgagctaaggaaatctttgtctggccttattaagattggcaaaggttctctagcccaccaagtacttctaaaagcttatgggtcacgtcttcagaaaaatgttgaagcatttcttccaacatgttcgatctacacagaaacttactctgcaactttgtcaaagattgttttctcagctatctcaaaggtatccaaagaatctagttcgctatttggggatagccccatgaatttgaaccggattattcagtgggctgaatatgaaatagaaacctttgcgcgtttggttaaggaaaattctcctttgcctgagagcgtatctgcccttcgttctgcgtgcatatgcatccaaactagtctcactcactgctcttatctagaatcatatggcctgaaattctcaaatttactaatggtactattgcacccctatgttgaagaagtgcttgagctgaattttagaaggctgagaagaaagattgtagattcagcaaaaaatgatgatattctgcttcccagccctcaagaaggatcacggctctctagttcagttgcaccaaatataatgcttacaagcagtggaaagaagttcatgtccattgtcaatgatgttttggatcaaattaccccaatgactatagttcactttggaggaacgattttgaataaatttgtccagctatttgataaatatgttgaagcactaattgaagtcttaccaggagcttctgaggatgatcatctagtgaagtcaaaagagcctatagaatttaaagcagagagtgatgcccagcagattcaactcattggaacagcatacactgtagcagatgaattattgccagcagctgtatccaaattttttgatatccaaaccgagaagaagagaattggtggaacaggcgagggccttggctctggatctatatactccatagaatacaaagagtggaaacgtagtctgcaacattcactggacaaactgagggatcatttttgcctacagtatgtcttatcatttatttacttagaagggaaatcacgactggatgctagaatgtacttggagctgaaaactgatgatcttctttgggagtgtgatccttcaccttctctgcctttccaggcgctgtttgtaaagttacggcagctagctagtgttgctggtgatgtcttactgggtaaagagaagatacagaaggtcttgctctcaaggctaactgaaacggttgtcatgtggctctccaatgaacaggaattctgggatgttttcgaggatcaatccatccaactccggccttcaggactacagcagcttattcttgatatgcacttcgtcgttgagattgctgtctgtggacggtatccacacagacctgttcagcagcttgtgtcggtaatcataactagggcaatcgcagctttctcagtgagaaatgttgacccacaaagttctctacccgaggatgaatggttcctcgacatggccaaggttgcaattaataagcaattagggacttcaggatctgagtccgagcttgaggagcctgtggttgtacatgatgaaatctcggattctgaagagagtagtatttcaagtccatcgacgataggatctgaagattcatttgcttctgcaaacaatgatgatctagaaactcctgtatatttcacggatcccgaggcataagagttatttatgcagggaggtgattgtagttatttaaacatctagtagtttaatgtcctatatacttgcagaaaaattgataatccatatttactgtcctcattttctttcc

SEQ ID NO: 22615 - DNA, 3440 bp, Oryza sativa
  ref <308>: DATABASE ACCESSION NUMBER: AK072784
  ref <309>: DATABASE ENTRY DATE: 2001-12-06
ggaggaggagcgcccttccctttcccctccacccgttcgtccgatcggtcgccccggatcgcgagccagctagccgatcgccatcctgcagaacccggcttggatttggagcgatggtgcatcgtattcgctttgtggatgagtaatggtggagcctaagaaatcccgatgacgatgggtgtggtgtcaagggaggtattgcctgcatgcgagaggctttgcttcctttgcccgtcattgcgcacgaggtctcggcatccggtcaagcgatacaagaagttgctctcagaaatcttccctaagtcacaggatgaagaacccaatgaccgaaagatcggcaaattgtgcgaatatatttcgaggaatcctttgcgtgttccaaagattacagtttatttagagcaaaaattctacaaggaattgagagttgagcattttgggtcagtgaaagttgtcatggcaatttaccgaaaggtgatatgttcttgtcaggagcaactgcctcttttcgccaatagcttgctaaacatcgtagaagccctattggaacagaacagacaggatgacttgcggacaatagcgtgtcgaacacttttttactttgtaaacaaccaggttgacagcacatacatgttcaatttagagagccaaatccctaaactatgtcaactggcccaagagatgggtgagaaggagaagatatccattgttcatgcagctggcctccaagccctttcatccatggtgtggtttatgggtgagcattcccatatctctgcagagctcgacaacgttgtctctgcagttctggaaaactacgagagcccatatgcaaattctgataatgatgctgccattgaggatagaaggactcagtgggtgagtgaagttctcaaagctgaagatcatgaaccttccggtattaccattttgacaagggttccttcatggaaagccattagagctccccgcggtgaattaagcctgacaactgaagaatcagaaagtccaaatttttggtcagggatttgtctgcacaaccttgctagaatatccagggaagcaacaacagtccgacgagttctggaagctatatttcgttattttgataacaacaatctgtggtcgccttctaaaggacttgcattgtgtgtccttttggatatgcaaattgtgatagagaaatctggacagaattcacatatattgttatccatgttagtcaagcatcttgaacacaagaatgtattgaagcagacagataagattctggacattattgaggtcacaacacgccttgccgagcactccaaagctcaatcttctactgcactaatggctgcaataagtgatatggtcaggcatttgagtaaaaacatgcagctcttggtcagtgatgtaggtcctggggatggcatggttatgaatgacagatatgggaaagctaccgatgaatgtcttgttcagttgtctagaaaggtaggcgatgctgggcctatccttgatgcgttggctgttgtcctggagaacatttcaagtactacacctgttgcccggtccactattgctgcaacatatcgtacagctcaaataattgcatcattgccaaatctgttataccagagcaaagcatttcctgaggcgttatttcatcaattgcttttggcaatggtctatccagattgtgagacacatttaggggcacatcggattttctctgttgttcttgttccttcttctgtctctccatgctcattttcaggctcttcacaaacaagcaagattggtattaaaaggacattgtctaggactacatctgttttctcatcttctgctgctctgtttgggaaattgaaaagagatgtgttttcatttcgtgaaaattcacgcctggatggcactaatctaatccctatcagtgagaattcagaccagataaacgggaatgatccaaaactattcaaatcacagaccattcaaaggatgtatagtgcaaaagatagttttgtaacatcttcatcagaaataagtaatttgagtgggacaactcaggaaacagatccagtcaccctcatgctgagtggtcgtcaggctatccttctgctttcctccttgtggactcaggcactttcacctgaaaatgttccacgaaattatgaagcaatttctcatacttattgcttgatgctactgttttctgaagacaagaaatcatgtcttgaagttcttgttggcagctttcagcttgctttttcattgcaaagcatttcattacaagcaggttttttgccaccatcacgcaggcgttcactctttactatggcaacttctatgcttgtgtttttctcgaaagcttttgggcattccatctctcattcctctagtgaaagatttgttgactacaagcatagttgatccatttcttcgtctagttgaagactgcaaattgcaggtggttgagtcttgcttgacagtttacggttcaaaagacgacgatgatcttgctttgaaatctctctcaaacatcaacatcaatgatcagtcaaaacaggcatcagtttctcttattctcgatagtttgaaagatttatcggaggctgaattgtctactataagaaagcaattgcttgaggagttctcagcagatgatgcctgtcccctgggttctcactcgaatgaatctacttcacaatctcctgcatataatgctaagttgcaccaaaaatcgttggaggttattcctgtcggctttatttttgaggatgataccctagttgaaccagctaacagcttagcagaacctcaattgcaacaacctttggacaatggccttattgatgtgaatcagcttcttgaatcagttgtggaaacatctcggcacgttggaagactatcagtgtcaacaaaccttgatttgccttttaaggaggtagcaaaccgatgtgaagctcttttgatcggaaagcagcaaaagctatctgtctgcatgagcgtccaccaaaaacaggatggtgaatcacccatggacaagcttgggtcacctcagcaaatttctccaacggctgggtttgtatcaacgaacgacgagcaatgtcactctgatttctgtaagctgccggtcctgagtccctacgataaattccttgcgggctctggctgctaagatgaatgttacttggggaatcgaagaacacagcccggcaaaaagaatcgaagaacacattgttggcccaatgtctatcgactaacaaagaaaggatacctcaaaaccttggatattcggtggtttcttgattcatgccttcatgtatccttgttatgcaagataagataattgtttgtatctgggctccccgttttgtgtcacgtgttgattcgtacatggcagtaagttcatctgctcaatcgggcaacccttcttactcatgagaaggaatatc

SEQ ID NO: 22616 - DNA, 2630 bp, Oryza sativa
  ref <308>: DATABASE ACCESSION NUMBER: AK072785
  ref <309>: DATABASE ENTRY DATE: 2001-12-06
ggccttactcacggtgattagtttaaccccatcctttggttgggtctcaaatatctcaatctgggtgggggaagtggggaggtgtagagagagggggaagagtgtgtcaaatcgcgtcgcgctatcactgcctccttcacagttaaatctcactatcgtcgtcgccgttccccagtccggcctgccggtgaatgagtgagtgaggtttgttggctgcattctaccagattgattgtttgaggggagtgtggtgattgtaatgagatttgatgagagaagaagaatgcccacatttttaaggtgaatctacgattatttggagtgcacaaggaaggaggtaacccccactgacggttcctttcaggcagtctatgcttccaaagtcagaaccttggtaattctgttcagttaaagatggctgttgcagttccggatcacacattcaacaatggttactcctcaaagaatcaaattgaggggagatcacttagttggaagcgtgtgtttgtccaaactgacaaaggctctgtcttgggcattgaattggagcgaggagaaaatgcacacaccgtaaaaaagaagctgcagttagcgcttaatattcccactgaagagagttcactgacatgtggtgatcaacttttgaacaatgatctcagctacatttgcaatgactctccattgcttctcactaggaatcacatgcacagaagttgctccacaccttgcctctctccaaatggaaaggatgttcaacactgtgatgatagtagagtcattgaaatcgtggggtgcacaagcccttctgcaagaatgaagcagttagttgatgatattgttcggggaattgaaaaaggcatcgaaccagtagctatcagcagtgggatgggtggtgcctactatttccgagacatgtggggtgagcatgctgcaatagttaagccaactgatgaggaaccatttggtccaaacaatcctaaaggttttgtagggaagtctcttggactgccaggtcttaaaaaatcagtgcgtgttggtgaaacagggtcccgagaggttgccgcatatcttctagatcacaagaattttgcaaatgtacctcccactatgctggtaaagatcacccatagcgtgttccatatgaatgagggtgttgactataaaacaaagtctagtgacaacaaaacacaagcttttagcaagcttgcgtctttgcaagagtttattcctcatgactatgatgctagtgaccatggtacatcaagctttcctgtctctgctgttcataggattggtatacttgatattagaatcttcaacacagacagacatgcaggaaatatacttgttaggaagctttataatgatgctagcagatttgaaacacaaacagaacttattcctattgatcatggcctttgtcttccagaaagcttagaggacccttactttgagtggatccattggccacaagcatctattcctttctccgaggaagatcttgagtacattacgaacctagaccctataaaagatgctgaaatgcttcgcatggagctgcatacgatccatgaggcaagtcttagggtgttggttctctcaacaacatttcttaaggaagctgcggcttgtggcttttgcttgtctgagataggagagatgatgagcaggcaattcactaggaaagaagaggagccaagtgatcttgaggttttgtgcatggaggcaaggaattgggttgaggaaagagagtggctgcttccacaagctgattttgaaggagaggatgacaatgagtccactcagtttgatctcgattctgaggatgattcaactacatttgaagcatcattttccaacaatatcaggccaatcaaaggtaattctagggatccaccatcaaaattagctgaagtaaatgaatatgtggatgaagatgacaacaatgagttcaacaaggatgatgtgggaacctgcacaagtccaattactacttggactccttccacctcaaacttgtccatttcgtccaatgaacttagcttcagtggaagacgcaaatctcatagtggcgtcgcgaagaacaaggttacttctaaaattaacagcaatagttatagtggcaatcatagtgccaaggagaagctccctcacaactccagcttcgcaaagttatcagacttgagtgccaacaaatggagcccattccttgagaagttccaggatttgctccagagcatgttccaagatcgaaagcaaactgcaggccgcaacccatggctgtcgcagaggctaggcacttcttgccaattttaaaatggtagagaagaaataaagtaatgtaggccaaccaagcggtattcctgagcagttgtgttctaccgtggtaatagttgcatacgtgcagtagcccttcactagatagtacaagtagaataaaaccttctctgatatatgtgcacagtggtcataaggtagagatatccctacagagatctaaaatgtgagtatgtattccagcaggacattgttgcgtctttacgtagttcttttacttaattatgtttgttgttttcattatgtatatatgtcctgtagtatcgagatgaaccaccagtgattgaccattg

SEQ ID NO: 22617 - DNA, 913 bp, Oryza sativa
  ref <308>: DATABASE ACCESSION NUMBER: AK072786
  ref <309>: DATABASE ENTRY DATE: 2001-12-06
gttcagcacacacagtctcagtgagctcaagataagagtatattcacagagaagagatatctagagcgtgtgtgtgtgagagagagataggcattcgttcgatctcgatcgatcacagctagcaatggcagcgccgacgtccaagaaccttctcctcgtcctcgtcgtggccgccaccgcggtcggcatcgtcgcgccgcacggctccgaggccgcggcgggtagggctgtcacgggcctcgtcaccggcgtagtcccgtgcagcgccgggagctccatcaacgccgcgtcggtccccgcgttccccgacgccggcgtgcagatggtgtgcggcggcagggtggtgggcggcgcgacggcggacggcacgggggcgttcaccatcaacatgggcgcgctcaacgcgacgatgctcatggccatggccgggaaccagtacaaggtggtggtgaccaccccgctggcggcgtgcgacgcgtccctggccgccgtcgccgggacgctcacggcgccggtgcagctcctcggcggcaccggtggcctcggagggctcggcggcctcatcaccctcatcgcgcagatcctcagtggcctcctcggcgagatcctcaacatcatccccttgccattctccctcgtctagatcgatcgatcatcgatcgcctgcgcacaaacctgcagccaggcggcggcgtgtcaaatggacgatggattatgatgatattaatatgtagttaagcatataaattaaattaatacgtgtttatatatagcaacggggcggcctaactaatgcgtggtcaattaattaccctgctgctttagattgtatatcgtgccatgcgtcgtttctctatgtataccagttcatgtgggcttctaaaattatgctatatatgtactgtctaatact

SEQ ID NO: 22618 - DNA, 1451 bp, Oryza sativa
  ref <308>: DATABASE ACCESSION NUMBER: AK072787
  ref <309>: DATABASE ENTRY DATE: 2001-12-06
gaaaagcctgtgtgttttgttcagttcttgtgtgtttgtgtccaccgagtaaatacaagtgtttatgttagtgctagtgattagtacttaaacattcagagaggagagattctaacaattggtatcagagccaatttatgcccaagatcctgcgcttcaacaagatggccatcgtcgagcactccgcatcgcgatcgatgagggagggcatcgtgtcgctcccatatccagtgctcacctccaccaactactccacctgggcgatcaagatggaggctaacatggaggcgcaaggcatctgggatgccatcgagcccgcggccgatgaggccgtggacattaagaaggacaagcaggcacgtgcgtgtctcttcggggccgtccccgaagacgtgttgcagcagatcgcgaagaagaagactgccaaggaggtctgggaaagcctcaagacgaggttccttggcgttgagcgtgtgaagaaggcgcgagtgcaaaccttgaagagcgatttcaaggcattgcacatgaaggacaccgagtcaatcgacgagtttgccggcaaaatcagtggcctggcaaacaagttgagcgatcttggtgtaaccatggacgatgatgagcaagtcaagaaactactcgattctgtgccagataagtttctgcatgtcatcgctgcaattgagcagttctctgacttggacagcatgccatttgatgaggcaattggtcgcctcaaggcatacgagggaaggatacgcaagcgtgatgacaagaatggcgagcatctacttttcacgtccggcgacacaagcggtggccgcagccgcgtcaagaagccggacaggtccaagacaatgtgctactactgtcaagaacttggacactttgcgtatgagtgccctgagaaaaagaagaagaaggagatagcgctccttgccgcagcgtcaagtgatgaggagccaactcttctctgaatgaagcatgccaagattaggggggtaaatgttagcaataatcttgtctttagagtgtatgcatttggtttgtataggttttgcacaaggtagtagtgtgtggcagcaaaggatccgagccagtacgtgtgaaacgtgcttgctgtgagctgtgcgatgcggccggacgaacgtgccgatatctacgatgtgtaaaggctgttgcattagcatgtagaactagtgattagcggctgcatgcaagcatttagttggatgtgttaagatgcatgcagagctgcagctcaagctggaaggccacgaagtgattttgtggcggaagaataggtctagctagttaccttgttgcatggcatctgcatgttggagtaaggcgtgagtcaaggccaaattagttggctgatccttatcttttgcatgtacttaagtctatgtaatgaagaaaatggtgtgagttgtgattagccacatcaaccc

SEQ ID NO: 22619 - DNA, 1294 bp, Oryza sativa
  ref <308>: DATABASE ACCESSION NUMBER: AK072788
  ref <309>: DATABASE ENTRY DATE: 2001-12-06
ggccgccggagacggacgagatgccgccggagatggacgagatgccgctgagcgacgacgtgctccgcgagatcctcctccgcgtcccgccgctgccgacccagctcatccgcgccggcgcagtctgcaggcggtggcgccgcatcgccgccgagccggggttcctccgccgctaccgcgcccaccacggcgagccgccgctgctcggcttcttcgtcaacccgcgcggccgggagcccctcttccgcgccaccctcgacgcccccgaccgcgtcccgcccgagcgcttctccatccgcctccacgacgacaccgagctcggcggcaactggtactaccacggctgccgccatggccgcctcctcctcctcaactggaagagcggcctcggctgccgccagatcctcatctgggaccccgtctccggcgacctcatccacctctcccccccgccgcagctcgatgccctaaagggggtcttcttccaggccacggtgatctgcgccgccaccaccgccgccggtgaccacgtccacggcgacaactgcaagtccaaccccttcaaggtggtcctcgtcggcaccgacaggtccaccgccttcgccttcgtctactcgtcggagaccggagattggggagaccatgctgccgaaaccccagtggggaattgcatctcgcttgggtgcagatgcatccagattggggatttcctctactggatgctcttcggctacgacaacaacatcctcgagttcaatttggtgaaccacagcctctccgtggtgtatgtgccgacgcatatccatgaagatcatgatggcctctacccgattactctccaagaggggacagagcttgggctcattgtcatgtcaagatcctgcatgcagatatggcagtggatgatcgatttcgacggcctccccgggtggctgccgctcgaaccgatctacctcgacaatcttcttcatctgagcgcgggggagtgtgtcaatccgaccaaggtgctggggttttcgcaggattacaatgagctgttcgtcgcgtcgtccaccaggatcttcatggtcaatcttgagtcattgcggttcaaggagctttgcaaaatggacgagttcttggactcccccgactcccgtcctatatatgccgtgtatccgatcgcaagtttctatgatgcagatagttcatcgtcttctgcataagccagtggtagaacaatctactttagctcatgtattccagagtgtgtaacttatgttgctatggtatcaaagttacgatcttttgagtg

SEQ ID NO: 22620 - DNA, 2547 bp, Oryza sativa
  ref <308>: DATABASE ACCESSION NUMBER: AK072789
  ref <309>: DATABASE ENTRY DATE: 2001-12-06
ggtgctccctctctggactcgccccatttcctctcgccgccggcgcgtcggcgccgcgcctccggctgaggagaatgctgccccccgcgcccacccgaaacccgggagcctgcaggttcatacccctcctcccaccaaaaccgcttctctctcccgccgccgccgccgcctcctcccgcggtggcctctgcgtcgccgccgcatcccgccgcgatttcctcctcctagtcccctccatcgccgcggcctccaccgtgctccagtccctcccgctatccgcctccgccgcggacgatgagaagcaggccgcgtcgcccgcgccgggccctgcagcggctccggctccaacctccgcgggagagcccgaggcggaggcgctgtcgagggtgtacgacgcgacggtcatcggggagccgcaggccgtggggaaggacgcgcggcggagggtgtgggagaagctgatggccgcgcgggtggtgtacctcggcgaggccgagctcgtgcccgaccgcgacgacagggtgctcgagctcgaggtcgtgaggaagctggcggcacggtgcgccgaggccggaaggagcatctcgcttgcgctcgaagccttcccgtgcaacctccaggagcagctcaaccagttcatggacaggagaattgatggcaacaacttaaggttgtacacttctcactgggcaccagagcgctggcaggagtatgaaccccttttgaactactgtcgtgataatggagtcaaacttgttgcctgtggaactccacttgaggtgtcaagaactgtccaagcagaaggaattagaggcctttcaaaagcacaaagaaagctgtacgctcctccagctggctcaggcttcatttctggttttacatccatctcaggccgatcattgatagacaagatttcagcaattcatggctctccatttggcccaagctcgtacctatctgcacaggcaagagtagttgatgactataccatgtcccaaaaaataatgaaagaaattactaatggatatccttcagggatgcttgttgttgtaactggttcaagccatgttatatatggttcacgtggaattggagtccctgctagaatatctaaaaagatgcaaaagaagaaacaagttgtagtacttcttaatcctgagaggcaaggtattaggagagaaggtgaaatccctgtagctgatttcttgtggtactctgctgccaagccatgcagtcgaaattgctttgaccgtgctgaaattgctagagttatgaatgcggctggtaggaggcgagaagcattaccccaggatcttcagaaaggaatagatcttggcgtggtttctcctgagatactgcaaaacttttttgaccttgagaaatatcctgttatggctgaactgattcaccgattccaaggtttccgtgaaaggttattagctgatcccaaattcctgcatagattagctattgaagagggtatatcaattaccaccactctcatagctcagtatgagaaacggaaaggaaggtttcttgaagagatcgactatgtccttactgatacgattagaggttctgttgttgacttctttacagtgtggcttcctgctcctaccatttcactcttatctttaggtgataatggttctggtgagagtttggagcttctcaaaggacttttagggtcacttccagataatgcatttcaaaagggtattatggggcagagctggaacacaaaccagaggtttgcctcagtgctgatgggtggaattaaacttgctggtgtgggattcatttctagtattggagctggagttgcttcagatgttctgtatgctgctcgtcgagttttgagaccttctacaagtgttgaaacagcgcgcagaagaacccccatatggaaatcggcgactgtttatagttgcttccttggaacatcagcaaatctacgatatcaggtcattgctggtctggtggagcatcgcctaggagaatatctgatggcttactataaccagccgcttcttgctaacttgttgtcctttgtttcacggacaattaattcatactggggaacacagcaatggattgatcttgcacgggctacaggcctgcaaactagtaagaaagagctgccatctccagagatttcaaacctacctgacatgccactgttagaatgtggcacaacagaagtacaaaatatggatgagcaacaagcaacagccaatgaagtaaccgtacatagccaatgactccttggcctgtttgattgtggccattcaacacagggacaacttttgttttgatcacccgatactgtacaggtatatatacgggaaagacttcgtacggcagattgaagctcgtcgatatttttgtttcccaatctttatggccaggccaattttaacccttcgagagtatatatttgtacatcagtgaatgaaacaaatcaagttcgaaacacgtaaacaattacacgcaggagttccctctgaacacatcctatttactcattctgaatccaatgttttcttg

SEQ ID NO: 22621 - DNA, 3227 bp, Oryza sativa
  ref <308>: DATABASE ACCESSION NUMBER: AK072790
  ref <309>: DATABASE ENTRY DATE: 2001-12-06
ggccgtgctccaggtctctatccagtccagtccacctccgaagctttctttcgctcccactctgctgcgcgctctcgttccatctcgctctcgctttatcccccaaggggaggtggcggatctgcgggtgcgtgacctccatatgggatctcgatgagctggggggactgttcttgaagtggttcttgggagcatcttgttgcaggttcaaggaagtgtagtatcctgttgaaacttgacgattcaatttgaatcaagtgaaaagctctgcttgttggcgtatgttaaaccataaaaaaagatgccaacgaaaggacagtttagcagagaaaggaatgtaaaggccacattaggtcgtgatggacgtcaaaggggaaattcacaagatcaatctgtacaagtgccaaaagagaagattgcagtagtcggtgggaacattgatggaaaatttgaagatagaatcagagttgtgaaaaatgagaagtttcgaaggcaacgggaacctcggagtgcagatgcgggtggatccttgaaaggctcaaaaccatggcctggtcgaaaggccactacggttgatgagcttgtcaagcatatgtcaaatgttccttcatatttgcagcgtaaagagacatcaggccatcttcaggacaaggcattgaatgttggagttctcgagtggggcctcctagccaggtggtctcaccaacaaaagcatgagttttctagcagccatggtgcctctccatctaatactagtaggtccctgatattctcttctccatcccagtcatctgcaagtcccagcagcaaatctcttgaaagcaatcaatctcctacactcaatgaccatcagcattgttctatggagtttcagcaaagtgatcttgaggataaataccatgggaaggccagatattcacctagcccaaattctgcagtgttgaacttgttgcctgttcatggaaaacactttccagagaacactggcaaatacggtgacttgaatctcagaaacatatctccactctcggaccctcttcttactgccactgggagttccatgcgacatgaaatggttgatgatgaggagactacaaggaatatagaggaggccgtccatcattgttcgcgcaggctttttacagatgatgataacattggccaaagtttcttcacctcacataacaatgattctgcatgtggtgattttcagcagagcagtggcgtgactggtgaggtttttgagactctagtgtctagtgcggtgatggaaatggaaagaaatgccagtttgtcacctgttggtttctcaaaagatattgggcaacaccatgaatttcctcgaattccatactcatgtccacttcctatcatggattcatctgaagagcttggcaccagcagaactgggactcaaggtgattctgttggtgctgctgtaactataggtgaaaatcgcaaccaaaagcaaatttccaggggtgcctctgagagaactcctcggatcagtgcaaagttcagtgatatggatgcgtcaccacatagacatcttgtttctggactgaatcgagtgaaccgctgttcaagcctgaaggatggaccatgtcctcgacaacctgaagcaagcacctctgtggataagataaatggagataagtcatcaggcaacaaaggcagtagacgcagcccattgaggaggatgttagatccaatattaaagccacgtcagtcatccacttctggtccaattcaaccttcatttgttccaaagtgtcatctgcctggccatattgataagcaatctctgagcttgggaggatctgctttgcagaatgttcaacgtaggtcagttgattcagtggtaaattcaaattgccgaacagaaactaatacaaaccagcctcctcaggtcctgaacagtgaaaggtacctccagcaagatatagattcaacaacaacaaggcatgcgcttctgcagctagcgtggaagaatggcctgccttttttcatgctttcttgtggttctgatatcctggtggctaccgtgagaaggaagggcatctccgataacaatgatctggagagcacatacactctgtttggtgttgaagaacctaagaaaagaggtggggcttggatcaaggcaggtaataagaacaagaaagatcagcttgtttataatattgttggggaaatgagggtttcacatcgaaaatcaagatgctaccaggcagaaaaaaaccatttgcatagagaatttgttctggttggctcagagcagctaccatcttctgaagaatcaggtgattcacatgttagcagagagtttgcggcttttattagtgcggtgtctcagcaagaaccagaaacttctcgtcactcatcctcacagcattccagccgaagcatgtcaacaccaaccgactgttcttgcccattgggaaatttccatcctaatacgagggatgatagttgtgcatcatccagtgttcttgccgtacttcctaatggcttccatggtacatcaacctcaggacagccactacctctgattgagaggtggaaatcaggaggagcgtgtgactgtggtgggtgggatgaaggctgcatgctcagtgtcctcagcgatgacgcccgagaaaacaaaggtgataaatccactcaagcaaaccagacgacggatggaagtcaacggtttgacttgtttgttcagggtcgatcacgagaagacaagcatgctttcagtatggtttcattcagagaagggttatacacagttgaattcagatcatccattgctttacttcaggcttttgctatgtgtatagtgatgcttcacggcaggcgccctaccaggacgcaagcaggtgtgcacgcatcgcaagagcacgcatccctcgctgaccataagctcaacaagatcatggcagctagtcaaggtagagctcaggcaagctatgtgccacaccggccgccgctatctcctgtagggcgagcctagcttcctgtgataaaaatgtatgtttttctttgtttcttttcgttttcttctgtaactcgagttgcgtcgtggaatcttatgccatgatccatatgcgactcacatcgaaatgtgatgaatcttatggaatcggctttagcggggtagctaactgtacatgtaaaatgactaggtgtgttgctgcaaggctcatctcagtgcttagctaccctttttatatgcaagc

SEQ ID NO: 22622 - DNA, 1831 bp, Oryza sativa
  ref <308>: DATABASE ACCESSION NUMBER: AK072791
  ref <309>: DATABASE ENTRY DATE: 2001-12-06
gtccagccccccacctcccccactcactcggatcccaccaccatttcgaacggcagcgccctcccctctcctctctcctcgacacacaaccgccgccgccgccgccgccgctgcgtccggtttccccgcgtcgatcgatcgccgtcgccgtcgccggccgggagagcccgccccccctagatcgatccccaaggccgggctgggtcggggccccgagcgatggaggcgatcgaggagctctcggagctcgccgacgccacgcggcaggcctccgcgctgctcgccgacgacgacccgtcggagcagcccgcgcagcggcgcgggggttcctccttcctcaccgtcgtcgcgctcggcaacatcggagcggggaaatccgcggtgctcaatggattgatcggccaccccgttctccctaccggggagaatggtgcgacgagggccccaatatgcgtagatcttcagagagatgcatcactcagcagcaaatccatcatgctgcaaattgacagcaagtcgcagcaggtttctgccagttccctcaggcattcgctgcaggaccggttaaccaaggccggtagttttgggaaggggcgatcggaggagataaatgtgaaattatgcacgagcactgcccctccattaaaactaattgatttaccggggattgatcagcggagcatggatgaatcaatgattgggaactatgctgcacgcaatgatgcaattttgctagttatcgttccagctctacaagcacctgatgtagcatcttctcgagctctaaggattgccagagaactagattcagaaggtagtagaactattggtgtcgtaagtaaagttgatcaagtagccgaagaccagagagctcttcttgctgttcaggccctgcttgtaaaccaaggccctagaactgcagctgacattcagtggatagctacgattgggaactctgttcctattgcctctgttcagtctggagtaggttctgaatcctcaccagaaactatttggaaagttgaagttgaaagccttaaatctatacttcttggatctccgcaaagtaaacttggtagggaggctttagttgattcacttgctaagcagataagaacacggataaaagttagactcccaaatctcctgaatggtcttcaaggcaagtctcaaataatccaggaggaattagcaaaacttggagaacagatggtccaaagttcggaaggaactcgggtcattgctttaggactttgccgggaatttgaggacaaatttcttcaacatattactggtgttgagggtggaggttggaaagttgttgcaagctttgaggggaagttcccaaccaggatcaaacaactccctctggacaagcattttgatatgaaaaatgtgaaaaggattgttcttgaggctgatggttaccaaccatacctgatatcacctgaaaaaggtttaagatctcttataaaaggtcttctagaattagcaaaggaaccatcgatactccttgtggatgaggttcaccgtgtattgctagatatagtatcagccacagcaaatgccaccccaggacttggcagatatcctctatttaagcgtgaggtaattgcaattggatctgctgctttagatggctttaaagatgaggctaaaaagatggtaattgcactagtggatatggaacgagcattcgtgcctccccagcattttatccgcttgttgcagagaagaatggaaaggcaacgtcacgaagatgagctgaaaagtcgctcaacaaagaaggtttcagatgcagaacctagcaaagccacaagtccacaaaccc

SEQ ID NO: 22623 - DNA, 1164 bp, Oryza sativa
  ref <308>: DATABASE ACCESSION NUMBER: AK072792
  ref <309>: DATABASE ENTRY DATE: 2001-12-06
gatcatccaccagcaataacattatattgcagcaatggcatcctcctcccttctactcgcctgtgttgtggtggcggctatggtgtccgccgtctcctgcgggccacccaaggtgccaccgggccccaacatcacgacaagctacggcgacaagtggctggaagccaaggccacctggtatggtgcgcccaagggtgctggccccaaggacaacggcggcgcctgcgggtacaaggatgtcgacaaggctcccttcctcggcatgaactcctgcggcaacgaccccatcttcaaggacggcaagggctgcggctcatgcttcgagatcaagtgctccaagccggaggcctgctccgacaagcccgcccttatccacgtcaccgacatgaacgacgagcccatcgctgcctaccactttgacctctccggccttgccttcggcgccatggctaaggatggcaaggacgaagagctccgtaaggccggcatcatcgacacgcagttccgccgcgtcaagtgcaagtatcctgccgacaccaagatcaccttccacatcgagaaggcctccaaccccaactaccttgcgctgctagtcaagtacgtcgctggtgatggtgacgtcgtggaggtggaaatcaaggagaagggctccgaggagtggaaggcgctcaaggagtcatggggtgccatttggaggatagacacccccaagccgctcaagggccccttctccgtccgcgtcaccaccgagggtggcgagaagatcatcgccgaggacgccatccctgatggctggaaggccgacagcgtgtacaagtccaacgtccaggccaagtgagcattttaagcaaggaagaaaccagcgtacgtacgatccggcgcggctgcctatatatatatatatatatatatatatatatatatattatatactatatatgtgttgctgcatgcttgcatgcatgcacatatatatccagagaaatattttttaaacgaaataatctataaatttctgagctaggattgtggagcatatacacgccagcactataatggcgtctgctctcccatcgaactggccctgtgacaatggggtcatttgtttttgcccacaatattttctgctaaattcattctctgattttgcgtgagattatcatg

SEQ ID NO: 22624 - DNA, 1026 bp, Oryza sativa
  ref <308>: DATABASE ACCESSION NUMBER: AK072793
  ref <309>: DATABASE ENTRY DATE: 2001-12-06
gtggtgaaaaaaaaaaaaaaaaaccttacaaccgcgacggccgccgacgcaggcagacggccgccatggccatgctactccggcgacccctccgggccctcaccctcccgctcctccgcccccacctctccaccgccgccgcggcggaggtgtcccccgcggatcaccacccggacctcctgtcgccgccgttcggctacctcccgggccacccgcggccggacgcgaagcacgacgagctgatcctcgccgtgccgcgggcctccccgggacgccacgtggcggccaaggagcggaaggccgggcgggtgccggccatcgtgttcgagcaggagaacggccaggaggggggcaacaagcgcctcgtctccgtccagtcgaagcagatccgcaagctcgtcgaccacctcggccggtccttcttcctctcccgcctcttccgcctccaggtctggtccgagcacgccgggcagggggtgctcatcgagagcgtccgcgtcctgccgcgtaaggtacacttacatgcaggcactgatgagcctctgaatgtgacattcatgagagccccttcgtcggcactgctcaaaattgatgttcctttgatgttcattggggacgatgcgtcacctggtcttaggaaaggagcctacttcaataccataaaacgaactgtgaagtatctctgccctgctgacatagtgccaccctacattgaggtggatttaagcgagttggacgtgggccaaaaactgttgatgcgtgatctaaaagtccatccagctctgaagttacttcagtcaccagaacaacccatctgtagtattatagggtcaagagcacctgaacagaagaagtcaaaataactttgttcgatgtattaactgttttcacataataagatcctcgttttacattcatgcttgggttatttgagtctttattgtcctccaagagtgaatactaggatgatttgtagcctagagaccactattttgcctgaggaatgaattggaagccagatgctgc

SEQ ID NO: 22625 - DNA, 1102 bp, Oryza sativa
  ref <308>: DATABASE ACCESSION NUMBER: AK072794
  ref <309>: DATABASE ENTRY DATE: 2001-12-06
gagggccttacccagttaccctcgccatttttgtgcgtatccctcctcgtcagtttgcccttgtccaccgcctccgcctccgcctccgccgatccccatccatcccgcgagcgagcagggacgccgtcgttagtcctgctgcttccgccgcatccatcctggtgagcacatcctccgcaccgccgcctgcgccgatccccatccatcgtgtgtaattgttcctaagaagaaggaaatcgtcgttcagtgcagtgcggtgcctcgaggatatttccctgttccctcggtgttgactcctcgtgaattcgcccgccgcctgtgccgccgccgatcaccatccatcccacgggcaagcaggggcgccgtcaccgcatcctgaagggaagaggaagatggatcagcaccacgtgcagcagcagcagtatgttgacccttatcggacaatggtgctgtcaccacagcctgaccacctcaatgccctccagtacaatcaccagcagcagccacagccaccaccgcaagcaactccaccacaaccacaacatcaccatgcctcactcgcctcccacttccatctcctccatttgacgacaagattagctgatgctattggaaagggcacaagggatcaaaattctgatgcactggttgaagatttgaccagtcaatttgctaggtgtcaacaactattaaactccatatcgggaacactaagctcgaaatctataacagttgaaggacaaaggaaaagtttggaagaaacgcagcagctccttgatcagaggaaggatttgatcacaaagtacagaagctccgttgaagacctgctcaagggggatacaagaagatagtaacatggtgactgtatggtagagttggaatgttaaagaggagctcgttgctacatgtgatcgttttctaatcagcatcggctacttttgtaatcgaggtagccttgaagttggtctggcttaggaacatactttcagtttgtgctatctcatattgttggtgggtaatgggttcatgggtttctgagacgagcatgctgcccagcttatattgaaggtttactgaggaccagtcattttgtttaatgggc

SEQ ID NO: 22626 - DNA, 1173 bp, Oryza sativa
  ref <308>: DATABASE ACCESSION NUMBER: AK072795
  ref <309>: DATABASE ENTRY DATE: 2001-12-06
gatcctctccctctccaatctccctcttcctctcctcagatcggggcgccggctgagaccgagcggcggctgctcgttgcgatcggggcaggaccccgcttctcccgtccaatccggcggtggctcggtgacgagagtaggggcggcgagagctcggctcctccctcgcctcttctcccctccaatcccggtggcagcggcggcggcggctccgcgacaaggaagggcggcgggagcttggttcctccctcccctcttctccccttcaatcccggcggcggctcggcgacaagtgcgggacaagggcggcggctcggcaatggcggctcagcggcgacgacgacgacagcgacatgggaggggcgttggcgactttgacgacgaccgtgacgacggagggcctcgtcgacatcgacggcgcgcggtggacggcgacgagctgatccggcaccacctcctccatccaccgcgccacctccatctccgcccccagccacctcgtcgcccttccccgcctcgctcccccagccagggaagggacggtggcgcgcggatctgccgcctcccggcctcgggagcgacggcggcgcatgaatccagcggcctccgtcctcgggagcgccctggcgtgagcgggagtgccggcagcacgcagattcgcaacgacggtgacggtggctgcaacgacgacgacagcggcgatggtagctgcgacgacgacgacggcgatgacagcggctgtgatgaaaacgacaacgctgtgatgcaagtagcggcggtgctctcttcctctgtcctccgccatcagcagcaccagtataccctgatcataagagccgtagtactatggctgatcctgcacttgctagtgatccagagttacacgggctgtcttatatctatgagaggaatggtcgtcattattgtttaaccatggcaactcctactgtagtacctaatcctccagccaaattttcagaaagtgcttagaccttgtattagggatcttcgaaaaattgtaattctcttttaagggcacacagtagtatctcgatataaactctctggtagtccaattttgtaacaccatgtcttgtacttagtctagaatggctaccatctatctttatgtatgactaccatatatatcaatgagaaaccatgtgatccacc

SEQ ID NO: 22627 - DNA, 1552 bp, Oryza sativa
  ref <308>: DATABASE ACCESSION NUMBER: AK072796
  ref <309>: DATABASE ENTRY DATE: 2001-12-06
gatcttcccaccttggcgtaaaagaaaagaaaatctgcagtctgtgtcgtctcctccggtccttgcgcgcaagaccgagtcgcggctgccgatctccatctgccgatcgagcagagcatagcaggggatcctggaaatggctgacggtgaggacatccagcctcttgtctgtgacaatggcactggaatggtcaaggctggtttcgctggggatgatgcaccaagggccgtgttccctagtattgttggccgtcctcgccacaccggtgttatggtaggaatggggcagaaggatgcctatgttggtgatgaggcacagtccaagagaggtatcctcacgctcaagtaccccatcgagcacggtgtcgtgagcaactgggatgacatggagaaaatctggcatcacactttctacaatgagcttcgtgtggcgcccgaggagcaccctgtgttgctcactgaagctcctctgaaccctaaagccaacagagagaagatgacccagattatgtttgagactttcaatgtccctgcaatgtacgtcgctatccaggccgtgctttccctctatgccagtggccgtactactggtattgttcttgattctggtgatggtgtcagccacacagtgcccatttatgaaggatatgcgcttcctcatgccattctccgtttggatctggctggtcgtgacctcacagactcccttatgaagattctgactgagaggggttactccttcacaacctccgctgagcgggaaattgtaagggacatcaaggagaaacttgcgtatgttgcccttgattatgagcaagagttggaaaccgccaagaacagctcctcagttgaaaagagttatgagctacctgatggtcaagtaatcacaattggtgcagagaggttcaggtgccccgaggtcctcttccagccatccatgatcggtatggaggctgctggtattcacgagaccacctacaactccatcatgaagtgcgacgtggatatcaggaaggacctttatggcaacattgtgctcagtggtggtacaaccatgttcccaggcattgctgatcgtatgagcaaggagatcactgcccttgccccgagcagcatgaagattaaggtcgttgctccacctgagcgcaagtacagcgtctggatcggagggtcgatcctagcctcactcagcactttccaacagatgtggatatcaaaggacgagtacgacgaatctggcccagcaattgtccacaggaaatgcttctgattttctcaagtgctctgctcttgtcatctgtagtatcgagttatgtttgattcgtttttctagcgatgtattggagatttgcaggctatgtttgttttctttttggagacgacttctctatgtgttcgatcagtgtaagaatgtcctatgtttgtgtcatctcagattgtttgtttgagttcacttgtcaaacttggttcgtttgattggtcagaactgtctgtatgagcttattgttctatacattgctccaagggtataattatgttaaattttggatct

SEQ ID NO: 22628 - DNA, 1644 bp, Oryza sativa
  ref <308>: DATABASE ACCESSION NUMBER: AK072797
  ref <309>: DATABASE ENTRY DATE: 2001-12-06
ggtggttggcaaatcaatcgaatcgatcccctctcatccgctcgcggacacagaatctctcctctccctctcggcgcccaggttctcgccgccgcccgccccttccttctcttctcctcctacgtacgtaaataatccacctacgatagatacgaccaaccccattatgagctctctatgcccctttgccaaactcgcctccgctggcgccacatgccccgtaaaatcatcatcagacaacaaaaccaccatcaatcacaccgacgacgacgacgacgacaatgaaaaaactggcaatgctaacaccgatcctcgtgtggtgccaccaaagtgcccctttggctatgactccaacaccttcaagcttggcccactcagctgcatggtctgccacgctctgctacatcaaagcagcaaatgcaccccgtgctcccacaagttctgcaaggcatgcatattgcgctttaaggactgtccattgtgtggtgctgacatccaagggatcgagcccgatgatgagcttcaaggccttgtcgaccgcttcattgatggccatgcccgaatcaagagatcacatgctgcaggcgatggggaagccgcaagtgacaacaagaccaaggtcatttacgaggatgtctccatggagagaggggcttttctggtccagcaagcgatgagggcctttcgcgcacagaacattgaaagtgcaaagtcaaggctcagtatgtgtgcacaagacatcagggaagaattgaaatctaaacaagacaaccaagaactgtgttctcaacttggagctgtgttaggaatgcttggggactgctgtcggaccttgggagatgctccttcagcaatcacttactatgaagaaagtgctgaattcctctcgaaattgcccaaaaaagatctggagttggtccatactctctcagtttcactaaataaaattggagatcttcgctattatgatggggacctccactcagcaagaagctattatgcgcgttcgttggatgttctcagaagtgcagcaaaagaacactcagctgtggcttcccaggtcattgatgtagcaacttctcttgccaaagttgcggatgtcgatagaaatcttgggaacgaaagcatggcagttgagggttttgaggaagcaattaaatgccttgagaatttgaagctggaatctggagaggccagtcttgagcagcggcgtctctcggttctcgactttctacaaaaacaattggatgacaagtgatatgcacggttctaatttgaagagcacactcacaggatatatgcactatccataatgaggatcagctccagtacgtagtctctgtgatgcatatggaagggagttgctccagatcgaatgaatggtaactggtgtgtatttgaggtttgctgcgacacagaataaatactttcgagttgtatatgtttcttgtgtctgccacgggtggagacctctttgagtccctgaggcaccacggagacgaaacttctcggaagtactgattccttgttgcctctgccgtgttatgtgaatgttatcccactgtatatttattgatgatataatataagaaaagaacagcacagatgttttgtatcgccctatcaaatttaagttgttttgcg

SEQ ID NO: 22629 - DNA, 1387 bp, Oryza sativa
  ref <308>: DATABASE ACCESSION NUMBER: AK072798
  ref <309>: DATABASE ENTRY DATE: 2001-12-06
tgctgctggtgtggggctgtcatactccaagaatacttcggattataacaccggggacctcaagactgccgcggattcgcatacttttcttctgaagtggtttcagctgtaccctgagttcctgagcaatccattttacatagctggggagtcgtatgctggggtttatgttcctactctttcgcatgaagttgtcaaaggattacatgatggagtgaagcctacaataaacttcaagggctacatggtcggaaatggtgtttgcgacactgtttttgatggtaatgctcttgtgccatttgctcatggaatggctctaatttcagacgatatataccaggaagctcagactgcatgccacggaaactactggaatactaccactgataaatgtgaaaatgcactctacaaagtcgatacgtcaattaatgacctaaatatttatgacattcttgagccatgctaccacagcaaaactatcaagaaagtgaccccagcaaataccaaattgcccaaaagtttccaacatcttggtacaactaccaagccccttgctgtaagaacaagaatgcatgggcgtgcttggcctctgagagctcctgtgagagcggggcgtgtgccatcctggcaggagtttgccagaggatctcgccccagtggagttccttgtatgagtgatgaagttgcaacagcatggctgaacaacgatgacgtcagagcagcaattcatgcccaaccagtaagctcaattggctcgtggcttatatgcaccaacgtgttggatttcatccatgatgctggaagtatgatcagttatcacaagaacctcacaggccagggttatcgtgctttcatatacagtggtgatcatgatatgtgtgtaccttataccgggactgaagcatggaccagatctttgggctacggagttattgattcatggagaccgtggcacctgaatggccaagtttctgggtacacccaaggatatgaacatggcctcacctttgctaccattaagggtgctgggcacactgttcctgaatacaaaccacaagaatcattggctttctatagccgctggcttgctggttctaaattgtaaatgcttgtgaatccgacatccaataatgggaagcatacatatccatacagccatgaatcagataaaggttgatacaaagataatataaaaaaactacaaaccaatttagaaagccacatttatttcagaatagttggtgccaacaccatgttgtatgttcttttatgcaaacagtagatcattcatcattatttgtggaagcttactgtgctgtaacatcaaaatgtcaatccttttttctgatattttgtattctcaatttctgattgtcaatccaaagcc

SEQ ID NO: 22630 - DNA, 2037 bp, Oryza sativa
  ref <308>: DATABASE ACCESSION NUMBER: AK072799
  ref <309>: DATABASE ENTRY DATE: 2001-12-06
gactcctcactcctcactgtcccgcctccaccgtcccctcccctaccggtcgccgctgcctccctagcccgccgccggcaaagctaatcctatactcgtatccacgttgcttcttcgagagagaggatcgaaaaactcgtaagcatggtgcagctcgaggagctaatctcctgcctcccgccgccgccggcgaccaccatcacccaccgcaagatgctcgcccgcaggaaaaccatggagatggccgtcgtctccgaccccgcccccgccgccgtcaccaacctcaattatgccggtgccacacgctcgtctccagtcgctgcaaatatccgtggtaccccggtgatgagggacgttctcagtcatctcccggtaaagatggtgcgggagttaggtcccttattcgccagcgaattttggctatccaccgttatggaaattgacgacgaacagctgctcccccagaatggcgagcaagtggatctcattgagagggttgggtcagtcctttccacacaagatgggcctttccctacggtgaggctcaccaacttgtgctttcagccatttggggtgcaggaattacattgcatagacgatgatgagtctgcatttattattctgatgtcttggtttaatctctttaactcgaagaaggtgaccaagttcatctttctcaatagagctcagccaacggctaaacttttatttgtgccagaagacattcttaagtggtggaggctcgagaccctgtatttatgtcaaatcaggttcaaggacccctctggaaccattgatttccatttgccgaatctcgcggaattggggattgtcaattgtgagttccaccatgatacactgatgaagatggttgcacagtgcccaaagctcgaaaggttatctctggcttttctcgagttttctaccaagattcactttgagtctaatagcctcaagaggatggtgctctggaattattctgcaagagacagtgttagaattgtggccccaaaactatgcagactcatattgcataatgttggcacttctgagcctcagccccatgatgagcaccctgatcctggcgaccatcgaaccatggtgttatctatgaactcagaaatcgatatggatcttgaagttttaggttacattgacctgaactcccatgtgccactattgagtgaagggcaatcttgcaagtctgttaggactttgggagttcaacttgggtttgggcatgataatgagtttcacaccatgcggcgtctattgaaatactttccatctgtggagaacctatacatacagagtactaaactggacaatgtcactatagatctaacagaagatcgcattattgacttgtttgagccagtagaagatcgtaagatcatgatggttgtatatgaggcttttaaaggttctgaccatgagttatgcttagcatccgtgttattgcagaggctcccttccctgcaaaaaatgacgatattctatgaccgtgagatcagtgatttagtaatcaacaagtcacactcttccttacaagcagccatgctcggtgccacagttgagttgaacttttgtgcatgccctgagtcttcatggactctacaagaagccctaaacgccgatcacttagcatctaaaccatgaggatatgtcaaaagctgtctacatttggagcttgaaagtgcaattggataagcattttggacactgggaagaggatgctggacttgttgacgaacttcagaaaaggaacaacacaatatgttatttgtgccaagctaactgatctgttgtttcaatatctaaaaaaactgatctgttgttttaatgcctactaagaccatattattgttttttttacagttagtcccatcacctgtcatgatgacttgacagttactttttgaacaaaatttagaccgctcctgtacttttctcattttctagttgggagataatgtgccatgatccatacttgtggtttggtttgtcaagaattctcttgtcaaatgcctaggaggt

SEQ ID NO: 22631 - DNA, 3507 bp, Oryza sativa
  ref <308>: DATABASE ACCESSION NUMBER: AK072800
  ref <309>: DATABASE ENTRY DATE: 2001-12-06
ggagtccgtccaggtccaggtccagtgtagtcgtagccatggcgggtttggctccccctcccctcctcctcctccccctctcctcctcactctctcctgccgccgcctcccaccacccaacctcccccccttctcgcacacgccgacgacgccgcctgctatccgccgtggcgtctgccgacggtgatgctccctccccagtctctgtctccgcctccgccgccaccaaggggccttcctcctcctccgtgctcaccttccagcaggccatccagcgcctccaggactactgggcctcagtggggtgtgccgtcatgcagtgcagcaatacagaggttggagcagggaccatgaatcccttgacattcctcagggttttaggccccgagccatggaacgttgcttatgtggagccaagtataagacccgacgacagccgctatggggacaatcctaataggcttcagcgtcatactcaatttcaggtaattttgaagcctgaccctggaaattcacaagacctctttctgcacagcctttcagcactaggtatcaatgtccgtgaacatgacatccgttttgttgaagacaactgggagagtccagttcttggtgcgtggggattaggctgggaggtttggatggatggcatggaaataacacagttcacatattttcagcagtcaggaagccttccattgctgcctgtttctgttgagataacatatggacttgaacgcatcctcatgtctcttcagggtgtagatcatttcaagaatatacaatacactaaaggaattacatatggagaactattccttgagaatgagaaagagatgagtgcatattatttggagcatgcaaatgttgataacattcaaaagcattttgatgattttgaagaagaggctcgctctttattatcactttggcttcctattcctgcgtacgatcatgttctgaaggcctctcatgcttttaatattttagattctagaggctttgttggtgtaaccgagcgtgcaagatattttggtcgcatgcggagtcttgctcgccagtgtgctcagctttgggtgaaaacaagagagaacctcggttatcctttgggcacttatcaagagtctaatcttatctatcctcatgtctctgaaaagcctagtagaaagggagttgtcggacagccacgagcatttgttcttgaaataggaacagaagagttgccacctcatgatgtgatagaagcaaccaaacagctggagaaatctttaattcaaatattggagaaacgaagactgagccatgggaaagtacgctcttatgggacaccaaggagattagcggttgttgttgaaaatcttaatatgaagcaaatggaggaagagattgaactacgtggtccacctgttgcaaaggcatttgaccaagaaggaagacccactaaggctgctgaaggattttgtcgaaagaataatgtcctgatagatagtctatatagaagaactgatggtaaaacagaatatatctacgctcgggtcaaagagtctgcacgttttgctgatgaggtactaactgaagatctaccgactattatatctggtatttcatttcccaagtctatgcgctggaactccaatattgtgtttagcaggccaatacgctggatctttgcccttcatggggatctcattgtgccattttgctttgctggcatatcaagtgggaatcagtcgtgtggccttcgtaactcctccttggctaactttaaggtggaagctgcagaattatatttacacaccctggagaaagctgggatcctgattgatatgcaggagcgcaaacaacgaatcttgcatgactctagtatattggctgagggtgttggcggtgatatcattgcacctgatagcttggtgcaggaggttatcaatcttgtggaggcgccgatgcccattattggtcgatacgatgtttccttcttagcacttccaaaggatgtattaataacggttatgcagaaacaccagaaatatttccctgtaacctccaagaccatgggcaatctgctaccatgtttcataactgttgccaatggtgccattaaggaagaagtagtccgcaaagggaatgaagctgtactcagggcacggtatgaggatgctaaattcttttataagatggatacgcagaagaaactttctgaattccgagatcagctcagcagcattctctttcatgaaagacttggtaccatgcttgacaaaatgaaacgtgttgagaacactgttgcagaagtggccctccttctcggaattaatgagaaaatgatcccagcaatcaaagatgcagctgcattggctatgtcagatcttgccactaatattgttactgaatttacttcacttgctggaattatggcacggcattatgctttgagagatggcctttcagaacagattgcagaagccctatttgagataacacttccaaggttctctggtgatgtgttcccaaaaacagatcctggcatagtccttgcagtcactgacagattggatagtctagtgggtctgtttggagctggatgccaaccaagttctacaaatgatccatctgggctaaggagaatttcctatggattggttcaaatattggttgagaacaagaagaactttgacctcacgaaggccttgaccttagtggcagaggagcagccaataacaatagatagtggtgttatagatgaggtagtacaatttgtcacgcggagattggagcaacttttggtggatgaaggaattaattgcgagatagtccgttcagtgcttatagagcgtgcaaactgcccttatctagcatcacaaacagcaattgaaatggaagcattttcaagaactgaagatttcccaaaaattgtcgaagcgtactcaaggcccgcgagaataatacgtggaaaagaaattgggtctgctttagaggttgatgcaagtgtatttgagaaagacgaagaaagagctttgtggagtgcctacttggaggttgcggataagattcatcctggtgttgacataaaagcctttgcggacgcttctctggaactgctgcaacccctagaagatttctttacaaatgtttttgtcatggcggaagacgagagagttcgtaacaatcggcttgcactgctaacgaaggttgcgagtctgccaaagggaattgccgacctgtcagttttaccagggttttagccattttttgttgctcttctagttttatctgtaccatgcttgtacattcataccgactacagttttgcagccaagaaaagagcgtgatccctatatatataatgtataggtagctagcataaattgtcctcaactttgttgtccattgctatgttaaacatatgtttttgttttcaaaccattttggaaatcaaatgccataacttgtatcagactatataccaactcaagcggtatcttgcataaattccattctattccc

SEQ ID NO: 22632 - DNA, 772 bp, Oryza sativa
  ref <308>: DATABASE ACCESSION NUMBER: AK072801
  ref <309>: DATABASE ENTRY DATE: 2001-12-06
ttggctccggcggctgaccatcatctcgatcccgttcgtgttcatcgccatcccgtcgatcgtgatcatcgtcgggatgctgtcgccgcacgcggcggagccccgcgaccagtcgtcgccggcggcgccggggcggaaccactcggtgtccatgctgagcaccatgaccggcggccagatgatcctcagctgccgcaccgccttctccggcaactgggagtacttccactacttcatcctcgacccctacaagccccagcgcgccttcttccagccaccgccgccgccgccgaactccgccgccgccgtgccgtacgccatcctctgcaagtgggggtacatgggcaacttcctccaggacgtcgtcgtcttcaacagcagcgccgcctacgcgctgcggtgccgcgtcgaggaaggcgggtgccactacctgttcgaggacgggaagatgttcctcgtcaccgggcggcgcgccaccagggcggcgccggcgcggcggagggagaagaggctcgtcggcgacgtggtgctcagggagtgcgcccacgtgctcggcgtgttccccaccgtgtgcaggtacaagccccatgaacacaactacgtcggcaagatcatcggacgctggcgatggtggttcaactactaattaactgttattatgatgatgattattgatagcattgttaattagatgattaattactactagattaactagctattgttttactagcctattatagccggttaatttaactgttgattttctggc

SEQ ID NO: 22633 - DNA, 889 bp, Oryza sativa
  ref <308>: DATABASE ACCESSION NUMBER: AK072802
  ref <309>: DATABASE ENTRY DATE: 2001-12-06
ggcattgcatctcaacagagcaacacaaactcacacattgccaattccctttcttggtttgattctggctgctgcaatggcttcgtcgctggccctggtagctctgctcctcgtgagctgcgccgtggtggcggcggcggcgaccaagtacaccgtcggcgacacgtccggctgggcgatgggggcggattacaccacctgggccagcgacaagaaattcaaaatgggcgataccctcgtgttcaactacgccggtggggcgcactcggtggatgaggtgagcgcagcggactacgctgcgtgcaccgctagcaacgcgctccagagcgacagcagcggcacgaccaccgtcaccctcaagaccgccggcaagcactacttcatctgcggcatcgccggccactgcagcaacggcatgaagctcgtcgtggacgttgccgcggcctctccagccccagccccaaaagccccgtccaccacaccgacgactccatctacgacaccagcgacaccggcgtcccctggcacaagctccggtctgacgcccacaaccccagcaacggtgctcgcgccgcccgccaagcagtccgccggtgcagctgggctcagggccaggtcatgggctatgctgggcctggcaggacttgccgccgtgcaactgggcctcttctagggccaaggccagggtggaggcagtgctgttaggttgcatgtcatttagacatcgacacacaccgtgtcaagtgtttgttcaggaagtgagttgaggtttcttttcacagagggaactggtgcttttgttgtggtgagctggcagtagttggatgctgtgtttgaattgacttcctgttaatttgttgtcctatctatgtcatggatttttagcccc

SEQ ID NO: 22634 - DNA, 988 bp, Oryza sativa
  ref <308>: DATABASE ACCESSION NUMBER: AK072803
  ref <309>: DATABASE ENTRY DATE: 2001-12-06
ttgaagttcgaggagagaaaaccaaaccctagctaggctaaggcggagtggagaacccccgccgttgccggcggcggaggcagcggcggcggcgcgcggagaacactccgtcgcggtcgattccgtatcaacaatgtcagatcctggaagggatagcaacatgcagcagctcatcccgatagcacctccaccaaaggcttcttctggtaccactggcaaggagctcgtggtcgtggatggtacgggaaaggcttcaggaggagtcaagctacgggaagacgaggaggacctggaggtgaagctcaggcgcatcatggagaacgtccctgtccgtgtcagcaacacctccggatcctctgctggttctggctctggtgatttccaccagtatcggcaaatgaggaggagagaacaggaccgtcttgcaaggatggatgctgattaccagaagaggaaacagatggctgagtttgaattgaggagggaggaaaggctaaaagaagcagaggagcggacagcaaagaagcgcctgaaacgccaaaagaagaagcagcggaagaaagagaagaaacgatctaaaactaataatggtggcgagcaacctaacggaggggagtcgtctggtggtgatgaggattcagacgatgaagataagccataggcaagtggcacacatcaatcggatttgaagttgctattagactactgttgaaccatttcttggagattacttctgaagtagagctttgagcatgaactaatattggcaggctgcaggcccccttgtagttttttcttggaaacactcttaagatgagatgtggcttgttttccttgctctgataaagtgactatggagtatggatggatagatgaatcattttctggttaccttgtttgtttcttctgaattatcatgtctggggctccctgtcccttacaatagcttactcgtgacatttaaatgaatgaaatttaactgtttagc

SEQ ID NO: 22635 - DNA, 1693 bp, Oryza sativa
  ref <308>: DATABASE ACCESSION NUMBER: AK072804
  ref <309>: DATABASE ENTRY DATE: 2001-12-06
gagctagagagaagcatgcagcgagaattaaggtaggaggagtagttgcttgcctccgtcctgatctccactgattcattgtgttatatatgcataagcataacgcaattaattaggaggccggtcagctcgatcatatcgcagggagtacgtagcaaattaatggcggccgtcgggctgttggtactagttggcctgcaggtggtggtcgggtcgatggcggcgcaagaagcaggtgatgccccggcgagcatcacggggccatgctcgcgtacaggagacaagaaggcgtgcgtggagttgttgtcgggcatcccggaggcccggaaggcgacgacggtgggccccctcgcggagctgtacctgcaggcaatcgccaaccacacgacggaggccaaggcgatggctaccaagctgctagccaccatgaaggggaagggctctggatcggggatctccagtactggatggatgagaactacatctccgcctgctttgcgcccaccggcgagctacaatctgtgaagctaattcgtgacaagcagactggacaacttcagggttatggctttattgaattcacatcccatgctggtgctgaaagagttcttcaaacatacaatggggcaatgatgccaaatgttgagcagacataccggttgaattgggcctctgctggtgaaaaacgtgatgatacccctgattacacaatttttgttggtgatttggctgctgatgttacagactacatattgcaagagacgttcagggtacattacccatctgtgaagggtgcaaaggttgtgacagataaaatgacaatgcgttcaaagggctatggcttcgtcaaatttggtgatccttccgagcaagcccgtgcaatgacagaaatgaatgggatggtttgttcttcaagacctatgcgtatcggcccagctgcaaataagaaagcaactggagttcaagagaaagtaccgagtgctcaaggagttcagtctgacagtgatcctagcaataccactatatttgttggtggccttgatcccagtgtcactgacgatatgttgaaacaagttttcactccctatggagatgtggtccatgttaagatcccagttggaaaaagatgtggttttgttcaatttgctaacagagcttctgcagatgaagctttggtacttctacaaggtaccttgattggaggacagaatgtgaggctttcatggggccgcagcccttcaaatagacaagctcagcctcaacaggattccaaccagtggggtggtgctaatgctggatactacggttatgggcaaggatatgagggttatgggtatgctcaacctcaggaccctaatatgtacgggtatggagcttatgctggttatcccaactaccaacaacccctagctcagcagccgcagcagcaacagtgagatccaatggaagatttggttttcgagactgatcaaagccgtcgaacgaggtgatgcttctgcattccggagcatgtctgggttatgtcaatagagattgtgatttgtagttctccagattttgactgcttatgaggtgttttgattaagcgacatgttctgtacttctgtgagcctgggctggtgcacattgtgattctgtcgtacatgtgaactgcatgtagtaaaaaaatctttcgtggtttgttttctgcccc

SEQ ID NO: 22636 - DNA, 1271 bp, Oryza sativa
  ref <308>: DATABASE ACCESSION NUMBER: AK072805
  ref <309>: DATABASE ENTRY DATE: 2001-12-06
gagctacaattgtatatcacttggcctctggccagattggtggagaaaggcaagttctcaggctgcagaggaagcagagctccaatctgttcatgccaatggctgctggcacctgggtgaagctagagcagaagggagatgggccgggagcaagaagctcccacgccatcaccctcgtcggcggcacggcgtacgcgttcggcggcgagttcacgccgcgcgtgccggtggacaacgccatgtacgccttcgacctcaagtcgcagtgctggtcggcgctggacgcctccggcgacgtgccgccgccgcgcgtcggcgtcaccatggcgtccgtcggcgccaccgtctacatgttcggcggtcgcgaccaggagcacaaggagctgaacgagctctactcgtttgacacggcgaccaacagatggacgctgctgtcctccggcgccggcgacggcccgccgcaccggagctaccactccatggtggccgacgccgcggggggcgggaaggtgtacgtgttcggcgggtgcggcgacgccggccgcctcaacgacctgtgggcctacgacgtcgccgccgggcggtgggaggcgctgccgtcgccgggcgaggcgtgcaagccgcggggaggccccgggctggccgtcgccggcgggaaggtgtgggtggtgtacggcttctccggcgaggagctggacgacgtgcactgctacgacccgggcacgggcgcgtggtccacggtcgagaccaccggcggcggcggcggcggcgacaagccgtccccgcgcagcgtgttctgtgccgcggggatcgggaagcacgtggtggtgttcggcggcgaggtggacccgagcgacctggggcacctcggcgccggcaaattctccgccgaggcgttcgcgctggacacggagacgggcgcgtgggcgaggctggacgacgcgggcgagcaccacccggggccgaggggatggtgcgcgttctcggcgggggaggtggacggccggcgagggctgctggtgtacggcggcaactcgccgacgaacgatcgcctcggcgacatctacttcttcactccgccgctggcttaataattcctgaaccggcgagcgaccttgtcgacctccgtcatgcaggtgtccgcgtgcttcccttctgagcgttgggtagttgtgtggtttgtcactgtgtttgatgttggtgttggtatcatgttatcctgtgttgtgtagctgatgaaataaatgtgatgcattggtcattggtgctgc

SEQ ID NO: 22637 - DNA, 1775 bp, Oryza sativa
  ref <308>: DATABASE ACCESSION NUMBER: AK072806
  ref <309>: DATABASE ENTRY DATE: 2001-12-06
gagctgaagcgcacacaattacaattacagggcgactactctctcctctctgctccctgctccctgctccctgctctctctagagagagaatagagagagagagagaagccatcagccatggcgtgctgcttcgcctgcctgggcgctggcggcgggaagatgaagaagaagaagaagtcgccgcctcagatcccaccggcctcagaaagagataacccaccaaacctggcctcatcgacagtgatgaagcaggatcaggattcgtttcaattagctgctaacgaggacatccttgtgagcaatggatcatccgagaaccgccgcattgcagctcggaccttcacctttagggagctcgctgcggccacaagcaacttcagggtcgattgcctgctcggtgagggcggttttggaagagtgtacaaaggctatttggagactgtcgaccaggttgtcgcaataaagcagctcgatcgcaacggactgcaaggcaacagggagttccttgttgaagttcttatgctcagcatgctgcaccacccaaatcttgttaaccttattggatattgtgccgatggtgatcagaggcttttagtttatgagtatatgccattaggttctttggaagaccatcttcacgatcctccaccaggcaagtcacggcttgattggaatacaaggatgaagatagctgctggtgcagcgaagggtttggaatatttgcatgacaaagccaatcctccagtcatataccgagatttgaagtgttcaaatatcttgcttggggagggatatcacccaaaattgtctgactttggattggcaaagctcggcccaattggcgataaatcccatgtttccactagagtgatgggtacatatggatactgtgctcctgagtatgctatgactggccagctgactctcaagtcagatgtttatagttttggtgttgttctgttggagatcattacaggacgaagagctatcgacaacacccgagcagcaggggagcaaaatcttgttgcatgggcccggcccttgttcaaggacaggaggaagttcccccagatggcagatccagcgcttcatggtcagtatccatcgagaggattgtaccaggccttggctgttgctgcgatgtgtgtccaagagcaaccgaccatgagacccctgatcggggatgttgttacagctctcgcttaccttgcctcccagacttatgatccagaggcacatggcgtccatcacacgtcacgtttgatgtctcccggcacacaaggtgtatgagggatgcagacttaggctgaggaggtgctgtagaacagaaagcaggaattaaggcttcagaaagcctagaatattttttgctagatatggtacctgaggagatgttgctgacagtccatggagatgaccagcccagagattttgttcatagcaagagaaagagaatcatagagagaaatgagatggttcctggtttctgcaacatggaatggtgatagattgatttgttttctcatgatagggatggctgctgttgttgtacatgtgaatttctttctcgagtctgtatttacatcagtgtaggagtagcctgtagcgtagtacatttgggttcaaggaatttttgtcatctctttgttccctgtgggtgtgagtttcggttgcgtgctggagggttgtcagctgcagtttcagttgcctggtgatgttattgcgtatgcctcagacagtatgccatcacttactattgatgcggtttcttatc

SEQ ID NO: 22638 - DNA, 2409 bp, Oryza sativa
  ref <308>: DATABASE ACCESSION NUMBER: AK072807
  ref <309>: DATABASE ENTRY DATE: 2001-12-06
gagcttcgcgctgcctcgctgccgctgccgccgccgccgcgacccccacttctccgccagcaaagcgagctgctctgctccggttgccttcctccctaagcctgctctgctcgcgggcaccagattcggcgggcagcgaagcagacagctctctccgcccctgccttttctgtttcttgattagtataatatcaattaggaggcttttctttgctttcgatgggtgtgtgcgtgcgtgttggtaattttgattagttagcggcccatcctagccacgcgacgccgatctccagggcgcggctgttcttgccaaaccgcaaccaccactagcccccacttcgtccggttttaattttcaattatcttggcagttcgtgagcctttcgttttcttggggctccagggtttcgcgtctctctctggtttggactttgagacttgacgacgctctggtgagcgggttgatcggcgttgaggaagagattgggcggaaggttgtcgatggagccgccgtctgggattcgggcatctgcctggagcttcttcaagttcctgcctttcttccttggccttctcctcctggggatcatcaaaggtgctttgctcttcccatgggcatggcttatcatgatgatcggaatctctgcactcgttcttggcttatggcctatgcatgtgatctggacatactactgcatcatcagatccaagcttgtcgggcctgttgtaaagctgcttcttcttgtcgccgcatctgtgattttagtcttatggctcattgtcgggatcgtgggaagtgtcctaattggtgtggtgtatggttttctcgctccagtaatggccacatttgatgcagttggagaaggaaaagaaagaccactataccactgttttgtggatggaacatggagtactataacaggaagctgtacagtagttagggacctgaaagatttattattgcattcatatttttcaataatggatgaccttcgttttcatgcacctcctggaggagagccatatgaaataagagtgcttgacattcctggtgcattattcgctgctgcgtgtggatttctagtggatggaataatgttcacactaattgccttctacaagttccctgtgatgcttttcaaaggatggaagcggctgatcgaagacttagtcggcagggaaggacctttcctggagacagcttgtgtgccatttgctggtcttgctattcttctgtggccatttgctgtttttggagcttttctagcctccatcatctccagtattcctttaggtgcttttgctgctgttgtggtttatcaggaatcctcgcttatcatgggactaaattatgtaatatcatcagtggccatctttgatgaatatacaaatgatgtgcttgacatggcaccaggatcctgctttcccaggtttaaataccggaaaaatgaagcttcgacagagggtggttcattatcaaggcctgcctcatttaaggacaagcaagacgggaagaaagctccatcacgtgttacatcgtttaagggcagctttgatgagttcaatccgtttaagttgctagatcacctgtttgaggagtgtaagcaccgtggagaggttctggttgctgaaggagtgataacaccaaaagacattgaagaaacaaagtcaggaaaaatcgggattggagtacttaatgttggtttgccggcatatgttattcttcacgcactcattagatctgcaaaagctaattctgatggcctaattttaagtgatggttctgaaataacatctgataacaggcctaagaacacaatctttgattggttctttgatcctctgatggtcatcaaagagcaaataaaagcccagaattttacagaagaggaagaagcatacctcaagaagcgagtgctgctgaccagtgatccgaagcgcctcaaagaggttgttcctcatctgccatcatcactgaatgagcgaaaacaagctgaaatcgacgcactttcccggagattgcaaggaatcacaaggtcgatatcaaggtacccaacggccaagcgtcgtttcgacgaccttgtcagatcactctcggaagagctcgagaggacaatgggtggcagccaatctggcagtgtgtcccagatgcagaaactgagaagcggcatcagccgaatgctcagccagagatccatggggaagaggacgagcaaccgtggtgatgatcgggaggcgcagttgacaattgatccctaacatctccagaaagttcagacagaatttcttcgtcgtctttctagagctactttagctgtcttgatttgtacagaactgtttagaccggtgtatgaactaattctaaccactcttgaatgaaatggatgttgcaagattctgtgtttttgg

SEQ ID NO: 22639 - DNA, 1761 bp, Oryza sativa
  ref <308>: DATABASE ACCESSION NUMBER: AK072808
  ref <309>: DATABASE ENTRY DATE: 2001-12-06
gacgagccgcctccgcgcctcccctcggcgcacacagcagatcggcgaggtctgagcgcatcgtcctcaacaccgagtagaccggccggccgcggcggccatcatcgctcctaccatggccaaggagctcctcgccttccccggtgtcgccgtaccgtacgtgcagcagtttcttgacaagaacgatggcatactgaagtgatgccaaattgccaactgccaagttttcttgtgcttcttttccaggtgccttagctccgggagcacgatccattctcgatgctaggcagttagctttttctcccctttagctcctttttgctttgtcaggcaggggaggcagttttgctttgcctctataagagacagtgcgattattaggctgggcaagtgttaaaccgttgctgggatttgttggatctatcaaagttggtcgggtggtatctcttgggtgaaatagtactactgccagctagtttgccaggagctcagatggagaggcggctcctggaggcagccatggttggcagtgccacatcaatgaaggagatggctgcacaggatccaagcctgctgcttggaacaactcctcaagggaacacctgcctccacatctcctccatccatggccatgagggattttgcaaggatgtgctgacgctaaacaattctcttctcactgtcgcaaacatggatggtgagacaccactgctcactgccgtgacaaatggacacatgtctttggcctctattctacttgaatgctgctgcacactagggttcagtgaggcaatcttgcaacaagacagaaatggttgtaatgcactgcaccatgccattcattgtggtcacaaggaccttgcactggaattgatattaaaagagcctgccctatcaaaagctgtgaacaaatacagtgagtcaccaatgttcatcgcggtaatgagagattttacagatgtttctgagaaactgttgggaattcctggatctaaccatgttggaacatatggccacaatgccttgcatgctactgtgagaaatggaaatgcagttatggctaaaaaaattttggagggtcgtccttggctggggaaagaacgaaccagagagaggaagaccccaatcctgatgacggtaatttgggacaagatagacgtgcttcgtgtgttgttggaacatgatgtgcttttagggtatgaatgctatgatgatggtggtaatctgagccctcttcttgttgctgctgcatatcgaggtcatgttgatgttgctcaagagcttcttaaccactgtccagatgctccctattgcgacagaaatggttggacatgccttcatgaagctgtaaaggaaggtcagacagagtttgtggaatttatcctaaggacaccacaacttcgtaagctcatcaacatgcgaaataacaaggacggacaaactgctctgcatcaagctgtccggatgtgcaatcctaaaattgttgcctcgttgttgtctcataaagacacagacttcacactgaatgatcacaaaactggccagtcagtaatttggcaattatgtttgggttcagagcgtgccaagactttaaactgggtatgttgcaactagctaccttcataacgcttcgtgtatacacctacgtatagaccttttgaagaagaaatacataaagtgaatgcagctaattcaggataaaaaaaatgagaattgaaggaaagcaataaaatgaaaaaaaaatctagttgagtgttatgg

SEQ ID NO: 22640 - DNA, 2338 bp, Oryza sativa
  ref <308>: DATABASE ACCESSION NUMBER: AK072809
  ref <309>: DATABASE ENTRY DATE: 2001-12-06
ggcaacaacaactaagttgttggatagtaaaacctagctttgctatagcaacaacaacaacaacaaaaaatctctctcacatggtggggatgcgtggagcttatggctacaatgacaacggcaacgagggtggcgtagtagttggagggggggaggcggaggcggagatcgcggcgatggcggtgctacacaaggtggcggcgccgccggcgcagagcacggcgagcaagctgaaggcgagggtgaaggagaccttcttccccgacgacccgttccgcgggttcaaggggaagccgctgacgaccaagtgggtcatggcggtgcagtacctgttcccgatcctcgactgggtgcccagctactacttctccctcttcaaatccgacctcgtcgccggcctcaccatcgccagcctcgccatccctcagggcattagctacgcgaagctggcgagcttgcctccgatcatcggcctctattcgagctttgtgccgccgatggtgtacgcggtgctggggagctcgagggacctggcggtggggccggtgtcgatcgcgtcgctgataatggggtccatgctgcggcaggcggtgagccccgccgccgagccgctgctcttcctccagctcgccttcacctccaccttcttcgccggcctcgtccaggcctccctcggcatcctccggctggggttcatcatcgatttcctgtcgaaggcgacgcttgtcgggttcatggccggcgcggcgatcatcgtgtcgctgcagcagctcaaggcgctgctcggcatcgtccacttcaccaccgagatgggcctcgtccccgtcatggcctccgtcatccaccacaccaaggagtggtcgtggcagacgatcctgatggccgtgtgcttcctggtgctcctgctcacggcgaggcatgtgagtatgaaatggccaaagcttttctgggtttcagcttgtgctcccttggcatgtgttatcgtctctaccctgcttgttttcctgttcaaagctcagaaacatggcattagcataattgggcagctcaaatgtggcctgaatcgcccttcatgggataaactactctttgatcctcaatatttgggcctcactgtaaagactggccttgtcaccggaatcatctccctaacggaaggagtggcagttggtaggacatttgcttcactcaaggactaccaggtagatggtaacaaagagatgatggccataggattgatgaacattgtgggctcatgtacatcatgctatgtaactacaggagcattctctcgttctgctgtgaaccacaatgctggttgcaagactgccatgtcaaatgtgatcatggcactgactgtcatggtcacactgttgttcctcatgccactgtttgtgtacacaccgaatgttgttcttggagcaatcataattgctgctgtgattgggctcattgatctccctgctgtatacaacatctggaagatggacaagatggatttccttgtgtgtctatgtgcatttgctggtgtaatcttcatctcagtccaacaaggccttgcaatagcggttggtatatcaatattcagggtactgttgcaaatcacaaggccaaagatgatgattcaagggaacatcaaaggcactgatatttaccgaaatcttcatcagtacaaggacgctcaaagagttcctgggttcttaatcctgacagttgaggctcctataaactttgcaaacaccaactacctaaatgaaaggattaaaagatggatagaagaagaaagttctgcaggaaccaaacaaagtgaactccatttcgtaattttggatctgtcagctgtccctgcaattgatacaagtggcatatcgttcctcatcgacttgaagaaatcaacagagaagcatggactagagcttatacttgtgaatccaactggagaggtcatggagaagatacaacgagcgaatgatgctcatggtcatttcaaatcagatagtctgtacttaaccactggggaagcagtggcttcactctctacattttccaagatgacagcgccttagagctgattctaaggttgtcattttcattattattctaactgcgctgctaagtttgcaatgcaagattttccaccctgttctctcagcaatagaagtgcctccagcaacgtatttcccggttatgtttgtacccccaatcttccgaggtattcagactatgtgatgcaaacttggcagtagaagtactgtgaatatgtaccttgtgcatacccatcagtatttgtctacatgagggcaaacacaccaacagtacagaatatatagtaattctc

SEQ ID NO: 22641 - DNA, 2726 bp, Oryza sativa
  ref <308>: DATABASE ACCESSION NUMBER: AK072810
  ref <309>: DATABASE ENTRY DATE: 2001-12-06
gatccgtcatcctgctgcttccgccgcgtccatcctccctgcttaggttagcccttcgcacatcctccgccgccgccgccgacgatccccatcaatcccgcgagcgagcggggccccgtcgttcgtcctcctgccgcttccgccgcatccatcctgtaggatcgatggaggcgaagttatcgttttctcaggacagcccgccaatttccataatttctgctgctaaggttgccggtgtctccctgtccatagatcctagtcttgctgcgggctcagcacccgttctatgcttcagttctggagaatcactccgtggtatcaaccctattctcgagtacattgcccaatcctctccaagcctccatggccgagatgctattgagtctggacatgttgttgaatggcttgaatacgcccccaccttccttttaggatcagaatttgaggttgcctgctcatttgttgatggatacttgatgtctcggacctttctggttggtcatgttttaacgattgctgatatcactgtatggtcaaatctggctgggattggtcaacgatgggagagtctacggaaatcaaagaaataccaaaatcttgtccgttggttcaatggcatagattcagactacaaagacacattgaatgaggttatagctgcttatgttgggaaacgaggaattgggaaatcccctgcaccaaaccttaaggaaaaggttaatgactcaaaggatccttcagctccagaagttgatctccctggtgcaaaatttggagaggtgtgtgttcgctttgccccagagcccagtggttacctccatataggtcatgcaaaggctgcactcttgaacaagtactttgcagaaagatatcaaggtcgattaattgttcgatttgatgacactaacccttcaaaagaaagcaatgagtttgttgaaaacctcctaaaagatattgagaccctgggaatcaaatatgatgctgtcacatacacatctgattattttccaaagctaatggaaatggctgaaaaactgattaagcagggaaaagcatatgttgatgacacaccaaaggagcaaatgagaagtgagagaatggatggtgtggagtcaaagtgcagaaataatactgtggaggaaaatctgtctctatggaaagagatgataaatggttctgaaaggggtatgcaatgctgtgtgaggggtaaacttgacatgcaggatcctaacaagtcccttcgggatccagtttactaccgttgcaacactgatcctcaccatcgtattggttcaaagtacaaggtctatccaacttatgactttgcttgtccattcgttgatgcgctggagggagtgacccatgctcttcgttccagtgaatatcatgacaggaatgcacaatactatcgaattcttcaagatatggggatgaggagagtagaaatatatgagttcagcagattgaatatggtttatactcttcttagcaagcggaagctgctttggtttgtgcagaacaagaaggttgaagattggacagaccctcgtttccccactattcaaggcatagtacgccgtggcttgaaagttgaggctttgatacaatttatactccaacagggtgcttcgaaaaatttgaatcttatggagtgggataaactctggacaatcaacaagaaaataattgacccagtttgtgcaaggcatactgctgtgttgaaagatcagcgtgtgatcttcaggcttactaatggtccagagaaatcatttgttcaaattttgccaaggcacaagaaatttgatggtgcaggaaagaaggcaacaaccttcacaaacagaatttggctagattatgctgatgcatctgcaattagcaagggtgaggaagttactctgatggactggggaaatgccatcattaaagaaatcaagatggagaatggagtaattactgaactgattggagaactacatcttgagggatctgtgaagacaacaaaattgaaggttacatggcttccggacatagatgatctggttcctctctcattggtggaatttgattacctgattagcaagaagaagcttgaggaggatgagaacttccttgacaacctgaacccatgcactcggaaagaaaccctggccctaggagacgcaaatatgaggaacctcctgcgtggggaggtcatacagcttgagaggaaaggctattacaggtgcgatgccccttttgtcagatcctcgaagccggtggttttgttcgctatccctgatggtcgacagcaggccagtttgaactaggcggcatgattctgatgagcttctcaagtcgttgagttgtcagagattcctgaatgctctactgaaacactcccatctcatactgtaatgtcgcttatgtgtcatgggtgatttgcgctaagttttggtgcacagtttaatgtttctcatgctccatgctccagttattaagaagacacaacatttcttagatggcaacgtgttagcttggcgatatcatactgccagatacaagcatctgaattttttgaagactaatatctgatattgcttggcatctgaattttttgaagactaataccgctctgggaaactgagttgaggacatttctggtccatattgcttgacatgcccttttatgtttccagttgttgattataactggtgaatctaatatcagtgttcgttggttttgtgtc

SEQ ID NO: 22642 - DNA, 1888 bp, Oryza sativa
  ref <308>: DATABASE ACCESSION NUMBER: AK072811
  ref <309>: DATABASE ENTRY DATE: 2001-12-06
gagcggcttccgtgggtggatctagtggaggcaacatctcttgcaggtagatccggtggcggctatggctctctcgcatggaggtggcagtggcggcgatatcctcgacatcccaatgaacaacattggtaggcagaattctcttttgtaattagttctcctctacagtgagtgacaacacaacatctccttggagttggtttctgatgaatatttgatgaaactgttaaccgatatttggttgatatttatatgaattgtgctttcggagatgttattggattaatcgatggtggtatagaggtgatggggagcgactcgattcgagccaatgcatcgaggaagttcccaaatcatgccgcttcgtggtgctggttgaggaatccagtacctatatgggagttccagctagcaccaaagtatgtttacatagtgcactattcgcaagaaaattttgtttttattactcacaaataaagttgtgtatgaagttaaaattcggcgtgaatgtatcctgtgcctagtagagttcaccgtatatatcacgaataatttttttatgaatgtacaaaatgttttaggtctgtttttcgatttcatgatttttaccgtttatgtccctagataaatagcatcgtaaataaacaaattatgtactggtatataccacttaattagatagatagaaataagaaaaactagagttcacctggacaaaagcgatgacacttcttgctagacacatcgctttcttggacgtactctgctctttccagtaatggaaaaggcagcgcagggccgcatggcactgatggcagtagtgaccatggaaccttcattatctcattttcatttctccttaccgagattgactaaaaatttaaactaacgatgagttttttttcttaatctctgtcctgaaaaatactccctccttccactaatataagggattttgatattttgcttgcactgtttgaccactcgtcttattcagaaaaatttgtacaaatataaaaaatgaaaagttatgcttaaagtactatggataataaagtaattcacaaataaaataaataataattttaatatttttttaataatgcgaatggtcaaacaatgcaattaaaatgtcaaaaccccttatattagtggacggagggagtacatatattaaatatataaattacgatttccattgtaaagtgaaatatctatcactaaaaactgttacgaaaacaagcatagaaaagtcgtttatattattcaacgtttcaatagttccgtttggaaaaatgtaagaggtatagacgtgcagagaaccgctttctttttccaccgcttggagtaataattccaagtcaatcggcgcgtattcggaaaatatattgatggtctagcacgtacgagaaaattgaacgaagttcgagctgtcattttttttccaaacacgggttaaactgcgcggtgaaatatacacgtgtttaagtcatagatttgtcacatgttgtcgtatttacaactaatttatgatctgacatgcgtgctttgtgcaaatggtcatggagaaacaagagagaaccttttcttcttctctccttttagtcagagattatgttggcggcatctgggaatcctgtgagattctaatctcaatttcttccgaatagtggtgctggaagtcttcttcaatgttgcctagcatatttgcctagcaacgttcctttgaagcatggagaagtttgttcatgagagaagtgtgtagaatgaatgatgccctaggcaagttgttttttattggttacaaactttgtaattttttcaggtgctttccttgtaacctttttcttgtaaatatttttctttttaatgaaaatcacactctgag

SEQ ID NO: 22643 - DNA, 3915 bp, Oryza sativa
  ref <308>: DATABASE ACCESSION NUMBER: AK072812
  ref <309>: DATABASE ENTRY DATE: 2001-12-06
ggctgcgagtgcgagtccacacaacactgtgaactcccccctctcgagaaaaaaaaaaagatccaaaattttttcgcccttgggttcgaaatcttcgtgccttcctcctcctcgcggcctccaattcgaacgccccagttgctcgcgccgccgcggattccccagatcccacctcctccccagctcgcgcggcccaattcgaaggcggttctagggtttcccggcacgaatttagggtttcgggggagcttcggggggtgttgttccttgttccgcctagggtttggaatttggggggcgtggagagatgggataaggagggtgttgggagggtgggagctttgcttggggtgtgtgtgtgtttgggtggtgctgagctgagctagggtttggtggtgaggtgctgaggaagggaggtggggggtggaaaatgttctactcgcagttcatcttggccaagaaggggcccctcgggaccatatggatcgcggcgcatttggagcggaagctgcggaagaatcaggtcgcggatacggatatcggcgtctccgtagattcaattatattccctgaagttccgattgcacttcgattatcaagccatcttatgcttggtgtggtcaggatctattctcgcaaggtgaactacctattccatgattgcagtgaagcgttgctgaagataaaacaagcctttaggtctactgccgttgatcttccccctgaagaatcaactgctccttatcattctataacacttccagagacattccatctggatgattttgaattaccggaggctgcatttcagggtgacattgatcatcatgtaagcacaaaagaacagatcaccttgcaagacaacccagagaaaactggatactcaacatcccaatttggcttagatgaaagatttggtgatggcaattcttcacatattgggttggatttggaagaggaattaatgctgaacaaggaccagtcaattcaacttgaggctgatgatggcattattattcaaggtcgatcagcagttcatcctaccgatatggaagttgatgataaccaaaataaagatgaaagcgctgaaggatacaacatggaggatggaccttccagtcacaacaaactaaatccgttaagtgcagatggtctagtaggaaacagtcttcctaattggcatacatacaatgtgcaaacacctgatctgaatgatatgctattgaacaatgatgggaatgcaggaccatcagcttcatactatcaacctagtcccttcccttgtgatgagcctgcatcaccagagtttgtaagtgcccaggccccggctacacctggcctaatggaagagactgttccttccagagtgcatgaaagtcctgttctgagtccacagcgaaaagcttcaccatcaagcaatgatgaaactgcaaagacagctgaaaatgctaatgatcttgtgggtgctgagacgactgaacttgcattgacaaagcctgtgcaaattgaatcttctggtgctgtacaggagactgattccttgagtcaacaatgtgcaactgaggaattgccaccccaagctgaaacctcaaacttggaagctaccatggacaagtcaatgataaatactgatggtgtagctgcatcaggtgaagctacagctgctaaagaaaccactgaagtgtcattggttgaaaattctttagagctatgcgctgatggtcctactgaacctgtgattgagaaccaaacacagtttaatgatggatcagttgatgtgcaagggggcggtcagcatgcacctcatgctatcttagcaactgcagattcccaagtgaatgtagaagcatcaacacaagaaatggcatctaacgatataccaagtgacctaccaaccttggaatttccagaacgtgagaaaatgctgtcagctccagacgttgaattgtaccaggcaaatgacttgggccaggtaactgcagaaaagggaaccactgaatctgatggaagtaacaaagtaggtagtctcactagcagaaaaagacacttggaggacagtttgccagctctcgaaagtgcaactactgaaaaattgtctagcagaccacgtggtaaaagaaccattgatggtattcctgatgatgatgatttactggcgtctatattagttggtagaaggacccctggactgaggcttgattcaacaccaataccacctaagacgtcatctttgaaacgtccaaggttgacgtcaaagagtaccacaccgaagagaaaagtgcaaatggatgatgccatggttatacatgctgataccatacggcagcagttgatcagcactgaggatataaggcgcattcgtaaaaaggctccatgtacccgttccgaaatatggatgatcgagaaaggttccttagaagatgatatattccatgagcccatcttttcctgcatgtgcaaggagctaaacgatttgcaatatcggacctatgagattgttgctcatcccaccattcataatatggaaatacatgtacggctagacatgtcccaaactatggcagatggcagcaatgatgttggcacctctggcgcaaaggacagtggaaatcaccaagatcatgtatgctaccagatggagctgagtcagatgcgatgcatcctgaagcaactgatgcagcagatactagaactgattttgattcacacatgccatctgacaaacaggttaacaatgttgaaggagtaactgaacaattaactgataatgagaaagaaactgcagttgttgagaaagcaaccactaatatgggtgacagtgctcaagttgattcacttgataaggaatatcttcaagatgttccagctgatctgcagaggagcacaaatacaaatacacctctgtttgtgctagatgacatgcctggtccagatgtggttctggatagctctgatccagtttctgcacaagcagtggatgatatgaaaggggagttgagtgacattgtccatgacaatgtcaatgcatttgacaataaggatatgccgacttctgagattaccgtactggaatttactcaaaacgcttctggttttcctcagccaacagaggatgaaaatgttctgtccgcaatgggtgaaaattctggattgcaagaaaatcatgtaggatctgttatggatctggacaatatggggcatgacttttcactaaaggaatgcagtgattttggcagtgcgattcagggtgttgacacagattttctgatgtatgatgatgaggtggactgtgatgaggctaatgatgatgagcctaatcctgaggaattccagtctcttgataacagtggatggtcttcacgtactaggggtgttgcaagatatctcaaaactttatttgatgaggaatctggtctgggaagaaagagtgtggccattgatcatctgttaagtggaaagactaggaaagaagcatcaaggatgtttttttgagacattggttctgacaacaaaggacttcataagtgtggatcaaccaaactcctttgattttgtcagcgttaagccagggccaaagctcctgaagtcagatttctagatcaaaaaccagctagcgtggcgcgatacatacaatcttaccatatctgtcacattaccaacaacatacagatctcgcatcgccgtgaccgtcatttttgttttgttctttttaatttatcctccctctgtagtatccccgcactaatctgtgtttactaggcttcttgggtaggattctgttgtacccccctccgtgttggctattcagtgtatatatgattagctcttgtaaagttgcttgtgtaatgtgatagcatcagctcctaagtccccgtctattgttgctttgaataaaccttcaaacctgtatacttc

SEQ ID NO: 22644 - DNA, 1071 bp, Oryza sativa
  ref <308>: DATABASE ACCESSION NUMBER: AK072813
  ref <309>: DATABASE ENTRY DATE: 2001-12-06
gattgccgccccgtttctctctctgatcggcaaaaaagtggatgctccggctgctcgaccgccatggtgaggtctctcgacagctacccctccatcaaagatgtcacctacagctgcggatactgcgggtacgcgctgaacctgagctcgtcgacgcggaacacggcgaacatcgggtccaagtacgggaagcagatcaagaagggggtcgtctccttcttcgcggtggacgagagccggttcacgcaggccgacgaggtcacctgcgtgccctacttccactcgcggcgctcctgggggctcttccggcggaggtcgcggctgctgtgccggaagtgcggcggccgcatcggcagcgcctacgaggaggacgaacccgccgccgcggcgctgcccgcgtgcgacggcccggacgacctgcgcaccacgagctccgggagcagcggcagcgcgtcgagccagaagaactacgtgatcaagatcaacgcgctgcagccctcgtcggacgattctgatgctgttgcctttaccctatgacgattctgctgtagcctgtcatctcttccggcccggttgaatttgctgctgcagtcttggaattcgcattgggagtgcaaaaagggtgatattgcagtcaaggaagggatcgccatggcagtgagcttttggaagggtttgataccatcatgatcttgagtcacctttgctgtctgtagtagactagtagtgcttttcttttcttctgtgaattggtgggagtatacactggttgttaatttttggatctgttaatattggaaaatgacaaagtttgctgtatgtggcttggccctattgagtttgtaccatctcatgaggttcataggggttgcaattttgagtcatcttgctttactggtatgtcttaagtttctctacacggattcttcattagtcttctaagaaagcatgggttgttgcattgtgtcagttactgaatataaattctctgttaaactttaaattatagtcttttggttttccagaaataggcatgtatcttcagttttgttaagctgataaggtgaaacc

SEQ ID NO: 22645 - DNA, 1318 bp, Oryza sativa
  ref <308>: DATABASE ACCESSION NUMBER: AK072814
  ref <309>: DATABASE ENTRY DATE: 2001-12-06
tcaacgacagaaagggaagagattttcccttatcctcttgatggagctcctcctgcgtccctcccctccgccgccgtgggcgattccacggcggagctctggcgagagaaccaaaccctgccgctcccgctcccgctcccgcacgggaacctctaagcaaacatttcctgtccctttactggttggcaaggttggaagacgtccgtttcctgtgcagtgttctatagttcgatgctgcttgtcatcaactgatgccatccattctacaagtgatgacatccatgaagataatggacacggccattttcttatgaagtctacatctgaccttcagaaagtgatatcttcctgttttgggaaagcatgtcttctcagttctgtcatgcttgttctaccacccagttgtttcgcagaaccgtgtgagccagagtactctctacctaacatgcctttgctttttgcaattgccatgattggagctaccgttggagggctccttgcaagacaacggagagggggagcttaaacgattgaatgatcagctacgtcagataaatgcagcactgagaagacaagccaagattgaatcttatgctccttctttgagctatgcaccggttggtagtaagatacctgaatcagaagtcattgttgatccccagaaggatcgcttaatttcatatctgagggctgggaagaactatctgagaaaccaagcccctgataaggcatttcctgagtttaaggctgcttttgatcttgcacaatccttgggtgatcacgtcgaagagaagaaggcggcacgtggattaggagcatctttgcagagacaaggcaagtacaaggaagctataaagtaccactccatggtgttgaacatctctaagctgaccggagaggacgcaggtgttacagaagcctacggtgcgatcgccgactgctacactgagcttggtgagctcgagaaagcaggcaagttctacgacaagtacatcgcaagactggagaatgactgaacagatttaaagaaccgtgtgtgcaacctttgagagctcaagtagggctgtgtcccatcttttgccttctttggcctgtcttgtagcaacgtttttgtagtggacgctcagttcatggctgtaactgaggcacatgccatctttcaagttatttctactaaatagtgtcatcagattttttttttctttgtctggtcaagatcggcaccatgttgtgtaaaatttctccatctgttccaagttataagcatggctatgtatctggctatgcttgtcctgaatcaggaatgcttatgttttgg

SEQ ID NO: 22646 - DNA, 1127 bp, Oryza sativa
  ref <308>: DATABASE ACCESSION NUMBER: AK072815
  ref <309>: DATABASE ENTRY DATE: 2001-12-06
gtcaggctcttcagtttttataacttctcttgttcctttatttgtgctcaaaagtatttcatttatttccttgcaattgattgctgtgtaagtctcacggcagttcctttgagacattatttcactgtcctagattaggttatggccttatttgatttgattccccttatggtgtgcagataatttggactggttgggtatctgttgtgttttcgtgcttgtattggatttttgttgtcttaatttttattcattggtattattgtgcttctgtttagatctgatttttgggggacaaacttcaaaatatatgatagcaagccaccatatgatggcgctaaagcatcaagtagtcgatccagtcggcgttttggaagtagaaggataagtccccaagtgtcagcaggaaactatgaagttggacaggtttcctataaatacaacctgctcaaatccagaggtcctaggagaatgtattgtgcacttgagtgcccttcaactcaagagacatgggaaaactgtctaaagacgaagttcagaaaacccacagggaacacagttctaagaaacaaagctccccgctggcatgagcacttgcagtgctggtgcttgaacttccatgggcgggtgacagttgcatctgtcaagaatttccaactagttgctgctgctgatcccaatgatcctgctagctcgaaggatgaggaaacagttctgttgcagtttggtaaggtcgatgacaatatcttcacgatggattaccggcagccactctcagcgtttcaagcctttgctatcagcctcagcagctttggtaccaagctagcttgtgaatagcaacatagtttgatgtcctcatattgccatctggttgtggttgtggatgcatgccgttgtggttgttcccggcatttttcttctttcatttctttcctttttactctggatatcaaggtactattcatatcctgttcttgtgcgggaaatgtaccattttaccaaatggacttagctccgagaaggaaattgtgttgtaaaacttttgctttttaagtgaaagcagaaggcagtctgttgtacataagttcttgatgaagtgatgataccttttttacttttggctgggc

SEQ ID NO: 22647 - DNA, 2164 bp, Oryza sativa
  ref <308>: DATABASE ACCESSION NUMBER: AK099302
  ref <309>: DATABASE ENTRY DATE: 2002-08-28
gagcgtcgcctaaccctagctaaaccccccttctcccttgcgcctccgcttcgcgagcctcatctcctcgatctctttcgattcagtggaaaacctaggagaccggcgcggcatggcggagtcgggctcgtcgggcctggaggagaagctggcgggtctctccgcgggctgcggcgaggagccgcagcagctctcgaagaatgccaagaagagggaggagaaaaggaagaagcaggaggaggagcgccggttgaaggaggaagagaagaagaagaaggccgctgcaacagcagctgctagtggagagcccccgaaggaatctgccgccgacgatgaggaaatggatcccactcaatattatgagaatcgcctcaaggcacttgattcactcaaggccacgggtgtaaacccctatccccataagttcctggctaatattaccgtagccgattatattgagaaatacaagagcatgaatgttggggataagcttgttgacgtcaccgagtgcctagcagggaggatcatgaccaagagagcgcaatcttccaagctcttattttatgatctttatggtggtggtgagaaagttcaagtttttgctgatgccaggacctcagagttggaagataatgaattcattaagtttcactctactctgaaacgaggtgatattgttggtgtatgtggttatccaggaaagagcaagagaggggagctcagtatattcccaaagaaaattgttgtgctctccccatgccttcatatgatgcctcgacagaagagtgagggaagtgctgttcccactccatgggctccaggaatgggtaggaacatcgaaaagtatgttttgagggaccaggaaacccgatatcgtcaacgatatcttgatctcatggtaaaccatgaagtgaggcatattttcaagacaagatcaaaagttgtctcttttattcggaaatttcttgatggtcttgactttttagaggtggagactccaatgatgaacatgattgcaggtggagcagctgcaaggccttttgtcacacatcataatgagttaaacatgaggctttatatgcgtattgctcctgagctctatctgaaggaattggttgttggggggctggatcgtgtttatgaaattgggaagcagttcaggaatgaaggaattgacctgacgcacaatcctgaattcacaacatgtgaattttatatggcatatgcagattacaatgacttgatagagcttactgaaaccatgttatctggtatggttaaggagttgacaggtggctacaagattaaatatcatgctaacggagttgagaaaccaccaatagagattgattccacacctcccttcagaaagatagacgtgattgaagaattagaggctatggctaaactcaatatacctaaagatctctaagtgatgaagcaaacaagtatttgatagatgcctgtgccaaatatgatgtcaaatgcccacctccccagactacaacacggttgcttgataagctagttggccatttcttggaggagacatgtgtgaatcccacgtttattatcaaccatccagagataatgagtccattggcaaagtggcataggtctcgacctggattgactgagaggtttgagctctttgttaacaagcatgaggtgtgcaatgcatatacagagttaaatgatcctgttgttcagaggcaacggtttgaggaacaactaaaggatcgtcaatctggtgatgatgaagctatggcattggatgaaacattctgcacagcccttgagtatggcctaccaccgactggtggttggggattgggaattgatcgccttacaatgttgctgactgattctcagaatatcaaggaagttcttctattcccggctatgaagcctcaagattagatatgtccacaaagcaggaacctgtcagaaggattaaagcagactgaatgctgactgagaggatttcaattggccctcgagatggaggatttgaaggaaacttataattttgttttaattgtgcatgtgaggtttccatgtcctattgtactttatttttggagaacattggtggtcagttaagcaaacagttaatctcgctgcaaagatatcaagcgtaacttataagatgacttaagtttgt

SEQ ID NO: 22648 - DNA, 2296 bp, Oryza sativa
  ref <308>: DATABASE ACCESSION NUMBER: AK072816
  ref <309>: DATABASE ENTRY DATE: 2001-12-06
tcctgataaggttgtgaaggagaatgaggtgttcaatgaatgtaactggaagggcaaagacaatgcacttggtgatatgatgagctggctcgagtggatcctgtcgcagacacttctacggatagcggagtccaacccgcaaggaatggatgacttctggctgcagcagggcgcagatatgctgctgagtttggtgaagagctctcaggaggatgtacaggagcgtgcagctaccacacttgctacgtttgtggttattgatgacgagagcgcgaatgtggatgctgcaagatcagaggcagtgatgcgtgttgggggcattccaatgctactggaccttgcaaggtgttcaagggagagtgcacagtcagaagcagcaaaggctattgccaacttatcggtgaatgccaaggttgcaaaggcagttgcagacgagggaggtatcacaatactaaccaatttggccaggtcaatgaatcggcttgttgctgaagaagctgctggtggcctttggaatctctccgtgggtgaggagcacaaggcagccattgcagcagctggtggtataaaggctttggtcgatctcatactccgctggcctgctgggactgatggagttcttgaacgtgctgctggggcacttgcaaacctagctgctgatgacaagtgtagcatggaagttgcaaaggctggtggtgtccatgctttggtcatgcttgctcgatcatgtaaacttgagggtgtcctagaacaggctgcaagggcattagctaacttagccgcacatggagataacaacaataataatgccgctgtgggtcaggaagcaggggctcttgaggcattagtgcagctaacaagctctcaaaatgagggtgtaagacaagaagctgctggtgctctgtggaatctgtcatttgatgatagaaaccgtgaaggcattgctgctgcgggtggcgttgaagctttggtttcacttgcacaagaatgtttgaatgcttcggaaggccttcaggagagagctgctggcgcattatggggactatctgtttcagaagctaacagtatggcaattggacaggagggtggtgtcgcacctttgctcacactggcacaatcagatgttgaagatgttcacgagacagctgcaggggcactatggaatcttgctttctattctggtaatgctctctgtattgttgaagaaggtggggttcctattctagtgcggctttgctcatcatcagggtcaaaaatggcacgtttcatgtctgcgctagcccttgcttatatgttcgatggaagaatggatgaggttgcattggttgggacgtcatcagagggcagttccaagagtgttaatgttgagggagctaggagaatggctttgaagcatatacagacttttgttctgacattttcggacccacaagttttcactacggcttccacctcctcagcctcagcagcactatctcagattgctgatgcagtgtttatacaagaagctggacacctgagatgcagtggtgccgagatcgctagatttgttgccatgctccggaatcctgcatcaattcttcgcgcttgtgctgcctttgcccttcttcagttcacaatccctggaggtcggcacgcagtgcaccatgcgggtctcctgcagaaagcaggggcagctcgagtcttgcgcgcagcagcagcagccacgaccgcttctatcgaagccaaagtctttgcaagaattgtcctcagaaatttggaacaccatcagacagggacttcaacatgaaagcacagcagtggagcttatgctaatcttccaacaaggcatttcttcagcagccttctcagcctgttcaaaacatcgcaaaattgcggcccaaggtaatgttttggctttcaaagcttgtgtcacattaccactcggcatgtgcaggctgtttgtttcgggatgtaggtagaatcacctaaagagagctgtgagctgagtaaacatgaacgaggcaatcgggagggttggggagtcgcttcatgcctctccatgaggggaacccatagagtagtttttcttgccttttttgtttgcgacgtggggggcgtgtgcaattttcttttattcatttggtgtgtaaaagtaactttgaaatgtcaccggcgatgggaattcaggaccttcatgcggtatacagtaagtttatttgttgattaatgaggtgtggtggtgccagactaggctgctccacctgcgctgtaactttgtaaatgtactgattactatataaagtttatgtttctg

SEQ ID NO: 22649 - DNA, 942 bp, Oryza sativa
  ref <308>: DATABASE ACCESSION NUMBER: AK099303
  ref <309>: DATABASE ENTRY DATE: 2002-08-28
ggaattcccccttccgctcgctcgcgccgctccctaccggccaccaccgcgcgcgggacaagcaacctagctgctccggctgccaagccatcgccatggctccgtgccccgccgcgaccacaactcgcattggggcgccgccgttcgccgcgacgacggctcgccgacccgcccggggcgcgacgacgacgacgaaggcgcgggcgtccgggctgcggcaggtggagggccccgtgtcggagagggcgtactcgtcctcctcgcccgctcccacccacaaggtcaccgtccacgaccgccagagaggtgtcgtccacgagttcgtcgtcccacaggaccagtacattctgcacaccgcggaggcgcaggacatcacgctgcccttcgcgtgccgccatggttgctgtactagctgtgcggttcggataaagtcaggacaaataagacaacctgaagcacttggaatatctgctgaactaaaagataagggctatgcattgttgtgtgttggttttccaacttctgatgttgaagttgaaacacaagatgaagatgaggtctactggctccagtttggaagatatttcgcacgaggacctgttgaaagggatgattatgcactggagcttgcaatgggtgatgagtgagccgtgtctaaagagtggtgtttgcagtcgggagctcatgttgtcttaaggactttctttgaaagtggagaaaggggctttttcctcagctcacaattttccatcttcagtgctgttactctgttagcgattgtttggcatgtaaaaaagtgtgctttcttgtaaaaataccattttctagttcgcacctgacagacgaagaacaccatggattacatgtaaagttgtaaactgaacacctaatcttgagtgcgaataatgtataatgatcaccggagttatgagtttgggaatg

SEQ ID NO: 22650 - DNA, 1927 bp, Oryza sativa
  ref <308>: DATABASE ACCESSION NUMBER: AK072817
  ref <309>: DATABASE ENTRY DATE: 2001-12-06
gggggggggtggcttgccggtgaggcggtaagtattccaaataaactcatctaggtttttgtacccatacgtaaataaacacgtgatctccaaaactccgatcgatcggctcgcggcgccgctcatggaaaccctacggccggttgcgacggcgacggcgacgctgccttccggcgttccgccgccggcggcggcggcggcggccagaggctacccagggtgggtgatgctcatgccctacgccacggccgaacgcgaggtcgacgactcggagtactccacctccaactccggtggagccaagatcaccggggcggcctcccgctcctcgtccggccatctcgtccgcgtctccctccgcctcgagtcgccaccggcggcgtcggggctaagcttccactgctcaccgtgcggcggctccggatacggagctcatcattaccggccctcgatgtacgtcgtcgctgcccacggcgactccgtgctcctcgagatgcattaccagaaggaagggtaccaacaatacgggatcgattacttcttctacaatgccggcgacggcgacgaggacccaccacggcggccgccgtcgttgtcgctctcccgacttatcagggtaccaataccaagccgccccggctgcgtggaggtagcaccggcctcctcgtgcgccgctgcggcgacgacgacgacgacgagctcgtggtggcggcgctcctcaccgaggagtaccgcaggcgcgacacgctggagggcgccgagctcgtcgtgctccgctccggcgagtggagcgccacgccgatcgcgccgatcgtccacgacgacggcaagggcgaggagctctcctactgggagaccgacatggccgtccccgtcggcgaccggctgctgtgctacgtcgacctgtaccgcggcgtcatcctctgcggcgacgacctgttcgacgaaattcccccgcggctgcagtacgtgtcgctccccgtggaggcccccgccggcgcgttcgacgaggagcacttcgaccgccagggcgacaactatcggcgttgtctgctcaacactcgaaccgtcgtctgcgccatcgacggcggcggcgccgcgctcaaattcgtcgacatctcctcccgctgctgctgcggcagcctgggcaagcacaccacctgcgaccgttcgagccgcgccttcgtcatcagaacctggacactgaggatcgacggcgacggcgacgacgacatggcgtggaccatggacgccatgatcgacgccgccgagcttggtccctcgacgcctactccgccctcccacggagctttccactacaccccatagtgagcatggatgatccaaatctcgtctgcctcattgtggacgaagaacgcaaacggggtgcacattacgtcgccgaagaggtggtatggaagatcatgatggatacaaggagcaaggcactagtgtcggtttggcgcggcgacggtcggtgccattggcgacagccacatggatacacttgtattcctgtcaaaatccctgactgctttgctacctatgtgagttatagcaaagccacgacaatgttgccagcgatggtcgacaagataccaattgcaacaccaactgcaaccggaactggcactaatttgtcgcaatctttgccatccgagtcatctccccaaagtctgtatgtgttaatggcttctcctggggagatcttggtagcacttgaagagatacctgggttggattgtgatgatttgctaacagcttatagcattctttgtcgtgacaatggccgtctattcaaagcccttatggggctcccaatgagtatgaggaagaaattgttgctgatagaaattaaggcttatctaaactgtcatgtctgctctacatgtacaacatgatcatgatatattggaatgtcttttgc

SEQ ID NO: 22651 - DNA, 899 bp, Oryza sativa
  ref <308>: DATABASE ACCESSION NUMBER: AK072818
  ref <309>: DATABASE ENTRY DATE: 2001-12-06
catccatgacctttgtccttgcgttgccggcggcggcggcggcggcggctacggtggccatggagatctcacgcgaccatttgccggtgaggtcggctgctccgcctccgcctccgcatctacgcctgattgatccccacccctatctccactgactgtgctatcgcgtttccggcggtggttgatcgaggcggtagcccgtgcggcgcgcgagattccgcccgtccacggatttccggtcgccatcgccggggttcgtcttctccggccagcccctcgccgcgcgaacctgcgccggccgacctcggccaggatctggtcgggatcgcttgtgggggatgttgagttgtaagaagaccagatgcatcagctctgatttagtgattttagaggcatgtataaccagtcaaagagcagcaaaagaaatgcgtcatagctgtgtgatacataactttgccaggagatctctctatttaagcacacagactgctatggcattgttaaacatttgctcagtttctcttaaatgcatttctgctggcataagatggtagcatggtggaggttctgttgttaaaccctggtatcaggacttgatcaagcagtttggtacgttcggtgaaaattcatgcacatttgagcgatcgtacagtagtctgaagttggtgttttctatcctccggtaattatggatcactggtataacgaggaatcaacctaacgtataattgccatggtctgtatttttgtatatgtggagactggtgtgtgtactaattttctggaatgtcatgtaatcagaagagttgtttagaagaggcataggcaaattctcttgtaaggcttttgtagttccttgatagtttaacatggttataacagtagtgttttctatgacg

SEQ ID NO: 22652 - DNA, 1517 bp, Oryza sativa
  ref <308>: DATABASE ACCESSION NUMBER: AK072819
  ref <309>: DATABASE ENTRY DATE: 2001-12-06
gcgcttctcttctcccccattccgcacgcctcgcaaggcgaagggaggggagagagagagaggaggggacgagaccgcggcgatggtgatgcagcaggtgcaggtgctgaaggaggtctccgccctcctacgaggcaaggagacccccgtgattctcgacctggaggaatcgcttcgggccaagggcgacatgacccagggtgaggaggtcaagatctatgcaagtaaggtgaccgcggtcctgtgcaaggccttcgccaccgcgacgtccgctttagtcgggtatcatgttctcggtgtcggagcaaaattattaggcaatccacctcttcctcggataccaagaattggcatggctgctggcagtgcatggattgttggaaagtttgcatattataccgccttgcaagcaagtcctattttcattttggaaggtggagaagagcgcatgaagatggagctagctaacataatacttactaagcataatgatgaaaagacactggttgaagctgtaaaacaacacttctttgctgagcatctgtttagtgatcagtatcaagatatgccacttttcaggtggcgtctacgccatacttatgttgacagcacttttatggaaagggtgaaggagatcgaagttaagaactcaagtaatgggtctggttcaatttctggacacagaactacaaacactagatcatttggagacctcatggaggatccactggcttgtatacttggttctccagacggcgacatagaaaacaagaagtctgcggagaacacgggtactattgtgaagagaagggaggtgcgagctcatagaagaagtcaccggcatcatcatcgacacactgacaaagtttctgcccaatgatttgcgatacatatatcagagactgagaggtgtgaaattgtgaatgctggtaggattgtccatcggacttccagtcgcaggcaaccgataggagtaggttttctgggatgaatatcagcgtccacgagcaaaatgaatttcatagggatgtttgatgtttctgccatgtctgggaagtttctgtttggcgcattttagcgttcaacttctccaaaaacatgtgtatatggggttgcaatttgatcgttgcaaattgcctggaacctaatgtgcccgtctgcagttctgcgctggtgcatttacgcattacagccttctagttcaactgaagcatgtgtttacctttgttcttttcctggttgaaaaatgcttcatgctggatgggtcgatataaaactgttcaagaaattgcccctgtgattaccatgggacagtgagggcaaggtgttgattaaacatgaacatctgaaacttggacatgcagcatgatgctatactctgagaaggcgataaaatacgagcgcttttcggcctgctgtaaatgaacgatatgagtaaattgtattggtggtacataaacttgttagttgggtgtaatttagtacataaacttgtaaaatgcttgtttcagtacacg

SEQ ID NO: 22653 - DNA, 1156 bp, Oryza sativa
  ref <308>: DATABASE ACCESSION NUMBER: AK072820
  ref <309>: DATABASE ENTRY DATE: 2001-12-06
gaagaagcatctggaggcgcacgcacctcaccctccctcctcccatggcgccgcccttggccgccgccgccgccgccgccgcggccgtatcctcctcctcccctctcttttcctcctcttcgtcccgccccctcccccgccgccatctgcccccgagctccgtctccctccggccgcggcgccgctcgatcgccgcggcctccgctgctgtcgagtccgccgggaggccgcttctcgaggcgcgcgatctcgtcgcctgcgtgaaggagaacgggcaggagatcctcagcggcgtcaacctcaccattcgggagggcgagattcatgcgctcatgggtcaaaatggctccggcaagagcactctcatgaaggttctggctgggcatccagagtatgaggtaactggtggtaccgtgctctttaagggtgagaatttgattgatatggagccagaggaaagatctcttgcgggcctttttatgagtttccaagcacctgttgagattcctggagtgaacaattacgattttctgctcatggcattaaatgctcgcagagagaagaagggtttaccagcattagagcctctccaggtttatccaattatagaggaaaaggttaatgccttgaatatgaatgcagagatccttaaccgtgctgtcaatgaagggtttagtggtggtgaaaggaagcgcaatgagattctgcaactctctgtccttggggctgatttagctcttcttgacgagattgattcgggattagatgttgatgcactcgaatatgtagctaaagcagtgaatgggatcttgacaccaaacagctctctaatgatgattacacactaccaacgtctcttggatcttattaagcccagctatgttcacatcatggaaaagggcaagatagtgaagacgggtgacagagctttagccaactacattgatgagtctggctacaaagcgattgctactgcgtagcatggagccatggagaaaggtcgtgttttgtttcctcttctttttttgttcttatttttgagcaattttgtttcctcctatacctgaatagttttctcatgtacttacattgtgaacagtatcagtaataccgcctgattaaagagaataataatgaaaatatgttttagattggt

SEQ ID NO: 22654 - DNA, 2211 bp, Oryza sativa
  ref <308>: DATABASE ACCESSION NUMBER: AK072821
  ref <309>: DATABASE ENTRY DATE: 2001-12-06
gaccacttcccacatgctcgaatcgaagtaaatcgtgtgtagtagttttgagtagaatggcgctatgctatgctatgctacgctatgctacatcgtgtacttccaattgattcacagctcgcacgcttcaatctttgtagatcagtggtctgtttcactgctgtgagaaattgcgtgtggttttgcaattcatcggtgcttttttccccctttctttctaggttttgtgtatccaccgtctacagtcaccatggttggcaagctaatgggggattggaatataaatctctttttggtagttctttttttgtatgattgattttggcatgtctgtttgccatcaccttttttttttaattaggaccaccaatgggtagggttgttggtattaaactcgcaccatatcaaatcatcatgttatctttctttttcaagtattctggactcgtggcctgcttgaaggaacaagggaacttctagagggtttcctctctcaaaaagctgttttttttttcataagtgagagcagttaaaccccaaatcttgttgaaacgattaaacttgccaaagctctcctagagactggattaatttctcatggttctgttcagtatcaaagtcttcaactaaaccgtaacactgaacttgagattttttattttttatttatttttctgagtaagagatattttatatgaagttactatgatgtccatcaaatttgaacacatccagacttgtaaatttcttggtctcgtctctacttttagttaacgcagaaaatgacaattcacagttattacttgctttgcaggaattctaggaatggcagcaaactaatcttctaacctcaggcagtccatgtttttgaggtgattctgtgacatgtgtgctaccttaagtaaaacaagctacgttttcccttccgtatggatctcctaatttgttcacttggtagctttaaactggatgttattgcaaggttgccacatgcaaaacttattactctagagcgggagaatacaaacttattgttctttgttattcgattattgcaataagaaatatatggaaattgcagtaggtgcgctctgcaaaatgatgatgctttatgatatatccgatttcaaggagctaggaacacaaaaacatcgctttgtaatttaccatctccaatatgttctaacatccacaatttgttgtattgctaataaattgaccagctcatgtagaatacgttaccatttcagagctagtacccacctgataagcattccttttccactaggagataagctctctattaatttgctaccctttctgcatcacggcccttattcccgttgggcatatcttttatgtggttgatataagctcatagcttttgaagtactgcataggatactgactccagaagaaactaccagccaaaataaggcaggacccaccagctttagaatataaatccccatgcttatctaatcttcaggaggattgccacttctctttcctgtagacagtctgtgataattttgttctcttcttgttggggtcttggggaaaggagcaaggaggaggaggagaccaagaacacggagtgaaagggagagggttctgttcttgcttcttaggccatatggagatccagcagcagaagggggttggcaattccaaagttgtgaaggttgagaaggaggagtcatgggatctgttcgtcaatcaagcaagcaacgaaggccaccctgttgttgcccactttggggcttcatggtgtgtgacttcgctgtccatgaactacaagtttgaggagctagctcagacacaccctgagatactgttcctctatgtggatgttgatgatgtccagagtgtttcgtccaagcttggagtgaaggccatgccgacattttttctcatcaaggacaaggaggtggtgaacaagattgttggtgccaacccagatgaggtcaagaagatggtggacgcttctgctgagtcctttggagttactgctcctcctgatatagtggtggaatagatatatagatgttgcctttatcttcagaaacttctctgtgaccgtgggtgcttcttggtcaggtccggaaaaatgcgtccatgtgtacattctagctttgctcctgtgactctgaatggtgtccctttgaactgataggcttgtgccttgcggtagtttgttctgcaggctgc

SEQ ID NO: 22655 - DNA, 1645 bp, Oryza sativa
  ref <308>: DATABASE ACCESSION NUMBER: AK072822
  ref <309>: DATABASE ENTRY DATE: 2001-12-06
gaatcaacgcagcgcaccttcgggcaaaagaaaaaaaggtagtaaaataaaaaaaaaagaaaacaagatcattccccgatcaccaaccgacgaaacccgcacccactcctccggccaccgacgccgcagccggcggcgcagagaggggagatccacgccgccgcgatgggccgcaagcgcgcgctcctggtgggcatcaactacccaggcaccaaggctgagctcaagggctgccacaacgatgtggaccgcatgcaccgctgcctcgtcgaccgcttcggcttcgacgaggatgacatccgcgtcctcctcgaccgcgactcctccgggacgcagcccaccggcgccaacatccgccgggcgctggcgcagctcgtcggggacgcgcgccccggggacttcctcttcttccactacagcggccacggcacccgtctgcccgccgagacagggcagaacgacgacaccggctatgacgagtgcatcgttcccagcgacatgaaccttatcacagatcaagatttcagagaacttgtgcaaaaggtgcccaatggttgcttatttaccatcgtctctgattcttgccacagtggtggcctattggacagcgccaaggagcagataggtaatagtaccaggcagaatcaaacccagtcccgtgaacgcgaagagccttctgattctggcagtggtttccggtcatttctcaaagaaactgttcgggacgtgtttgagtctgagggaatccacctccctcgtagtcgccatagccagagccactatggaggtgaggaccagtatgagacatacgctcaaccaactgatggccacactaaaaatcggtcactgccactttcaactcttattgagatgcttaaggagaaaactgggaaggatgacattgatgtgggctcaattcgtatgacattgttcaacatctttggagatgatgctagcccaaaggtcaagaaattcatgaaagtcatgcttgggaaattccagcaaggccaatcaggcgaacagggtggtctcatgggaatggttggctccctggctcaagagtttctgaaggttaagcttgaaggcaacgaggaagaagctttcaagccagctatagaacaagaggttcacagtgttgacgaggtgtatgctgggactaagacatgggcacctaacaacggcattctgatcagtgggtgccaaagtaatcaaacatcagccgatgcaaccacaccgcagggttcttcatatggtgccctcagcaatgctatccagaccattcttgcagacaagcgcggaaatgtgtcaaacaaggaccttgtgatgaaagcacggtcattgctggctaagcaaggatacactcagcagcctggactttactgcagcgatgaccatgttcatgtgtcttttatatgctgaaacatgtatcattacactttatggtgttctcttttttttttttttgtgttgagctgtgcatgagggcttgaagcttccctggtatacgttactgttgcgtgtctatggcagtaccatttaaacgctatgctttgatgtagaccatgtctatactaaaataagggtgtgactaaacatttatacataatatatgcatatatatgcaaacaaattttccttgagtttt

SEQ ID NO: 22656 - DNA, 2303 bp, Oryza sativa
  ref <308>: DATABASE ACCESSION NUMBER: AK072823
  ref <309>: DATABASE ENTRY DATE: 2001-12-06
ggacaaaccgccagaggcacctaattttggcactggtcgtccccagcagagcagatgaacaagagaggtgcctcgcaattcccaaacgaaacgaaacgaaaggaaacaaagcgatccttcttgcgctccggcgccgccgtctccccctcgcgcggttgcctgagccaagaacaggatcggaggccaggccccatgcatgcatgttaattagtctgtcactgatcacttcatcccattagccattagctgtttctcatccagacggacgcgccatccaacacacatcgatcgatcggaggttgattggccggccatgacgacgacagccgccggcggagccaccctgtgcgcggcgagggaggagcaggagctcctggccacccgcctgaatgtgatcggcatccggccgccgcattgcgccgcggaatctatcctcatctacctcaccgcgccggggctctccatgatgcccatgcgggtgatggcctccgactccatcgcctccgtcaagctccgcgtccagacctccaagggcttcgtcgtccgcaagcagaagctcgtcttcgatggccgggagctcgcccggaacgacagccgcatcatggactacggcgtctcccacggcaacgtcctccacctcgtcatccgcatctccgacctccgcctcatcaccgtccagaccgtccacggcaacaagttcaggttccgcgtcgagcccggccgcaccgtcggctacgtcaagcagcagatcgccaagaactccacccacgacgacgaccaccacagcctcgtcctccagggcgaggtgctcgacgacgcccacctcatccacgacgtctgcaggaccgacggcgccgtcatccacctgctcgtccaccgctccgccaagctcgccgccaggcccgtcgaccgggacttcgaggtctccatcgtcgcgcgcaaccgcaacgccgccgccgacgctgctcaaccgacgttgcacctgcagagggacttcgccatcgagccggtcatcgtcaaccccaaggccgcgcttccgccagtgatcgagaacctggtgggcgccgtgctggccgggatggagaaggggaacgccccgatcatgtcgtcggagggcaccgggggggcgtatttcatgcaggacgcgtcggggcaggagcacgtcgccgtgttcaagccggtggacgaggagcccatggcggccaacaacccacgcggcctcccaccctcgcccaccggcgaggggctcaagaaggggacacgcgtcggcgagggcgccatcagagaggtcgccgcctacatcctcgaccaccctcccggtggccgccgttcgttcgcaggacatcatggctccgccaccgtgggcttcgccggtgtcgcgccaaccgcgctggtccgttgcatgcacaggagcttcaagcaacctgcagcttccgaacaaggtcctccattgttcaaggtggggtcattgcaagcgttcgtgaagaacagcggcagctgcgaggacatgggacctcgtgcgttcccggtgcacgaagttcacaagatctgcgtgctggacatcaggctggccaacgccgacaggcacgccggcaacatcctcacctgcagagacgaacaaggccatggcctcaccctggttccgatcgaccatggatactgtcttcctgagagttttgaggattgcacattcgagtggctctactggccgcagtgtcgggagccattcagcgaggagacggtggagtacataaggtcactggacgcggaggaggacatcgccattctgaggttccatgggtgggagatgccagccaagtgcgagcgcgtcctgcgcgtcaccaccatgctgctcaagaagggcgtcgactcgggcctcgccgcgttcgacatggggagcatcttgtgcagggagacgctcaccaaggagtctgtcatcgaggagatcatccgtgaggttgaagacgatgttggtgatgaagctgccttcctgcagtctgtctctcaatccatggatcgccgtctgggtgaattatccaagaaaaaaaaaagtaatgtaagtatacaagattaactggttgcctccctctactcatatcatagataaataacgtcaataaaaagggccaagctaaactaattaaaagggacagaggaaaaggttgtactagtgtacttgagttataaactttttgtgcagctgacaattgagtgtacatgtaatcagcagtggatttaaaggccttgagggcgtgtacccttttttttctttcatgtggtttaattatgtggaaaatttgacc

SEQ ID NO: 22657 - DNA, 1190 bp, Oryza sativa
  ref <308>: DATABASE ACCESSION NUMBER: AK099304
  ref <309>: DATABASE ENTRY DATE: 2002-08-28
gagagggggaggcgacgagacgagacgagaggaaggagacgagacgatacgcggagatccgggcggcgacccgcggaggaggaggagcccgcggcgccatggattccgaccactggatctcccgcctcatggccgccaagcgccagtacgcgctgcagcgcgcccagaatcaccaccacgccaccgccaccgccaccgccaccgccgcgtcgcactcccacctcgatcggtatgggtacgatgatgttgagccagaggacgaggtacggccagacttcccatgtccttactgctatgaagatcatgacattacatctctttgtgcccatttagaggatgagcacccctttgagtctaaagttgtggcttgcccggtttgctcggctaggatttcaaaggacttattggatcacataacccttcagcacagctacctgtttagactgcagagacatcacagattacgcagagttgctgttcctagcaaccatgctctctcccttggagggagagatctacaggagacctacttaaaggttcttcttggaaacagtagtcgaagcagtggtaccaatgcagcaagttcagtcactgattcactactatcttcacttgttttaaatttatcttcatccgaagccgaagatacagcgaaattttctgctctagctgtggtagaaaataattggtttaaaagaacactgccttcaaagacttggaaggcaagctctgattctaatcttagtcaggaagaaagggagagaaggcggaggcgagctgcagtgagatcatcttttgtacagcacctgcttgtctctaccctttttgatgactagcagaagaaaaaaagagcagctccgtgcactggaatctcgagtgggccttttgtccacacatttctggatgaatgatgaagtaaagcatcttccaaatcctgaagcagttcatccaaccggaggctggttcctgatcctttcgacattgatgatgaaccgatgtggctggcctcttacttgtcatggaagcagttctgaacatttatgttcgaaatccaattcagattgctaggctatcgactagcgttactgtattgattgtgttattccatatgatttcattatgtgcttaacaatacaatgaacattacccccaatttgattcttactataaacatttcaaaattgaattcc

SEQ ID NO: 22658 - DNA, 1151 bp, Oryza sativa
  ref <308>: DATABASE ACCESSION NUMBER: AK072824
  ref <309>: DATABASE ENTRY DATE: 2001-12-06
ggtggatcctttgggtgggtcagatcgaacccgcagaacaccgagctcgctctcgcggcgtctcccatggcggaagccgacgcgcaaacccagagccgcgcccactcctcgacggcggcgccggtggcgggggagacggccggcgaaccagtcgggtttccccagaatggcgctataaatggggctcctttgatgtttccggtgatgtaccctatgcttatgacgggtatgcatcctcagcagagcctggatgatcaggctcagggtccagggatctatgccatacagcagaatcaattcatggggagtactctcatgccactcacttacaggattccaacggaaagtgtcggtgctgtggctggtgaagagcaagcacaggatgctaggcaacaacatggccctcagagacaagttgttgtgaggaggtttcactttgcttttcagcttgacttggccctgatcatcaagttagcagcagttgtctttctgtttagccaggaaggatcaaaacaaaggctgtttcttctcatactgtttgcctcagtgatttacttatatcaaactggcgcaattacacctttactaagatggctgcagcgagcaggaggtgctgctgctcgtcctccacaggctccagctcgcccagagaatcgtgctccgctagctgcccagaatgatggcaatgttcaaccgcctgggggaaatcttgcagacccagcaaacaatgaccaagctgcagagaaccaggaaccaggggcagcagctgctaatgagaaccagcaagaagtcgatggagaagggaacaggcgcaattggcttggaggcgtctttaaagaggtccaattgattgttgtagggtttgttgcatcacttctccctggctttcagcacaatgactagagctaatcccatcactgcctaatcttccattggcaatgtaactgtttattgtgagataggcgtgaacagaaaaatggtacaaagcagcacaaagaagagtttgttatagaacgaaaaatggtggcgttgttaatattgttttcttccaagtgctattgttatattttgtttctaatgcggcatgagtatatgacttgctgggagttaccactttcactatctagaataatatgactatatatgactcg

SEQ ID NO: 22659 - DNA, 1667 bp, Oryza sativa
  ref <308>: DATABASE ACCESSION NUMBER: AK072825
  ref <309>: DATABASE ENTRY DATE: 2001-12-06
gacagagcccagatccaccgaccactcccccagatccaccccccaccggcggccgtgcagcggcggcgtcggcggccatggagaagccatgcaccctcctggtccacttcgacaagggctccccctccatggccaacgagatcaaggccgacctcgagggcagcgacgtcgccgccaaggtcgacgccatgaagcgcgccatcatgctgctcctcaacggcgagaccctcccccacctcttcatcaccgtcgtccgctacgtcctcccctccgaggaccacaccatccagaagctcctcctcctctacctcgagatcgtcgacaagcgcgacgtcgcctccggcaaggtactcccggagatgatcctcatctgccagaacctccgcaacaacctccagcaccccaacgagtacatccgcggggtcacgctgcgcttcctctgccgcctcaacgagcccgagctgctcgagccgctcatcccgtccatcctcgccaacctcgaccaccgccaccacttcatccgcaggcacgcgctctccgcgatctccgccatctaccgcctcccgcacggcgaccagctcctccccgacgcgcccgaggtcgtcgagcgcgcgctcaccggggagcaggacgcgtccgcgcgccggaacgggttcctcatgctctgcgcctgcgcgcaggagcgcgccgtcgcgtacctgctcaccaacgccgagcgcgtcgccgagtggcctgatctcctccagatggctgccgtcgatctcatccgcaaggtctgccgctcgcccaaccgcgctgacaagggaaggtatatcaagattatcatctccctcctctccgcgcccaacagtgccgtcgtgtacgagtccgccggcgcgctcgtgtcgctgtcgtcggcgcccactgccgtgcgtgctgctgccaacacctactgccagctgctgtcgtcgcagagcgacaacaatgtgaagcttattgtccttgaccgcctgcacgagctgcgtgcctcgcaccgtgatgtcatggtggatgtggtcatggatgtgctgcgtgcgctatctagcccccaatgtggatgtcaggaggaaggtgcttgatttggtgcttgatctgcttaccccccgaaatgtggaggaggtggtgatgtacctcaagaaggaggttgttaagacacaggccggggatctcgagaagggtggtgagtaccggcagatgctggtgcaggcgatccattcctgcgctgtcgagtacccagaggtggctggatcggtggtccacctcctcatggacttccttggtgacactaatgttgctgcagcggttgatgttgttttgtttgtgcgcgagatcattgagaccaaccccaagctccgtgtgtcaatgattcagaggctgattgatacattttatcagatccgtgcatcccgtgtctgctcatgtgctctctggatccttggggagtactccctttcactatctgaggttgagagtgccatttccaccatcaagcagtgccttggtgatctgccattctacactgtctctgaggaaggagaatcaactgatgcgtcaaagccagcccagcctgtggtgaactctgtcacagtatcttctaggaggcctgttgttcttgcagatggtacttatgccacacagagtgctgccac

SEQ ID NO: 22660 - DNA, 928 bp, Oryza sativa
  ref <308>: DATABASE ACCESSION NUMBER: AK072826
  ref <309>: DATABASE ENTRY DATE: 2001-12-06
gtgggggagaaaatccaataaactaaactccaccccccccccccccccaacgcggcttcccccaccgccatctcctccgctccctccccggcgacgagcaagcacaccgccggcgccgcggcggagatgaaccccttcgcgaagaagcccacgccgcgagaggcgatccggagcagcaaacgtgagctgacgaatgctaccagaggtattgagagagatattggaacgttgcagctagaggaaatgaggctagttgctgaaatcaaaaggactgcaaaaactggcaatgaggcagcaaccagaattctggcccgccagctggtcaggctaagacagcaaatttctaatttacaaggtagcagagctcagattaggggcattgcaacacatacacaggcaatgcatgccaacacttcagtggctgctggcatgcaaagtgcaagcaaagcaatgggagctttgaacaagcaaatggatccagccaaacagatgaaggtgatgcaagaattccaaaaacagtcagcacaaatggatatgacgaatgagatgatgtctgactccattgacaatatcttagacgatgatcaagctgaggaagaaactgaagaccttgcaaatcaggtcctggatgagattggtgttgatattgcctcacagttatcctcagctcctaaaggaaggattactggaaagaaggttcaagctgatgaaagttcagaattggacgaactcgagaagaggctggctgctctgaaaaatccatagaagagggaacttctctgtaacccaacattttacacaaagacctgctctgtacctacatttcaaattcgtgatacgaaacaaaatagtacatttgcacctgtaaatatcggatggttgatacttcaactatgtgaagatggatgtgtatcaacctgacaagccc

SEQ ID NO: 22661 - DNA, 2584 bp, Oryza sativa
  ref <308>: DATABASE ACCESSION NUMBER: AK072827
  ref <309>: DATABASE ENTRY DATE: 2001-12-06
gttaattttcatttgcgctgtgtctggtagatgctaaggaaatcatcaatgatgaagcaaattcgtaccatgcaacaagacattctagtgctggaaataaaggaatggttctcccttttgtacctctttccatcacctttgaagacataagatatagtgtagacacgccagaggcatttaaagcaaaaggtatgacagagggtcgactggaactattgaaagatatcagtggttcttttaggcaaggagtacttacagctcttatgggtgtcagtggtgcgggaaagacaacactgctggatgtgttggctgggagaaaaactagtggatatgtacagggtagtattaccatctctggctacccaaaaaagcaagaaacttttgcccgaatttcaggatattgtgaacaaaatgacgtccattcaccaaatgtaactgtctatgagtcccttatgttctccgcatggcttagattacctgttgaaattgattctgcgacaagaaagatgtttgtttatgaagtcatggagctggtggagattctctccttaaaagatgcactggttggattacctggcgttagtggattatcatctgaacgaaggaaaagactaacaatagcagtggaactagttgcaaacccatccattatatttatggacgaaccaacatctggacttgatgcacgagcagcagccattgtgatgagagcaataagaaatacggtggacacaggaagaaccgttgtttgcaccattcacccaccaagcattgagatatttgaatcttttgatgagctcttcctaatgaaacaaggaggtgaagagatttatgtaggtcctataggacgacaatcatgtgaattaattaaatattttgaggctattcaaggtgtcagcaagataaaagatggctacaatccttcaacatggatgttggaagtgactagtacaacgcaggaacaaagaacttgcgtggacttttctcaaatatacaagaattctgagctatataggtaggtattgggtagtgctttaattgttgtcccattaacatagcatctatgtgcaaagccaactttctagtatgtacagaatatccgtgatggtatgtgtaagaagtgggttctactaatgataaaaaaaggaaataatgagacaatgtagtggcgaaagcaaaaatatttcctatatgaattgcagaaagcgatgaaatcataatatcaaactggaaatgcctcaaatttattattcttccacaattaatgtttccatttatgaaaatggtaataggaaacatcattggtttcacaatgttactagtttgctttcattacaggaggaacaaaaatttgattaaggagttaagtgcacctcctgaaggttcaagcgacttatcatttccaactcaatattcacagctttttcttacacaatggttggcttgcctatggaagcaacatctatcgtattggagaaatcctccttatattgttgtgaggtacctcttcactattgtagttgcactcttgttcggaaccatgttctggggtattggcaaaaaaagacaaaatcaacaaaccttgttcagtatcatgggtgccatgtattcggcatgtatggcaatgggggtgcagaactctagttctgttcagccagctatctttgttgaggcgcacgatcttttacagggaaagagcatcacacatgtactctgctttgtcgtacgccttgggacaggtaaagttggtgggcatcataatcatttggtaaatatatgcatgcgagtcttgataaaatgttttaacatactattatttttttatacaaaaccaaggctctcagtaagtggaaaggaatggtgaaacaaaaagccttcttgacatctagtttcattgcaggttgcaattgaatttccatacatttttcttcagaccataatatattgtgtgctagtgtatgccatggtagggtatgagtggacatgtgccaaatttctttggtacctcttcttcatgttcttcacactatcatacttcacattttatggcatgatgatggcgggtttgactccaaacaatgccatgtctgctgttgtttccacggcattctataacatatggaaccttttctcaggatttctaataccacggattgtacgtataccagcttttctcaagtatctaattgtacattgttcgtggctaaattatctcacatccactaatttttctaatatggctccgtttactacagagaattccagtatggtggaggtggtactattggatgtgccctgttgcttggacactcaatggattgcttacatcacagtttggggatgtaaatgacaagtttaataatggcgtgagtgtatctgactttatcgagagctactttggttacaagcaggacttgttgtgggtggccgctgtggcagttgtctcctttgctattctctttgccttcctttttggactctcacttaggctattcaacttccagaagagataagtaaggaagaccatgtcgagtttcagactttgatcaaatattggttatcatagatgttttacagtatgtgc

SEQ ID NO: 22662 - DNA, 2272 bp, Oryza sativa
  ref <308>: DATABASE ACCESSION NUMBER: AK072828
  ref <309>: DATABASE ENTRY DATE: 2001-12-06
ggccttcgctcatagcaatcgcctcttcgcctgttcgccgcccttccagccgcgtctcttgttccgacggacaacggtgccctaacctacccagccacgctacgtcgacggcgtcgtgctcggtggcagccggcggcaaatctcttatctatccgttcagttctaggagaccaggaggatttagggatccttacggtgcagctgtgcaactagagcagtgaatagtcattttttctagttctcagtttgtgaaatcatgttgcccaaaaagcacgcatctggaagtgagaaaagaaaaaagaagagaaggatagaggacttgatacaattgcaaaaaggagctattaataaattttttaagagtaatacaagcacttcaagaaatcctgatgagtgggcaattgttgctgtggaggaacaaactatgcatccagaagatcaaggccctatagaggataatgtcggcatcaacacggatgataataatgtgagtgatcatgagcccatatttaattctcctacgacggagtctactcgtgttgatgatgaaccaatttttacatttgatatgtatgatccagtaaattgggataatcttgataacaaagcaagggacatattagtggagaaagggcctattagagaaggaaatattgtgtttcctttggatgtcaacacaagacatttttcgtacactcattattctagaaaaatgagcaatggagaggtacgtgataggaaatggttggtctattcaaaaagtgttgacaaagtgttttgcttttgttgtaagctgttcgattctagcaaccgcaagagttcattggggcatgatgggtttagagattggaggcatgttagtgagagactaaaagagcatgaagttagtgtggaccatatgaccaacatgaactcttggaatgaattgagagttagattaagcaaacatgaaacaattgataaggagttgcagcatcaaatcacgaaggagaaagaatgcataagacaagttctattcagactagttgccattatcaagtttcttggtaaacgcagtctagcttttagaggatctagtgatcaactttacaatgatgtgaatggtaatttcttagcttgttgtgagatggttgcagaatttgacttggtaatgcaagaccaccttaggcacattcaaaacaaagagctgcaatatcattatcttagtcataaaattcaaaatgagttgagttctcttatggcttctagcattacaagctccatcataaagattgttaaagcgagcaaatatttctcggttatccttgactgtaccccagatgtgagtcaccaagaacaaatgagtttgttggttcgatgtgttcatatgtctgatgggaaaataaaagttggggagtactttattggtttcttgaaggtggatgacacatctggctcgggtcttttcaatgtattagttgactccatcaagtcatttggccttaatgttgatgatattagaggtcaaggttacgacgatggctctaatatgaaaggaaaacataagggggtacaaaagcgtttgcttgatataaatccaagagctttgtatatgccatgtgcttgctatggtcttaatctcactctttgtgatatggctaaatcatgcagaaaagctatttcattttttggaattgtgcagaggatatatgtattattttcaagttctaccaaaagatggaatgttttgcttgaccatgttaaagatttgactgtgaaatcattgagcaatactcgttgggagagtcgcatcaaaagtgtcagggctattagatatcaagctcctcaactaaggtcagctttgttgtggctaagtgagggtagagatactgaaccaaaggacaggagtgatgcaaaaaatttatatgacgtgcttggcagctttgagttcatacttggaatggttatttggcatgacattctatattctgtaaatattgtcagtaagaagttgcaatcaccatccatgtgcattgattctaccttacagcatatagaaggtatggtgagttactttcagagctatagaaataatgggtttgctgatagtctggttgcagccacagaaattgcacttgaaatgggagtagagccatccttcccagtagagcgtcagtctcaaaggaagaaacaatttgatgaaactgagtacaatgaagctattttgcaagctgagaaggattttgaagtcaattattttttagttatggttgatatggcaattagttcattg

SEQ ID NO: 22663 - DNA, 916 bp, Oryza sativa
  ref <308>: DATABASE ACCESSION NUMBER: AK072829
  ref <309>: DATABASE ENTRY DATE: 2001-12-06
gagtagcaacattggcagagacgaggaagagaatgcgagcaagtgccagggcatcatcatcatcatcggcgtcaatggcggcggcggcgcagcgcgacgacgtggagtcacggcgtgatggtggtgagaatgagaagcggccgctgctggagaagcgatccgccggcgacggcggcggcggcagcggcggaaatggcatgagcccggtgcagagggcgatcagccagacgtaccagagcacggcgcacctggcgaagctgctgccgacgggcaccgtgctggcgttccagctgctgtcgccgatcgtcaccaaccaggggcactgcgacgtcgaggccaaccgcgccatggcgggcgcgctcatcgcgctctgcgcgctctcctgcttcgtcctcagcttcacggacagcttccgcgacgccgccacgggcggcgccgtgcggtacgggttcgccacgccggcggggctctgggtcatcgacggcggcgcgccgctcgacccgcaggccgccgcggcgtaccggttgcggctactcgacctggtgcacgccgtcgtctccgtgatggtgttcgccgccgtcgcgctgttcgaccagaacgtggtgtcgtgcttctacccggtgccatccgagggcacgaggcaggtgctcacggcgctgccgatcgccatcggcgtcgtcgggagcatgctgttcgtgagcttcccgaccacacgccatggcatcgggttcccactctcgccgcgctaatatttagtagaattctgcctgcacgtacgcctatatgtgcatatcctcgtcttagttctttggaccattaattgcatgtaattaaattgtgacacgaacgaacacactgtaaagctgatcacggccccaatgggctcgcaaggagtcgatgcttacaagtttaactt

SEQ ID NO: 22664 - DNA, 2252 bp, Oryza sativa
  ref <308>: DATABASE ACCESSION NUMBER: AK072830
  ref <309>: DATABASE ENTRY DATE: 2001-12-06
gactcacaaatcgatctctctcctgccatcttcagatcgcatcgattttctccttttcgagtttttttccccttcgcttgagagctttcgacgagagcgagggagagggagatcatggccggcaagggagacgggccggcgatcggcatcgacctcgggacgacctactcgtgcgtcggcgtgtggcagcacgaccgcgtcgagatcatcgccaacgaccaggggaaccgcaccacgccgtcgtatgtcgcgttcaccgactccgagaggctcatcggcgacgccgccaagaaccaggtcgccatgaaccccatcaacaccgtcttcgatgcgaagcgtctcatcggccggcgtttctctgacacgtcggtgcagagcgacgcgaagctgtggccgttcaaggtgctacccggccccggcgacaagccgatgatcggcgtgcagtacaagggagaggagaagcagttctccgccgaggagatctcgtccatggtgctcaacaagatgaaggagacggccgaggcctatctcggaagcaccgtcaagaacgccgtcgtcaccgtcccggcctacttcaacgactcccagcgccaggccaccaaggacgccggcgtcatctccggcctcaacgtcatgcgcatcatcaacgagcccaccgccgccgccatcgcctacggcctcgacaagaagtcgagcagcgtcggcgagaagaacgtgctcatctttgacctcggcggcggcacattcgatgtctccctcctcaccatcgaggagggcatcttcgaggtgaaggccaccgccggtgacacccaccttggaggcgaggacttcgacaaccggatggtgaaccacttcgtgcaggaattcaagaggaagaacaagaaggacatcacgggcaacccgagggcgctcaggcgtctgaggacggcgtgcgagagggcgaagaggacgctgtcctccaccgcccagaccaccatcgagatcgactccctctacgagggcatcgacttctacaccaccatcacccgcgccaggttcgaggagctcaacatggacctcttccgcaagtgcatggagcccgtggagaagtgcctccgcgacgccaagatggacaagagcaccgtccacgacgtcgtgctcgtcggaggctccacccgtatcccccgcgtgcagcagctgctccaggacttcttcaacgggaaggagctctgcaagagcatcaaccccgacgaggccgtcgcgtacggcgccgccgtgcaggccgccatcctcaccggcgagggcaacgagaaggtccaggacctgctcctcctcgacgtcacgccgctgtctcagggcctcgagacggccggaggcgtcatgaccgtgctgatccccaggaacaccaccatccccaccaagaaggagcaggtcttctccacctactccgacaaccagcccggcgtgctcatccaggtgtacgagggtgagaggacgcggaccaaggacaacaacctgctcggcaagttcgagctctccggcattccgccggcgcccaggggtgtcccccagatcaccgtgtgcttcgacattgacgcgaacggcatcctgaacgtctcggcggaggacaagaccaccgggcagaagaacaagatcaccatcaccaacgacaagggccgtctgagcaaggaggatatcgagaagatggtgcaggaggcggagaagtacaaggcggaggacgaggagcacaagaagaaggtcgacgccaagaactcgctcgagaactacgcctacaacatgcggaacaccatcaaggacgacaagatcgcgtccaagctgccggaggccgacaagaagaagatcgaggacgccatcgacggtgccatcagctggctcgacagcaaccagctcgccgaggccgaggagttcgaggacaagatgaaggagctggagggcgtctgcaaccccatcatcgccaagatgtaccagggcgccggagctgacatggccggaggcatggacgaggatgctccggcggccgccggcggaagcagcggaccagggcccaagatcgaggaagtcgactaaatgatcgatcttttatcgcttttagttatacctgcaataatttgtcgttcgttttacaccgaattcttgagtgctcctgcaacttttttggtacgggctttcattatggccccggttttgctttacttgttaaagtttggattattatggttttattaatatagtattgagtagcaatttatacc

SEQ ID NO: 22665 - DNA, 1844 bp, Oryza sativa
  ref <308>: DATABASE ACCESSION NUMBER: AK072831
  ref <309>: DATABASE ENTRY DATE: 2001-12-06
gggctggcctagtgtagtgcgcgctgtactgttcccacgtcgcgtcgaggcatcggttcgagcgagcgcgcgcgcgacgcgggcgaggctccggctcgattccgtcgccaccctgtgacagcagcagccaccgcccaccgccgccgccgctttctggaggcttcccgttggctcgtggttgcggggggactcgcggagtcgcggttgcgagttggctgcctgctactctgctagtgtgctaagcctgccttttagttagtctgggagcacgctactgctactttccccaatccaatccaatccaatccaatcctcgccggcgttggttcgctcgatcggcgcggcgcggatggagacgctcaggaagcaggccagcaagctcagggagcacgtcgccaagcagcagcaggctgttcggaagcagttcagtgcacgctataaccaggatccttctcttgtcgatgaggcggaacttgagtgccaccagaatcttcagaggctatacaacagtacaagagctgctaaacatttccaacgaagtattgtacgaggtgtcgagggtttcattgctgtcagcaccaaacagatggagattgtgaaaaagctagctgaggattgttgcagatatggaaacgacaatcaaaattttggttttattcttgcaagggcttcagttgagtttggtaattcccatagccaaatggagaaagagcgggagaatcttcttaaatttcttggagagcaggtttttgagcctcttcgagaaatgataatgagtgctcctcttgaagatgcccgcctgttaacttaccgttatcaacggatcagacaagatatggaatctcagatagctgatgtgatgagaaagcaactgaagtccaaggagagtagcggtaatgcagataattctgtgaaactgcaacatgcagaatcaaaattatctgagctccgaactacattatcagcattaggaagagaggcaactgcagctatggaggctgtggaggttcagcaacaacaggttacctttgaccgtctccttgcaatggttgatgctgagagagcttatcatcagaatgctgctgatattctgaacaaacttcacgacgagatggtccaagcaaaacaccatgatgagccggaaaaccattatgatgagacatcatcagatcctaaaacagctgcaacacatgagcattcacgtagcacatccgaagatcacatatttactaatactagtgaacctacaaggactgaaaccagtgaacctacaaggactgaaactagtgaacctacaaggaatggtcaggaagtgcattatgttggagaggtaatccatccattcgatgctcaggctgatggcgagctcagtatttccgtgggagattatgttgtggtccggcaggtggctcccaatgggtggtctgaaggggaatgcaaaggaaaagctggctggttcccatctgcctatgtggagcagagggacaaagccccggcaagtaaggtgatagagcctggattgctgactacttaatctctctcatactaatagttgctttcatcgccctgtttcccctgtacatggggtttttcttgagtgaatagcattttgtagaacttctacctttctgtgcatattcatgtgcttctaggcttgctgttacccaataattgtatgtaaaatttattgttttgcctttagcatctcgttttctctttctttcacaatgtatagagctattggtcctgggatgctgtaaccttccctttcttttgtggaaagcgtgcttcctgccaaaattgtgagatggatttcagaacagtctcactggccttgttccttc

SEQ ID NO: 22666 - DNA, 1312 bp, Oryza sativa
  ref <308>: DATABASE ACCESSION NUMBER: AK072832
  ref <309>: DATABASE ENTRY DATE: 2001-12-06
gcccgtctcttctctcccgctccttgcgccatctcgcggctgaaccggggaggggcgccgatctctatccgacgagcagaccaagggaggggaggggatcctgggttcacccaaatatttgaagacccaagcgtttggtgattggcaaagatgggttgggggatatcccggttgattggactgaaagcagctgtgttcctctctgtggcttatttcttccatagattggacatgacactgctttcttttcccctcatatatgcctctgtgattgcgatgcttgtttctattgcttcacatccatcaattgaccttcctttgctccttggcaaggggtcgaatggaagctttcctgtgtggtcatggatcatgttctcaccatttcttcttttcatccatctgtttgttctgttacgaagatttgtgaaaaatgagcccttgtacactgagattgctgatggagtgtatgttggagggtggccctcttcagttgagcgcctgccccctggtgaacctgcagtcatagactgtacgtgcgagctcccaagaagctctactatatccgagaattcatatttgtgtgttgccacctgggatacaagggctcctcaaccatcgcagattgagtctgccgtgagatgggcactgagaaagcgttcgcagaacaaagctgtatatgtccactgtgcctatggccatggaagaagcgtctgcgtgatgtgtgcacttcttgttgcattgggattagctgaggattggaaagctgctgagcaaatgattcgtgagaagcgaccttctattagcatgaattctcttcatcgtaaaagtttagaggaatgggcaaaacacttgctcactccctcaaaaagaagtggggaatcagatgtgagttatgcgattctttcggatcatacccgaaaaaggcattgatctcgcaagaaaactaacttgctcagtggctgtgataattgagatgaagtttaaatgctctggcattatctactgttatcctagtcatgtccaaggcatttcattctctaagttaattgtttgggagtatgttgtaaaacttctactactgtggcttacaacgccagctcttttaggcgctctgttggctgcgtttgttgccctgacttgggattagggttcacagatggaatttcgcgaaaaccaatcggatttcttgaaactgctaggtctcggtttatgaaaaccggaccagttttgtaccgcattgaccgaaagtcatcggtttttaccggtttttggtcggatttcggtaaaccggtgaggagcggtttttacttcg

SEQ ID NO: 22667 - DNA, 1476 bp, Oryza sativa
  ref <308>: DATABASE ACCESSION NUMBER: AK072833
  ref <309>: DATABASE ENTRY DATE: 2001-12-06
gacccggtctatacatgcaaaacgagccagcaagcgtccctggtccccttccatctgaactccccactggcctgtctccaatcttgagcagttctctcttgcaaaactttaaaagttggaagaagcctttgagagttctgcactctgcacgcacagacaaacgccacagagcggctgcagctaatactagcgcgaaacttctttgacccgaagaaacatccccaactgctaggtatcatggtgaaggaggaggagatcatcacagaggcagcaggagcaagaggctacatggagatgcttgggcttggagaggaggccgccgactacctgatgtgcctgtctccttcttcctacctgtcttctcctgctgcttccaccaccacagctgtggcttctcctacctgtgcctcgtacttggctcctcacccttaccaccacctgctaagcttcagtggtcaggatcagtaccacggtgatgacgtctttgggttacagtattacggcggcgatcaagtaattccggcggtggttccgcagaagtccagcccgaccaccgagtgctcctcctccgtctcctccatgtcgtcctcgccgacggccaccgccatttccagctctaagtcaccggccttcaagaagaagggatcgagaggttgtgatcagaggaaggctactgctcctgctgctgccacaaccacaaacaagagacccagggtgaggagggagaggctcggagagaggatcatagcgctgcagcagctggtttctccgttcgggaagtctgatacggcctccgttcttcacgaggcgttgggatacatacgcttcctgcacgaccaggttcaggtcctgagctcgccgtacctgcagcgcctgcctccctctgctcgcgtcccggagcaggagagaggcacgccggcggcggaggagcaaccgccggcgctgcggccgagcgacctgaggagccgtgggctgtgcctggtgccgatctcgtgcaccgagcatgtcgccggcgccggcgccggcaccggccacggcaacggcgccgacctatggtcggtggcggcgggcatggcgaaggcgacggcgaccgtgacggccgccgtggagaggagcaaggaggcagccgccgccgccgccgccactgccgcattgctgcgtgctgatcgtccagggcagcagctggcctaatctgatgactgccatatactctactctactccactttcttcacagctgcagggttttagaactaagccagatcttttggggggctaatctgttttagaaatcgactagtactaccttttgctgttcttttggagaggctgctgctgagttcatgggaaattggaaagtggcgcagggatgcacattccatcgccagcaaagaactgaagtgtgtaaatggagggtggggttttagctgattaaagtacaagtactaatgctcctgcttaagctttttttaaggtt

SEQ ID NO: 22668 - DNA, 843 bp, Oryza sativa
  ref <308>: DATABASE ACCESSION NUMBER: AK072834
  ref <309>: DATABASE ENTRY DATE: 2001-12-06
gaccgcaacaactctcggcagcacatctcccctcttcttcctgagtactctgggccaatctgccgccctccgccgcacgcgccatccgatggaggaggcgcaggccgccgtgatggcgcacctggaccaggtctcgggcctcgtccaggcgctctccgccgagctccgccgcgggatcggccccgccgccgacggccttctcgccttcgtccgcgccgtcgactggacggaaccatggctgatttgattgatggtattccatgcgactctgttgctcacggccgtcgggttgaggaggaatgccaatttccagctcttcatgctgtttcttgcctattcaggagtttatcttgctgaaaagataaatagctatatggcagagcactggaagagcattgccacacgaaattacttcgaccgcgctggagtttttgtttctgtcgtctggtcgggtccccttatcttcatatctatggtcattgtggttagctcccttattacattatgtcggttgatggcgaaatggaagagagcagaactaaggcatcgggctcagcttgctcgtgacaaacaggattgactgaaaggttccttagtctggtagaagaaatgattagagacatgcgtcttctagaattgtaactgttggtgtttaatcacctgatgtttttcagttgcttgctgctagtaacttactgcgtcggttatattctggtgttcatgaactctagtaacagctaaaaacagaaatactagacccagtatctgatttcatcatgttttggttcagtagccacgaacatggatgtgtaattttatttaaaatcgattgtgataaattgc

SEQ ID NO: 22669 - DNA, 1421 bp, Oryza sativa
  ref <308>: DATABASE ACCESSION NUMBER: AK072835
  ref <309>: DATABASE ENTRY DATE: 2001-12-06
gactccgctctcacagtctcacgcacgcacgccagcaggcggcacgcaacgcctcgcttcacggcctcggctagagagacgcgtgcacgcgaacgcagatgaagcccttgctgctcacgccggccgcgcggctcgcggccgcggcgccgtcaacgctctcgcggctgctccgcctacaaagcggtcgccaccatgcgcacgcctcctcctcctccaaccgcctattgccccctctcctccgtcctcctcgcgacggtttccgcggcggccgcctcatcgcctcctcctcctcctcctcctctcagatggcggcgcctgccgatgcaccgggcggatccgcggacgcgttcgaggtgatccgcgctcaccaggaaaaagctgctcgacttcctccggttgaagaaatacggaccattctggaccaaagtgttaggggtgtccttgccacccattctcagggtcatgttggctatccgtctggttcaatggttgattttgcatgtgatcaggatggttcccccatattagcagttagtagtttagcaattcactcaaagaatctctctgaaaatcctaaatgctcgcttctggttgccaaagaccctgaggacagaacagatactgtgattactgtatatggtgatgccacacctgtttcagaccaagaaaaagatgcagtacgaagtgcatacttacgaagacatcctgaggcattttgggttgattttggtgacttccgttttctgcacatcaagccaaaagccgtgcgatatgtgtctggggttgcaactgccatccttggttctggagaattcagtgctgctgagttcaaggaggcaaaagtggacccaatatctcaattctcaacccctattacgagccacatgaataaggatcattctgatgatacaaagctcattgtgcaatactcaaccactgtcaaggtggactttgcttacatgcttgatgtggatagtcttggtttcaatgtgaaggcgggctatgatggaagtgttctgaagctgcgtatccccttccctaggcgtgcacaggacaggaaggatgttaagacacttattgtggaaatgctccaagctgcaaaagcctcatcgtcttctgctgaatgaatgtcctgttctagaaagggacgtctttgtccttgtaaatgaaataaagatgtccttttcgatgagttttttctgatctaggaaatgtcatgtttttacacatgatatatcacaatgccacagcttaacaccgaacagatgccaatctacttgtatattatttacactgaaacgctccaccgtgtgtacatttcttacttgtcttaagtcttattggaactttggaagtctgcagatgcagctaccatcatctctcataaatgctagcgaaatgtgtttttgggatagcatttc

SEQ ID NO: 22670 - DNA, 1304 bp, Oryza sativa
  ref <308>: DATABASE ACCESSION NUMBER: AK072836
  ref <309>: DATABASE ENTRY DATE: 2001-12-06
gtccgccactccatcgcgcgcggaggccaagcgcctccggcgccgccgccgcttcctcccggcggtgctgcctccaggcgccaccgacgcttcctccccacggcgctgccccaggtgccgcctcttcctccccacgctgcgccgcccttcttcgtgccaccgccgccgcctctccgcttcgcagcgccggcgccgactccacctcaatacgccatcaccagtcgccctagcccccacgtccaccttcacagccgccctagccccttcctccgccacccgcaccagccaccctagcccccagtcccccacctccgccacccccacctccacctccaccaccccacacctccgctgcttcctcgagctcagcctccccttaccccttcacccccaatcccttcctaaaaaatcagggaagtgttcaagagcctctaagcaagttatatgggtattgaatgattgaagaccacgggtgttcgcatgcagcaagacaacatcatttgaaaggaagacatcaagaattagcccaccatgtgaagaacaagaacttgctattgggagtcatgatagtgatattgaggctgactgtgctcatttgcaagaagtgcttttcaattacaatgaaaacattgtgcacagaagagttgtacaaaggggaacttcacgatgtgtttctgtcactccaagaggccgcacaacctcttgcaatgaagatgaaagccttgttggcaaggatgttatactctatgctgtcacaagaaatgatgtcccagtagccaaggcaacaattgtctcaacgaacccaataacaacagtgggaggtcaagctcttggagtccaatactatgaggtggttgtgaatgtggtgttaaagagggacaccgtgcttccttgtccatttcgtattaaaactatggctgatgcgtaaatgctgtctattgcatggccaaataacaaaatcagggcaaacaagaggccaggtatctcccaatgcggaggtggaggttctggaaggacatagaggtggaccttgtcttatgttgacaacaagctatggaggatgaccttgttttgggggcaagacaaggtcatccttttgtaatggagtttgctacagaggcgaacttgttgggaaatgccaacatactgcatgtaatggagtttgcttcaggatagatatggtggaacttggatgaaatgtaaatcttttggacacctgttgtatctatgccacatgcgtactgcatgcatgtatgcttgaattaatctgtgaatgaattaaagttagtcactattttgatttg

SEQ ID NO: 22671 - DNA, 2083 bp, Oryza sativa
  ref <308>: DATABASE ACCESSION NUMBER: AK072837
  ref <309>: DATABASE ENTRY DATE: 2001-12-06
ggtacgacagcgccctcccaaccatctgctctctctaagctctagctctacctttcttcctcctcgatccatccatcatcgatcattcttcttcttcttcacctagctagcttgctcccgccagacggttctaatataatgaaccatcgctagctagttcatcccatcgtacagtgcactagtatagtatatggaggagtacgtgaccgcgggaagcactactcctccgccccatcttcaccagctgctctccggcaccggcgctggaccaccaccgtcgtctcacgatgacgcccatcctcaccctcatcctcagctgtttaatttcaattacagagcagaagaacagtgcccgcgcggcggctgcggcagagacttgagcaagaggtgagtgagctgaagaagcagctgcggaacgaggaggcggtgcatgatatcctaaaccgcgcccttcagcactcaaacaccaccaaatcatcatcatcattgtcgtctccatccgtcctccacaacatccctgcattcatcccgcacaaggccaaggagcttctagcagagctggtgctggtggaggaggagattgcccgcctggagacccagatccgaagcatgaagaaggcggcggccaccacaactacccagaatgcaatcaacctcacccacgacgacactgtcaatgccaatgttaatagtggaggatctgcagcaggagatcatgccaacatcaagtccatgttcttcatcagtcaggccatcaacggcctcgacacaagccgccatcatcatcctctcatgaccatcgtcagcaataaacctcccactcccagtccaaagcttaattcactcgatgatactagtagtagtagtaacaaaaagaagaagatggtgcagcagcccaacaagctgtcggagaggatcgtcaagtgcctcatctgcatcttcatccgactgctcaggtcctcgagggtcgccgacctgcagctgcagcagcaggacaacaacaacaacaacgctagtagtaggtcctcttcctcatcgccttcactgaccaggcagcatcagggaggaggaggaggtggaagcttcagaatcgacaccagcctgttaatgaacaaacagcagcagcagcaggattgccggtcggggcagcaggatcactacggcatcttcgccatcccggattccatcgtcagagatataggcccctacaagaacctcgtcagcttcacttcctccgctttcgacctcagaggattctccacctctcccctgctcaccaagctcagggggatgctggaggcactgcagcatgtggatttgaggtttctcactcaccaccaaaagcttgccttctggctcaacatatacaacacctgcatcatgcacgggattttgcacaatggactaccctcaaaccctgaaaagctacttgcactgaagaacaaggccacgctgaatgtatcagggcaaaagttgaacgccttggtgatagagaatttcatcctcagacagccatccagtgtcaaagaagaattctggaaatgcgaggtggatgtggaagaacagcaggtgaggagtcgttacgggctcaacagctcagaacccaacattctgttcgcactctgctgtggcaacagatcatctcccgcgctacgaatatacaaggctgatcgtgtgatgatggatctggagaaggcgaagctggagtatctgcaggcatcgctggtggtgacatcgacgaggaggaggctgatgatcccaagcctcatacactccaacatgcacgacttcgcaaaggacctggactcgcttgttcgctggatttgcgaccagctgcccacgtcctggtctctcaggaaatccatggttgattgcctcaggtggtccggacaccgtctcaacatccatcacctcgtcgacgtcattccatacgactacgactttcagtacctactcccaatgtgaactgattccatctctgctttctttccttttttgccggtatatatgtatgagtattaattaatttgttttgcggagaccatcttaattaatctatggctatccaatgatgttatctacg

SEQ ID NO: 22672 - DNA, 3149 bp, Oryza sativa
  ref <308>: DATABASE ACCESSION NUMBER: AK072838
  ref <309>: DATABASE ENTRY DATE: 2001-12-06
gggttttgcgcgataaaagggggggcatcgaggagggactcggccgcatcgccaccgccactctctcctctcctcctctctctctctctctcgcaccaccgttctcttccgccgctgcggctcacggctacgcagctctcttcccctcctcctcggctccgctctcttcgatcgatctagggtttggtcttctgttgggggattgttgttgctcttccgcgcgatcgatcgacgccgcgtcctgagggtttgaggggtttccgccctcccgccgcacgcccgcacccccgcgatgtccggccggagctcgccgatgtacgaggggctcgcgtcgcgtcccgacgagtgggacgtcgtcctcaaggtgaagtatggtgaaactcttaagaggttcggtgggtatgtgcaaggaccacaattcagcctgaacttatccgctctccggtccaagattgcatctgcttttaagtttggttcggatgtcgacttcattctgacttacactgatgagggggatattgtcatgctggatgatgatgatgatctgcatgatgctgctattcatcagaaactgaaccccctcaggattaatgttcagttaaacaacagccacactgcagcacctcaggccaaacagcaggattcagataatatacctctcaggtccaccaccactgaagacccactagctcatattaaatcagttatcgatgaggttttgaagccgatatctatgaagtccatccaggagccagttcctgagacacttgcgaagctgtcccatgaagtacttgaagccgcatcaccacaattagctgagctaataaaaccttttgttaaactggttacaccaagcaacaacaacccatctaatgggcatgctgatggttcctgcagctcctcaactggtttgccccaaacacaggttgatcccaaaactaatgacgagcccaaaatagacacaagtttggggtcgcaacccttggacacgcagaactccaaatcatctggtgctagaggtcttaagactctgtcagttgaggctcctgctacatcgggtgttaaatcttctcaaggtcaacaggcatcattatacccttccattgaggagttgctgttctccccctttttaccgaactcaggtgatgacaaatctgccagcaagggaattagtgatgctcaaagcaagggaaaatctgttatgacctctgctacaccacctacccctcctgctgctcctgctttccgtccagctcctccaattccatctctgaatgattggtctcagccaccagcacgtggatcgacattttacccatctatttggcagtctgaagctgatccaaaagccaatagtgattccagatggcgtgttccattgtgcagagctggccatccattccaaccccatgctcccctgagccgtccacccccaccaatgcctgcaccaatgagctatggaccttctccacattttccttaccctggccgcctcttgtcctctggccatctgcatggagaccttggtaataacattgagaactcaccagcacgcacattccatagatggattcagtgtgatggttgtggagtgcaaccaattgttgggcctcgatacaagtctaaaacaaaagaagattatgatttgtgtgatgcctgctttcatcgcatgggcaatgaggtcgagtacaccaggattgacaagccactcttaccccagagattactgagagaccctacattgtgtcgcaagatccattcacgggctgcgatgaagtcaaagcgggagaaacttgaaagtcgcttcattttggatgtaactgtcctggatggaacattgatggcaccttcaactccgtttactaagatttggcgtatgcataacaatgggtctatcatgtggcccttgggcacacagcttatatgggttggtggcgaccagtttgcactgcagacctatgttccattagagattccagtggacgggtttcctgttgatcaggagattgatgttgctgttgattttgtggcacctgcaaggcctgggaggtatatatcttactggaggttagcatcaccttctggccagaaatttggtcagcgtgtttgggttcacatccaggtggaggatccttcttttgtcagtaacaacaggactgccgctataaacttgaatttgcccccagaaagcaatatcacaaacacaagtagtttgattgatgtcaatattgagcctgtggatcaagtcttcaaccaacatgtcaatagcacaaacaaggagttacttgaacatttgatacaccaccagattgacgagcccaagaatcctgagcctgctccattacctgtgcccattgtttcttccacaacatctcttcaccccatcattgatgttgatgttccctccagttcaactgctgctgcttttgtgcctgtctttgatgagcctgcgcctgaacctgctgtgactcctgtgcctccaactgttaatgtgcctgctggtaatgcacctgcgtctgttggtgcatcatcatctgatcatcatggcattgacaatctcacagaagagaaactgctgaaggaacttgaggaaatgggttttaggcaggtcgatctgaacaaggagatactcaggcagaacaagtacaacctggagcagtctgtcgatgatctctgtggcgtcagcgaatgggaccctctcctggaggagttgcaggaaatgggctttgaggacactgagataaacaaggagatgctcgagaagaacggaggaagcatcaagcgggctgtgatggacctcatcgctagggagaagaaagaccagtgaagatcgtgtgctcttgagccatccctatctataacctaactatgtgtgtatatgcgtaaataatgtgacgaggtgtaaggctagcgccggccgccggggctgctgctacagtctcagggcctgcttgcttatgaactgtgtgtggtgttgtgcgactggtatatttgtcgcggagatatgtgttaagtgcgcgtgcgcgcctcttaaaaagcggttaccttgccaggtaaactgcgtgtaattactatgggcttagctgctctatgcctcttatctactgctgtgactggaacttgatggattaataagatctatgttgcgt

SEQ ID NO: 22673 - DNA, 1899 bp, Oryza sativa
  ref <308>: DATABASE ACCESSION NUMBER: AK072839
  ref <309>: DATABASE ENTRY DATE: 2001-12-06
gagtttggggttcagttcaaccccccatgcccgcctaaccgccttccttttccgcacttaaaacctgaaacagtgaactttttgtgcggggaattttagtgtgaagtttcaatttggtgttacctgttttggttgaatgcatcagttctgtaaaagtgtgagttctaatagtataattgctctatttgatgatgtggattgcagaaggaaggatgagtaggcgctggagcaggacaatttatgtcgggaacctcccgggcgacatcagggagagggaggtagaggatctgttctacaagtatggacgcattgttgatattgacttgaaggtccccccaaggccgcctggttttgcttttgttgagttcgaagatccccgtgatgctgaagatgcaatccgtggacgggatggctataattttgatgggaaccgtttgagggtggaacttgcacatggtgggagaggtaactcttcctcctttaacaattctggtggagggggacgtcgtgggggtgtatctaggcatacagagtatcgcgttctggttactggactaccttcttcagcatcatggcaagacctaaaggaccatatgcgaaatgctggtgatgtttgttactctgaagtgtaccgtgagggtggtggtactataggaattgtagactacacaaactatgatgacatgaagtatgctatcaggaaacttgatgattctgaatttaagaatgccttctcaaaggcctatataagggtgaaggagtatgatggaaagcgcagccgttcatactcacgaagccgaagccgaagtcgaggtcgcagctacagcagaagcaggagtccaagcaagtctcccaagggaaagtcatcacgccgttcagcatctagatctcgatcgagatcagcttcttcccgttcaagatcagagtcaaaggggcgctctccatcaagatgaggatttgtgcggagatctagggattgcataatgggaaatcgaggttgggatttcttctatatgcaacagttctattggttgtctgagaatcagagcctgggcctaagaattgctttgggacactggagctagagcattaaggattgatgctatggattatggtggcgcaatgactgtgtttgcttggattgagtaaatgaggaatgagtttctcgcttgctctctcgttgggatcactttggaggaatgttctagcgaatatgtcacgtaacatttgacactaaacactctgaatgttttgaacttaaggaatttgttctcttctaatttctatgagctctttttgcttgcatctggccattccaatgattgggaggcgtgaaggctttttggaagcaaactgttaaagctgcattctggaatctggatattgaatcgtgttatttctggaactttttgcagatcaccagcaagatctcagtctccaaatacttctcctgccaatggtgatgcagcaagccccaagaaacgcagcccaagcaggagcccccccaagaaacgtagcccaagcaggagcccatcacgttcccgatctcctgatgccaagtccgaatgatgctgatgtgcttctggggacggagtgtcgaggaatcatggtcctgaaacgttttgacatctgtcgccctcgactacttctgaatcgcttccaaagtactatttcatacgttcagtgctctttcagattactggatgatactgtacgcctatttatagatttgaacttgggatttgtcttttgttcattttgacactgtacttgacttaggtatattattgtggtactggtaagaaagttgaacagagtcattccgtcgtttgtttgcttaatgcacttcctagctcaagttgcaggtaataaatacatttatatccactggatcatgcc

SEQ ID NO: 22674 - DNA, 2306 bp, Oryza sativa
  ref <308>: DATABASE ACCESSION NUMBER: AK072840
  ref <309>: DATABASE ENTRY DATE: 2001-12-06
ggagggagtttggcagttgctcgctcgccaaactgccagatccggatcccgcaccagatgcgcccgacggcgatgctccgatggcccgccgccgcggcggcgctcgcgctcgtcttcctcctcctcatcgccgccgcgccccccgccgcggccttctacctccccggcgtcgcgcccaacgacttccagaagaaagatccacttcaagtgaaggtgaacaagctgtcatccacaaagacacaactcccctattcatattactcccttcctttctgcaagccagatacgatagttgacagtgcagaaaatcttggagaagttctacgtggtgatcgcattgagaattctccttatgtgtttgagatgagagagcccaagatgtgtcagatcgtctgcaaagcaaccattagcgataaacaagcaaaggagctaaaggaaaagatagaggatgagtaccgggtgaacatgattcttgacaacctcccgctagttgtgcctattacaaggccagatagggatgatgttgtttttcagggtggatatcatgttggtgttaagggccaatatgctggtagcaaggatgagaagtactttatccataaccacctgatatttttagtgaagtatcacaaggatgaaaattcagatctctctagaattgttgggttcgaggtcaaaccatttagtgtaaaacaccaattcgaagagaaatggaatgatgcaaatactcgtttgagcacatgtcatccccatgccaacaaaataataataaactcagatactcctcaagaggttgaagctggaaaggatatcatattcacatatgatgttggctttgaggaaagtgatatcaagtgggcttctcgctgggacacctatctgcttatgacagatgatcaaattcactggttctctattgtgaactctctcatgatcgtgcttttcttatctggaatggtggccatgatcatgctccgcactctatatagagatatctccaggtacaatcaacttgagactgaagaagaagcccaggaggaaactggttggaagcttgttcatggagatgtgttccgcccaccaactaactctgacttactctgtgtctatgttggcactggtgtccagttctttggtatgctgctggttaccatgatgtttgctgtcttgggtttcctttctccatcaaaccgtggaggattgatgactgcgatgctgctcatttgggtcttgatggggctgtttgctggatatgcttcttcccgactctataagatgtttaaaggatcagaatggaagagcatcaccttgaagactgctttcctgtttccgggaattgcttttggtattttcttcgtcttgaatgctcttatatggggggagaaatcatcaggtgctgtccctttttctccacaatgtttgccttggtgcttctttggttcggtatctcggttccacttgtctttgttgggagctatcttggtttcaagaaacctgccattgaggctccagtgaagaccaacaaaatcccgagacaggtcccagagcaggcttggtacatgaaccctgccttcaccattcttattggcgggattcttccattcggagcagttttcattgagctatttttcatcctcacttcaatctggcttcaccagttctactacatcttcggcttccttttcctcgtgttcattatcctcatcatcacttgtgcggagattgcaatcgtgctgtgctacttccagctctgcagtgaggattacatgtggtggtggaggtcctatcttacttcaggatcatctgccatctatctcttcctgtatgctgggttctacttcttcaccaagctgcagattactaaactggtgtcaggcattctgttcttcggctacatgcttctggcctcattctctttcttcgtgctcactggcacaattggtttctgtgcctgcttgtggttcacgagattgatttactcatctgtgaagattgactaggcgcagagttgctatacatccggcttccaatagttctgtatgattattgtggagaattgtgagacgaggatcagaatccactttgtattttgccgattttcaagaaaatttatatcgtagttcttagtttataaaccacttatgttcattcactataaatgagatgatacatctttgatatgaggttatataaggctaattacgattgttaatttcatatggcagagcatatttctcaattcttatggaccactgtatacattcattttattatatacggttaccgaatgctactgttctctgatc

SEQ ID NO: 22675 - DNA, 1728 bp, Oryza sativa
  ref <308>: DATABASE ACCESSION NUMBER: AK072841
  ref <309>: DATABASE ENTRY DATE: 2001-12-06
gattcacccctttttccccacgctccggtggctccacgccgccccgcccgccgccgcgaccacccgttccaccggcgaatccgcggatttaatctcccacagctccccgtgagatcacaaagaccgggcgggcgtgggctgtgggctgggatggtgggcgacctctcctccctcctcgccgccgcctcctccgcctcccccgtcgtcctcgcgccatcaaaggagctccatggcgtgcacttgccgatgccgctccaggggaagaggccgccgctgcagccgcaggacgctgccgtccacatcgaggccgccgccgccgccgccgccgccgccttccaggggcaggtgatggtgcccggccacgcgcatgccggcgctcccgccgccttccaggccttcgctgtgcccgacatggccgcgctcatcgacgtccaagactctcaccctgactcagttcaacttagccttgggattgccgagcaatgctcaaggcaggagaaaatcctgaaatttctaaggtcagggtccgatgtgaaagaacttgatgtatctttactgactgaacttacggggcatcaaactctgccaatcaacttgggtactcaaccatacatccctgatgataagttatcagctcttccaatcagcatggccagtcaaccatatatccctgacgataagttatctatctatgagtttgaattggatgagccccagcagtatctaccagaaaatcaacttgtcatccctgatcctcttgtggagtttttccagtcccatggttctgcccttaccatagatcaaaacaggagaatcctcttcaatggaaatggagatgatatgagatatttactttcgattgtcttggcattcaatatgtctaaacgagaaataagcagttgcaagacagcatatctagttccatattttgaaaggaaaaggcgatcccgagcaagcagccatgcatccaattcaaaattagcaagcacagcagttgatgcttcaaaaagcactgcaaatgggaagtcaaaatcttcatcaaggaagaagcagaagagtaaaaatattaaagaacgtgacctgtacccgaagaactatttccatgctagtgaagcatttttatctatgctcctggacaaggacaatagcagctcaacaattcattcactgaaaaaagctggtcctgagatcagtgaactgctgacaaaatgctctattggcatcgctggaactggcttggctgttcttctctcagttgtgtgcaagatggctaccggtatgaagagtcctattgctgctacgcggctggtgaacactggtgttggacttgggctcttttggctctcctgggcagtaaacggattgcgagacacaattactagcatatttagaagcccaggtgacatgaacttgaaggacgaagaggttgcagtcaggatacaaaagagcatgaacgacattctcttcagagctatcactatattggcaatcactgcttttaagtttgcgtaagtggttacatactaatttaccttttccccgacccacctgtaatatataatccaccattttggttcaggagtacagcactagtgcttctgtaggattaagtgccaattgagcaaatgatccccggtaattttgtagaaaatgagaaaccgttgtgaactgtacagaattttgctggcagcttggtgtatatgaaagatgggtttttttcttatctgt

SEQ ID NO: 22676 - DNA, 2259 bp, Oryza sativa
  ref <308>: DATABASE ACCESSION NUMBER: AK072842
  ref <309>: DATABASE ENTRY DATE: 2001-12-06
gacgcgctcgcttcctcttccccccagccatcggcgacgcgaggacgcgacgcgccccaccaaccaccaccgcctccgccgacctcgccgccatgctgtccgcgcgcgccgccgccaccgccgccgccgccgccgcctccccgctgtggaagcgcggcgagggtggcagcagcgggagcgggagcggatgcacgagctgcagggaggtgcggaggagggccgcggcggtgagggtccgtgcggcggcgccgaggagggtggaggcggtcgcgatggagtccgcggcggagaccgagaagaaggaggaggttgcggcggccggcggcggggttgaggacatggctaccgaggaggtgcccgtcacgccatgggccttctccgtcgcgagtggttacacccttttgagggatccacatcacaacaagggccttgcctttagtgagaaggagcgggatgctcattacttacgtggccttcttcctccggcagttgtgtctcaggatcttcaagtgaagaagatcatgcataatcttcgccagtacagtgtacctttgcagcgttacatggccatgatggatctccaggagaggaacgagaggctcttctacaagcttttgattgataatgtggaggagcttctccctgtggtgtatacaccaacagtaggtgaggcctgccagaagtatgggagcatatttagacaaccacagggtctctatgtcagcttgaaggacaagggaaaggttcttgatgtgctaaggaactggccagagagaaacattcaagttattgttgttactgatggtgagcgcattttggggcttggagatttgggttgtcagggaatgggtattcctgttggtaaactttctctgtacactgcccttggaggagttcgcccgtcagcttgtttacctatcacgattgatgttggtacaaacaatgagcaattgttgaatgatgaattctacattgggctccggcaaaggcgtgctactggcaaggagtaccatgagctcatggaagaatttatgagtgccgttaagcaaatctatggtgagaaagttctgatacagtttgaggacttcgccaatcacaacgcatttgatttgcttgcaaaatacagcaagagtcatcttgttttcaatgatgatatccagggaacagcatctgtggtccttgcaggtcttttatcatcactaaaggtggttggtggaaccctggctgaacacacttatttgttccttggtgctggaggctggaactggtattgcagaactcattgctcttgagatttcaaaacagacaaaggctccaattgaggagtgccgcaagaaggtttggctgctggattcaaaggggttgatcgttaactcacgaaaagaatccctccaggcatttaaaaagccttgggcacatgagcatgaacctgtaacgacactgttagatgctgtccagtccatcaaacctactgtgctgattggaacatccggagttggcaaaacttttactaaagaagttattgaggccatggcttcctttaacgagcgacccgtcattttctctctgtcaaaccccacatcacactctgagtgtactgctgaagaagcatataattggagccagggtcgtgcagtatttgccagcggcagtccgtttgaccctgtggagtacaatggaaagatacatgtgccaggccagtcgaacaatgcctacattttccctggattcggcctcggtgtcgtaatctctggagctgtccgtgttcacgaggatatgcttctagctgcctcggaaacactagctgatcaggccactcaggagaactttgagaagggatcgatcttcccgcccttcacaaacatcagaaagatttctgctcgcattgccgcaagcgtggctgcaaaagcctatgaacttggactggcgacccggctgcctcaacccagggatctggagaaatacgcagagagctgcatgtacacccccgtataccgcagctaccggtaacgccgcggaggtcaaattttgcagtaataaaacctaccaatgcagtaggggatactgctatgttgtgttgccattgtcgccgttggccgttgctgctgcaaggcattgtatctgtctatataaatcacctgttgtaacgttatggaagcaatctccatgtgtaccaccagtgtttcattctttgatcgattataaagagtgcaataagaacatagttttagctcccattgtaatgggcagcatatctcc

SEQ ID NO: 22677 - DNA, 1237 bp, Oryza sativa
  ref <308>: DATABASE ACCESSION NUMBER: AK072843
  ref <309>: DATABASE ENTRY DATE: 2001-12-06
gctctctctctcttctctcttctctctctccataaacctcaccattggtgttcttttaatcggtgagaaagcaagtgctccaagaattgcaaaggggagaggagagatgagagagtgaagaacaactacataactaaagcatctctctctctctcctctctctctctctagaacacaagaacaatttaacgattactagctagtgttcatcaaaactgaacttggacaagaaatttacctaaagttagtattccacgatgagctttcttgagcaggcaaccgagcggaaggcaccaccgccggcgaggctcggctccatcaccaagctgacggcggcatcgtcgtccttcgccaacctcttctccaccttcctcgggccagtgagctcccccgagccgaggccgaggcgcagcttcgacggcggcgccaccggcgtcgggcttggcatcgtcgcggccatgagccacgcctgcctgacgaccgaggccgagccgatcgccatcggcgcggcggctcggcgccgcgcgagagaggaggccgagctctctgagagctacacttgcgtcatcacgcacgtcgccggcgtcgatggcgccagcggcagcgtgaggaagcgggtgtactttgggttcggcgacggtggcggcggctggcttgtggaagccgacgaggagccggcgccggcggctgacttcttgagccggtgcttcctgtgtgacaagaggcttgatgggctcgacatctacatgtacaggggggagaaagccttctgcagctccgagtgcaggtgccaccagatgctaatggacgaccatgcagacaactgtggatctgaagccctcaaggccaacgactactcggcctcgccgcactctgcgccattgcccttctccctcagcgtcgcagctgcctagtcgatcgaataatcgactgcatgatgtagcaccgtcaggctgctcttcaattctgtagcagcaaagaaatatatagagagaggtcaaagagatcatttaattaagcggatgaaacatataaagagtaatcactagaatgcttcttaactgtggcttgaataaaaaaaaatggagaggattctcacactaaagaaacagattaaacagatgaagaaagttttgagattatatgctcaccgcaagacactggaaacttcgtgcttgcaatattatgtacgagcagaagtaattagtaaaggaatttgatgttatgttctcttctg

SEQ ID NO: 22678 - DNA, 1049 bp, Oryza sativa
  ref <308>: DATABASE ACCESSION NUMBER: AK072844
  ref <309>: DATABASE ENTRY DATE: 2001-12-06
gggtggaggagcggaggcggaggcgaacgcgaggaggaagacgaagatgaggaagaagctgggcacccgcttccccgcggcacggatcaaaaagatcatgcaggctgatgaggacgttggcaagattgcactagctgtacctgttttagtatcgagggcccttgaattgtttttgcaagatttaattgaccgaacttacgaaattacactgcaaagtggtgcaaagacattgaattccttccacctaaagcaatgtgtgaggaggtacagttcttttgacttcctaactgaggttgtcaacaaggtaccggacctcggtggcgctgactcatgtggagatgatagagcattacccagaagaagaaaagccttgccaaatggaagtgacccagagaatgaggaatctcgatcaagcaaaatggccgtaagaagtgcaaatatcagtcccagaggacgtgggagaggtcgaggtagagggcgaggacgaccacccaccaagcggaaggaagttggttatgtacaatttgaggatgagagcagcatgtttgctgatcagggcgaagccttaccaggagaggagacggttccagagaccatccatggcaccgagagcgtacctccaagcacacaccctccagcagaagccccatcggcagcagagataccagctccaaatccaaaggtggaagaagcgaaaaacgacgaccatcagccggattggcctatgccagatgcgattgggaacatcggtgtcggaccatccggttttggacatcttacggtgcaagttgacgaggatgaggactacgacaacgaggattagccacggccatcttctgattgttatgcactaacagggcagttctcctggtgttgtaaaatgtaaatatgtagctgcagctagctgtgatgtgctgctgatgtaatgcagtatgtagttgtcccgtgtaactttgtctgttttccaataattgcttgctagttgcctcacattgttgacatgattgactactgaagtgttttgtcagaattaacccggtattgaagcc

SEQ ID NO: 22679 - DNA, 1284 bp, Oryza sativa
  ref <308>: DATABASE ACCESSION NUMBER: AK072845
  ref <309>: DATABASE ENTRY DATE: 2001-12-06
gagccttaaaccctagctccgcctcccacctcccttttcttttctagggttcttccgccgccgccgccgccgccgccgattccgatggagttctggggtcttgaagtcaagcctggacagactgtcaaatgtgagcctgaagatgaacgctttttgcacctttctcaggctgctcttggggaatcaaagaaaggatctgacaatgcagtaatgtatgttaaaactgatgatcaaaagctagtcattggaaccctctcagctgacaagttccctcaaatccagtttgatttggtctttgacaaagagtttgagctgtcacacacttcaaagactgctagtgtgttcttttctggctacaaagtttcccagccggctgaggaagatgaaatggattttgattctgaagaagttgaagatgaagaggaggaagaaaagatcattccagctcccagggcaaatggcaaagttgaagggaaggaaaatgagcagaaaaaacaaggcaagacagattcttcagcttcaaaatcaaaggctgcagtgaatgacgatgatgatgatgatgacagtgatgaggatgattctgaggacgaagatctttctcctgaggatgatgatgatgattcttctgaggatgattccagcgaagatgatgaggatgagagtgacgaggaagatactcccaagaagccagagactggaaagaggaaagtagctgaaattgtgttgaagacaccttcgtctgataagaaagcaaagattgctacaccgtcaggccagaagacaggtgacaagaagggtgtccatgtagcaactccacatccggcaaagcaggctagcaagacccccgtgaatgacaagtcaaaggagaagtccccaaaatccggtggtgggtcaatttcttgcaagtcatgcagcaagacgttcaacagtgaaatggctctgcaatctcactcgaaggccaagcaccccgccaagtgaagaatgagacaacggatgctgagctgagaaatattggtgtcgtttgagttggttatctgaaatgaaatgaaatgctgcaaactatttggtgttatgagtagtgtcgtgacggtttatgtggtgcaaactatttagtctagaaaaaaaaaatctgtggtgcgaactgagctacaattttattcggtcaaggtcagtggagtgattggtttattttggatggaattattgttcttccctgttattcggttaattcccacgagaaaggattgataacaccacactgaattgactagctgaacaaagtcg

SEQ ID NO: 22680 - DNA, 1940 bp, Oryza sativa
  ref <308>: DATABASE ACCESSION NUMBER: AK072846
  ref <309>: DATABASE ENTRY DATE: 2001-12-06
gttgatgtctgaagtagttgcttctgcggtagttggcgaggctgtgagcagggtctccaccttcttcgtcgacaagcataaacggaaactaagtgaggaagatggcctggagaggctggagatggcacacatcagaatggaggccgctctggagatgtccggaaagtggccgccggtcacagatgcctcgctgctgcgttggaggaagaagctgaagtgcgcctccgaagagtgcagccaagtcatgaacagatgcaagcgtcgcgccatggaagacgatgagatggagcagcagatcaggcgatgctctttccccagacggatcgcccatgagacaagatcattcttctcctctttctccggcgacaagaatgttgatagcctaatcacaacctcgaccattcagaggtttgaaaggtttgctgatggcgccggtgagttcctgagattcttgcagttcggcagcataggcagcatcaactacatgctcgttgatcctctcacaggtccccttcttgccggcaaagctctgcagtttgaaaatcctcctggaataagtgggtactacctagcggcacggccactacgatttgcagagcgaggagtagtagcctgtgtgtttcttcagtacaagaaccatgagaggccagaggaaaacttcctcctcggaattttgatacgggtgacagcaagcacgaatgtggtcgggattatggccaggtgctcggagaagcttacctccaatttcaagcctgttactgaagctgtgaggcaagagctcgctcagttccaccagcgaggcttctactgcttcccgtttgttgcttctactgatccagagtactcgagaatccaccaatccgaaactcaccgtgctcgcccaaacccggcatgctgcgaagaagaacacgagcaccatggtccccgcagaagcagtgacatggttgagccgttaggtgcattcccggagccggtgatcaaattggtcgtgcaacgccatgtctctgctacacgacacaagagaacatcgtcttcttcatcatattcatgttcatgtggtcatgccaacatgggttgctcggggccgactctgctgcaggtgacggccgtcttcgcgccgcacgcctcgccggaggagctgccgtccggagccaagagcgtcgccgtcgtggcgatcgacgggagggaggagcaagcggtgcgcactaacgttggatggcgtgagatggaggagctgctgccgaacgccgtcgatcgcctgtgccacgaggctgcggcgcatgaggtgttctggagatccggccatggcgtcgcctacctgtgcgtggagaagatgggcacggagatggcaaggtgcaggccgactcaatggcgggtgtaaaggtagacgacggtggcctcaagccctgaatgagtaacgtttttgcaacgacatgaccttgagctggagagccaagcagctgtgatctctgaatttctagagttgtgggttcagggtagtcctatcctgatgcaattctcagtggtggactggattcaggccctatttggctttttctcgaacgcgcaaaaggattgcacgttaatatattagaagataagaatattcgatacacaacgcattaagccagaccgacttatgccaagagaggagggaggccctacttggtggagattctgaaaagagcaattctacggtccttaaggaggtaccatgaggtaccaaaattttagtgtaaaatttggtacatcatagtacctagataccaagaggtaccaaatttataatagaaaaaatggtacctcatagtacctactcaagaaccataaaattgctctggtatgtaaatatgagctcaacatggtgttgaagctttgatgtgtaatcggtcattttgtctgaattttgcatgcctcaccctgtttccttttagtatttc

SEQ ID NO: 22681 - DNA, 2954 bp, Oryza sativa
  ref <308>: DATABASE ACCESSION NUMBER: AK072847
  ref <309>: DATABASE ENTRY DATE: 2001-12-06
gtgctagccaacgcccgcgcctaggcatcaccgcatcacgcatgggcgagcacgctacgtacgccgctgctagtgctaagtgcaaggtagcagctggctagctagcagcggcgacgagccgtcgtttgggtgcgcgcgatagaccaatcgatggagggggagaagacgacgatgacgaaggtggtggcgccggtcgagcgggtggtgttcgagctgaacggtgagcggcaggaggtagcggcggcggacgtggagccgtcgacgacgctgctggagttcatccgcaccaggacgccattcagggggcccaagcttggctgtggagaaggtggatgtggggcttgtgtaatccttatagccaagtataatccaaagacagatgaagtgactgaattcaatgtaaactcatgcctaacacttctttacagtatacatttctgttcaattattaccactgagggtctggggaataccaaagatggcttccattctatacagaaaagaatgtccgggtttcatgcctcccagtgtggtttttgcacccctggcatgtgcatgtctattttctcctctcttgtcaatgctgacaaatccaagaagcctgcaccaccaaaagggttctcaaagctatctatatcagaagcagaaaggtctttctcgggtaacatgtgtcgatgcaccggttaccgaccgattgttgatgcctgtaaaagttttgaatcggatgttgacctagaggatttgggccttaatatattctggaaaaagggtgacaaacacccagatcctaccaaattgccaagctacactcttggtggtgggatctgtaccttcccagacttccttaaatctgagatcaaatcttcgctagacttcaatgatgctagtatttcaggccccagggagggatggtattgtcccaaaagtatcaaacagtactataagttagtaaattctggcttatttagtgaaagctctgtgaaagtggtggttgggaacacaagtactggtgtttataaggatcaggacctttatgacaagtatattgacattgcaggcattccagaactttctgctattgtaaggaaagataagggcattgaaattggggcagctacgtcaatttccaggaccattgagatacttaaccaagaaagtgaattaacatcctctccaaatgggagtgtggttttcagaaaacttgctgagcacatgagcaaagtggcttcgccatttgttcgtaacacagcaagcattggaggaaacataattttggcacacaaatacccttttcgctcagacattgcaaccatacttcttggtgctgccgcaactgtcaatcttcaggtttcttcgaaaacactacatgttaatttggagcagttccttgagcaacctcctctggatcacaagtactttacttctgagcatatttattccacattgggcttcagactgtaagaaagagcatactttggtatttgaaacttatagagcagctccacgtcctcttggcaatgctgtttcatatgttaattctgctttcctaggacatgtttccttggataaatcatcaggtgacaatatattgagtaacctgcacttggcttttggtgcctatggaactaaacatgctattagagcaaggaaggttgaggaatacctgacaggaaaaatactttctgcatctgttgtgcttgaagcaattcgattgctgagagaaacaattgtaccggtggaaggaacaactcatcctgaatacagagtcagtgtggctgttggatttctcttcagtttcttatctccactttgtaaaggtgtgatagagtctggaaaaactctcagtatttctgaagatttggtagatactgataatgtccataacaagccattgtcttcacgacgagaaacactttctgatgatgaatatacacctgttggagatccaatcaagaagtataaagttgaggttcaagcatccggggaggcaatatatgtagatgatattcctgctccaaagaattgcctatatggagaatttatttacagcacacaacctcttgctaatgtgaagagtattaaattcaaaccttctttggcatcgaagaagatcattacagttgtttctgccaaggatattccaactggagggcgaaatattggatcaacattctggtttggggatgaagaaccactatttggtgatccaattgctgagtttgctggacaagttctcggtgttgtgattgcagaaacacagccatatgctgacatggcagcaaaacaggcagttgttgaatataccacagatggtttaaaggcaccaatcttaacagtggaacaagctgtgcaaagcaatagctatttccaggttccccctgaaagggctcccaagcaagttggtgatttttccaacggaatggcagaagctgatcacaagatcatgtcggaagaagtcaaactttcttctcagtactacttctacatggaaacacagacagcactagcaattccagatgaagataacaccatgacagtatacagttcatcacaattctctgaacttgcacagaatgtcatttccaagtgcctcggcattccattcaacaatgtacgtgtcattacaagaagggctggaggtggctttggtggaaaggtagtcagatcactccatgtgagaatctaatttattatcacactagtcttttttttttatagagaagggtatttttttacccagcctctacatccaaccagatatatacggccattgaaatagggaacttagcctcacaaacaacccaatctaaaattcgctccataggagatttgaactcaggaccttggggtactactcaggtcactgtaaccactaggctacatgcccttttgtattatcacactagtctagtaattgctatgccttactatgaagggaaatctatactgttttt

SEQ ID NO: 22682 - DNA, 1762 bp, Oryza sativa
  ref <308>: DATABASE ACCESSION NUMBER: AK072848
  ref <309>: DATABASE ENTRY DATE: 2001-12-06
gatatcagcatatcaagggagagggaatatggataggggagtcctccacaaatcatcagctctagtgggggagatgggggaaggccatggatggtggagtgtgaataatttgaggcccccctttgttgagcagcttcacaatccggcttctcttctcttgccatcctccaccaccacctccactactccctcctcctcctcctctcccctccattccttctcctccctgctgctctcgaatcactatcctcttccttctactgcgacgacaagcaccgccgccgcgccttggcacgacaccggcagccgccacggccaacatctccaggactcatggaaccatatcttacttggtggattggctagtggtgaagaggggtacaacaagaactgggaaggccaggtgctgttcccaactacaccagctgcagctgctgcagaagctgatcatgggagcaacagctacaacaacatctacagcaccaccacgactagccatgggagcagcacgagtgatgatgcttcccaattggcagtggctgcaaggccgtcgtcttctccatggggtggcatccatggccatcacccccaccacaacgccttgcagcagcaagcttcctcccctaggtcttcttgcatcacctctaccacctcccttggaagcaacggcgtgctggagttctcaaacaacacttcaccacgtgagtgcatcagcacagcatctggagcagctttcaagaaggccaggacccaagaaccctctccggctcaagctacagttaaggtgaggaaggagaagctaggtgatagaataactgcccttcaccagcttgtctccccatttgggaagactgacactgcgtctgtactccttgaagccattgggtacatcagattcctacacggtcaaattgaggctctgagctcgccgtaccttggcaatggcggcagcagcagcaatggtggaggtggtggtggaggtggctccaacagcaagctccagcatcagccagaagccagcagggtgcaaggagaaaggaacagcatatttccagaagaccctggccagctcctacatgacaatgccgtgaaaaagagaggacagcctgatcaagatgaaagctgtgaggaagcgaagacgatggatctgaggagcaggggcctgtgcctggttccggtgagctgcacggtggacgtcggcgtcgacgccggcccggcggactactgggcggcgccgccggctttcggcatagggttcggccgctagatcgatgcatggtccggtgatctctgtgggcgccatggccaatgaaatggctggctcggctggctaattaagctagctgaagaatcaatggaaatatagagatcatatcttacatattacatcacatgcatgcatgcttgcatttgggttaattagctgcataacatcaggagcagccatcctgctgaaaaggctggttcctcttgatgctatgcacgtgtatgctcatggtttgatgggtgcaacaacagagtatataactggtagtgtgtgtgtgtgtgtgtgtggctcttgtctagctagagattgatctctttgggtggattaatggattattatgcactggaagaatgaagaagggttaagttgtagacagctgccagagcgcacctatgcttgctatagcttggtgttgatcatcaaacatcagtaacacccttgtaatttaagtcttttatcttggtgaatgcatgcatgtcaccttgcttgttcacg

SEQ ID NO: 22683 - DNA, 2945 bp, Oryza sativa
  ref <308>: DATABASE ACCESSION NUMBER: AK072849
  ref <309>: DATABASE ENTRY DATE: 2001-12-06
gtctctaccctgctcggtttcttgattctctctctgcctgtcgtcggtgaatctgaggccgttactgtaccaagaacaggaggttcaatagaggggaagagattcttgacgaagcacacaaagggaggatcctaaattgatgtagcaggaatgtcgagtgggctcaagaagaagggcctggagtgggatttgaacgattggagatgggattcaaacctgttcttggccacaccatccaacgcttctccatccaagtgcagcaggagggaattgggccgagccgagggggagatcgattttggtgtggttgataagaggagaagagtctcaccagaggacgatgacggcgaggagtgcatcaatgcagcaaccacgaatggggacgatggccagatttctggtcagagaggaaggagcagtgaggacgagatgcctaggcaaggcacctgttctagtagcggtccgtgttgccaagtcgacggctgcacggtcaatctcagcagtgccagggattacaacaagaggcataaggtctgtgaggtgcataccaagtcgggagtggttcgtataaaaaacgtagaacaccggttctgtcaacagtgcagcaggtttcactttcttcaagaatttgatgaaggaaagaagagctgtcgctcacggctagcacaacataacagaaggaggaggaaagtacaagtgcaggctggtgtagatgtgaattccttgcatgaaaatcattctttgagcaacacattactcctgttgttgaaacaactttctggcctagattctagtggtccatctgagcaaatcaatggtcctaactatttgaccaatcttgtgaagaatcttgctgctcttgctggtacacaaagaaatcaagatatgctaaagaatgcaaattctgctgcaatagcatcacatactggtaattatgttgcaaaaggcaatagtctacatgactcaagaccacatattcctgtaggcactgaatccactgcagaagaacctacagtggaaaggcgtgtgcaaaattttgatttaaatgatgcttatgtggaaggagatgagaatcgaacagataaaattgtgtttaaactcttcgggaaagagccaaatgattttccttctgatttacgtgctcagatcctcagctggttgtcgaattgcccaagtgatatagagagctatatcaggcctggctgtatcatcctaactatttacatgcgcctccctaattggatgtgggataagcttgctgccgacccagctcactggatacagaagctaattagcttgtccactgataccttgtggagaacaggatggatgtatgcaagggtgcaggactacctgacattgagttgcaacggtaatcttatgttagcgtctccctggcagcctgcaataggcaacaagcatcagatattgtttataacccctattgcagttgcttgttcttcaacagcaaacttctcagtgaaaggtctcaacatagctcaaccaaccacaaaattactttgcatttttggtgggaagtatctaatccaagaagtaacagaaaagctacttgatgatactaaaatgcagcgaggccctcagtgtctgaccttctcttgctcctttcctagtactagtggaagaggattcatagaggttgaagatcttgatcaaagcagcctttcatttccctttgttgttgctgaagaagatgtatgttctgaaattcgaacactggaacatttactgaatctggtttcatttgatgacaccttggtagagaaaaacgatttgttggcttctcgagatcgagccttaaattttttacacgaatttggttggtttcttcaaaggagccacatacgagctacatctgagactccaaaagattgtactgagggctttcctgctgcaagatttagatggttgctgtcctttgcagttgatcgggaattttgtgctgttataaagaagcttctggacaccttgtttcagggtggtgttgatctggatgtccaatcaacagttgaatttgtcctgaaacaagatttagtatttgtggctgtcaacaaacggtcgaagcctttaattgactttctgttgacatacacaacatcttctgctccaatggacggaactgaaagtgctgctccagctcagttcttgtttacacctgacatagctggtccatcagatattacacctcttcatattgcagccacatacagtgatactgctggtgttttagatgctttaactgatgatcctcagcagctgggaatcaaagcatggaagaatgctcgcgatgctactggattgactccggaggattacgctcggaagagaggccacgaatcctacatcgagatggtccagaacaagattgacagcaggttacccaaagctcatgtgtctgtcaccatatccagcaccacatccaccaccgacttcaccgaaaagcacgcgagccaatcgaagactacagatcaaaccgcgtttgatgtggagaagggccaacagatcagcacaaagccaccactgagctgcaggcagtgtctcccagaactcgcttaccggcatcatttgaacaggtttctgtcaaccaggccagcagtactctccttggtcgccattgctgctgtctgtgtctgtgtagggttgatcatgcaggggccaccccacattggaggtatgagaggtcctttccgctggaattctttgcgttcaggccccaagtgatatggtagattgactgccaagcatctgcaaatacagttcagctgtatcatgcagcatggagatttctgcttcgagtctgtatattcttgtaacatagatttatcttttcacggaataactatatttgtttactactttactgtacaacatttagaattcgaaacttgcatatctagaaattccattggacaggcatcctgaccttg

SEQ ID NO: 22684 - DNA, 1699 bp, Oryza sativa
  ref <308>: DATABASE ACCESSION NUMBER: AK072850
  ref <309>: DATABASE ENTRY DATE: 2001-12-06
gaagccaatttgcgacgaaccctaaccgcccaccaaatcctctcctccttccccaacggcgagcgtccccggcgaatccgccttgacggaggcaccccggcgagctcaccttcccggaggaatcccagctcagcctcatcgtcttcggtgagggaaatatcttggtgattcttgggaaccttcagaaagaccacttaatagttttccttggcccagaagggcttgaggcttgagagctgaaaagttctgctggagctagtgctataatggccacaaaacttgtggttcttggaatcccatgggatgtggacactgaaggattaagagagtacatgggcaagtttggacccctagatgattgcgtcgtcatgaaggagcgttcgtctggtcgatctcgtgggtttggttatgtaacgttctcatcagctgatgatgccaagaatgttcttgagtgtgagcatgttctcggaaaccgaactctagaagtgaagatagccactcctaaggaagaaatgaaatcacagggatcaaaaaaggctactagaatatttgttgctcgaattccgcagtccgtggatgagtccatgtttcgtaggcattttgaagcctatggagaaatcactgatctttacatgccaaaggaacatggttcaaagggtcatcgtggaattgggttcatcacttttcagagtgcagaatctgtggacagtatcatgcaagattcacatgaactggatggcacaacagtagttgttgaccgcgccactcctaaggatgaagaagtcagatatcctccaagcaggggggcatctcagggtggctatggtgcatataatgcatacatttcagcagctaccagatatgcagctttgggtgcacctactctgtatgaccatccagggtcagcttatggaagaggaggatactatggatcctcccaaggaatgggcaacaaaaagatatttgttggcaggcttccacaagaggcaaacacggaggacctaaggcattactttggcaaatttggccgaattgtggatgcatatatcccaaaggaccctaaaagaagtggacatcgaggttttggttttgtcacctttgctgatgagggtgtggcagatcgggtagctcgcagaagtcatgaaattctaggacatgaggttgcaatagacactgctgcaccacttgagggtgactctggtggtggttacatggaacccatggatctttatggggcttatggttcaatgcgaacttatggcaggttctgcagtggtatcgactatgattacggttatggtcacagcggaagtagcagtagcagatcaagggctgattggcgataccgaccttactgagcctgctgtcttgttactgttaatgatgttttagtttacctccaagggaactgtggaaacggagaaaagaacaactccataaagaatgccaggttgtactatgttaatcttaagcgggacgggacatacgtggaatctgtatttcagttcatcctgtaaatttttctttgccattagaacgcattaatgcggtttctgtgccaggatgccatgagatcgaggcagcagtgtagttatcattattgtggaagtaccatatgtaataacaatctttcttctacacatgtaaacggtggttctggtttttgagcctctcgtgcctgatcctgctttcttgtctg

SEQ ID NO: 22685 - DNA, 4168 bp, Oryza sativa
  misc_feature (3333)..(3334): "n"=any one base of a, t, c, or g
  misc_feature (3336)..(3336): "n"=any one base of a, t, c, or g
  misc_feature (3358)..(3358): "n"=any one base of a, t, c, or g
  misc_feature (3401)..(3402): "n"=any one base of a, t, c, or g
  misc_feature (3469)..(3470): "n"=any one base of a, t, c, or g
  misc_feature (3473)..(3473): "n"=any one base of a, t, c, or g
  misc_feature (3508)..(3509): "n"=any one base of a, t, c, or g
  ref <308>: DATABASE ACCESSION NUMBER: AK099305
  ref <309>: DATABASE ENTRY DATE: 2002-08-28
gacacaacccttttccgagtctaacaacaaaaaaaatcccatctcgcttcacccatgctcctcctcgctccctcaccagcggcggcggcggccgccgctcgccggaggaaggtcggtggatcagccctccgcgtccgctgctcgagcgtgcgggaactggagagatccccgaaccctcgtccgggggagcggctgccgccgctgcgggaggcgaagcgggtggtgctggtgcggcacgggcagagcacctggaacgcggaggggcggatccaggggagctccgacatctccgtgctaacgcccaagggcgagtcgcaggcggagacctcccgcctcatgctcctctccgactccttcgacgcctgcttcaccagcccgctcgcccgctcccgccgcaccgccgagatcatctgggccgaccgcgacgacgacctcatcccggactctgacctccgcgagatcgatctctactccttccagggattgttgaagaatgaagggaaggagaggtatggagttatctaccggcagtggcagaagaacgcggccaacttcagcattgatgggcactacccagtgcgggagctctgggaccgcgcacagaactgctgggagaggatcctggcacatgagggcaagtcggtgcttgttgttgcacataatgcagtgaaccaggctcttgttgcctcttcgttgggacttggcacagagtactttcggattctacttcagagcaattgtggtgctagtgtgctggatttcacccctcaggctggtggagggcctccagctgtatgccttaaccgcttaaatcagacgccaaattctcctgttgcctcaggaagttctgcagggagaaagacaagcaagaggattatcctagcatgtcaaggagctacacagaacagtgcagagattggtgtcagtggaatggggtatgcaccgcttaacatgcttgggattatacagtctcagaagactgcagaactacttttagatcaaaaggtaaatggtattctctgtagcccacaagttgcagcatttgatactgctactactatatgcgaggttcaagaggctgcagattgcttaggtgctgactgtgtgcctcgttatgtggaaatgaagaaactgctagaactagaaattgatgatgccttccaaacaaagcaaaagagctttggagaaatagctcagtctgggtggctgggcagcatggaatacaaaactctggaggggctatggaaccagtcgaaagctgcatggcaagccttgctaaatgagttgcaagatgatacttcagaaagaattctggtggtcgtaggacatccgggtataaatctagcattgatttgcaggtgtctggatttaacgatggactacatgtcatcttttcatctagacgatggcagcatcagtgtgatcgatttcccagatggaccaaaaggaagaggtgttgtcagatgcacaaattacacagcccatctaggaagatggtcaatacctattaccaggaccatggaaactgatgaagagttctaacttcctgcaaggcattgggtgattgagttcatggtgaatggtgttgctgctgcctaatttctgtcacaaccacgaggttggcgtgttccagggaaggccatggctgtcattgtgtcataagaaaacagggctcattagactgcttctgcagtcaagagctgcgtcggtgcagacaatcttccatggacaaagggcctggtacgcagcatgaaatggacactatcactatgtttgtaggtgtcttcctctatctacattgtctgccttgttctttctgtaagttgggttcggcccttggtgttatctgcgcctgcaaggggcaggagattatatgactatcatatgcgaagatatttctcatttggatagaagagatttaggtgagagctcaaacaaggaattatcttgaggtgttatggtgaagcatatggagaggataagaaagaggtgggcacaactttgaacgtaaaaagatgcatgctggagctcagattcacatcgggttcgaacttgaagtgtgagcaatggtggcgactggcgaggtgattgacgatcctgaagagtcggtttgtgatctactatgaagtttgtattgactattaatcacagtaaggttgcatacgagtcccaacgggcttctgtacatctgcaacctgtgagtacaatacaagtgatgcaaacaactgcagagacaatgcttaatttgcaacctaggtattgtgagctgtccgggccgctgggacttctctgctatcttttcctgtgtctacattttatgcaggaacttttgcatagttggtagatgtttatatcaagcagagaagaaccatattcccatcattaatagttctggaccatccaatatatactgtctcagaactcataaacatgtacctactgtgtccttttcgttggcaaccatggtttcatttttatagctaactgtactgtagttaccaaactcatcatttttgtgccaacaacacttcagttcatcagagtcaagctccaatagggagtgtttatctgcacatgcagtactcaatttcatggtagttatatatttatttctgcagcataatggcttaccgatgcatggctaggttcccaaatcacttgattttcttgatttacgagatggagttttgcctgttctgtggaatgaaccatattaaagcggtcccaaaaataggcatcagtttagtctcatatttaacttaaggtttagcatgtaagctagatgtctctttttgtttgactttgcctctcttgatgagtgtaccatcatattttcctactgatcttggataactgactcatgaagggaaatgttgtttattccatgcacataaggatacctatttcttgttgccagaaaggtcctaatcctactgcaggtactgtaaactgttcaagatggggttatctcatgctttaggctactaatatgaagccatatacatcaatggcttcccccaaaagggtataattatgagcacttaccaatttaactaatcccctatggggccagtaccaactttaatctttttagaagtttccccaagaccaaatgcccagttttatgttaaattccccttaactcccgttaattttttggggtgcctccaaactttgatttccaagtttttgggccaaggttaattaattaagaaatttggaaattcaaataatttaaccttgttttgaaaagggaagttcctttttaaaattgttccaaaagccttaaaaacccaaattgggggcccccaaattccattggggaaattgggnnanaacctttccttcaaccaccttnaatccttgaatccaagccaagaagttaatttaatttttggaannccaaatttttccaaacctttgccaagcttaagccattggggggaattgtttcccaaactttcaaacnntgncaccaaggaagaagacccaaagttgtgttttcaanncttggtaatgccctttatgttggaaaaatactgaatttttatccaatatttctctcttatttttagtaggtatgatcagagaaggctttgtactctctcgtcaactgccttgttgcagtcagttagagttatatatattcactcgaactgcataatattatctagcagcttgttcagtagattagaaacataaatgcctcctacgtcaacttgtgcttgctgtatctttaaaaactgcagcgttatcttttcctagtttaacaaaaagacaaaagaaactgtccccgctacacacggtttgatggttatgctgctaaaaatatcatgcagcatgatatattactgtttgcctcttcgttttgttggcagttggcaatgcagtcgtttatgctcttgccaactggactaaatccactggagctgtagatcattccgtgtgaagacccacattatcggagtatcacaaaatagacattataaacttaagtatattattttgtttttgctggttgaaaactaacaaattgcggtcgatgattttcagggttccttgttcccttgctgtcagctgaatgtctcatttcagctttaccacgtatgcctcttttgtgttttctgtacttataatatttgcattgtcaagttgtcctagtttagtc

SEQ ID NO: 22686 - DNA, 1980 bp, Oryza sativa
  ref <308>: DATABASE ACCESSION NUMBER: AK099306
  ref <309>: DATABASE ENTRY DATE: 2002-08-28
ggttcatcgtctccatctcctgcttgctcttggtagctagctagtggagatcgccggagaggagagagacgacgagagagagagagagggggcaagatggcgggagggttctctgtgtcggggtccggggtggagttcgaggcgaagatcacgccgatcgtcatcatctcctgcatcatggcggccaccggcggcctcatgttcggctacgacgtcggtatctcaggcggagtgacatcgatggatgacttcctgcgcgagttcttcccgacggtgctgaagaagaagcacgaggacaaggagagcaactactgcaagtatgacaaccagggcctgcagctgttcacctcgtcgctgtacctcgccggcctcacggccaccttcttcgcctcctacaccactcgccggctcggccgccgcctcaccatgctcatcgccggcgtcttcttcatcgtcggcgtcatcttcaacggcgccgcccagaacctcgccatgctcatagtcggcaggatcctgctcggctgtggcgtcggctttgccaaccaggccgttccattgttcctgtcggagatcgcgccgacgaggatccgcggcgggctcaacatcctcttccagctcaacgtcaccatcggcatcctcttcgccaacctcgtcaactacggcaccgccaagatccacccgtggggatggcggctgtcgctgtcgctggccggcatcccggcggcgctgctgacgctgggcgcgctgttcgtggtggacacgcccaacagcctgatcgagcgcgggaggctggaggaagggaaggcggtgctgaggaagatccgggggacggacaacgtggagccggagttcaacgagatcgtggaggcgagccgcgtggcgcaggaggtgaagcacccgttccgcaacctgctccagcgccggaaccggccgcagctggtgatcgccgtgctgctgcagatattccagcagttcacgggcatcaacgccatcatgttctacgcgcccgtgctgttcaacacgctcgggttcaagaccgacgcgtcgctctactccgcggtgatcacgggggccgtgaacgtgctgtccacgctggtgtccgtctactcggtggacagggtggggaggcggatgctgctgctggaggccggcgtgcagatgttcctgtcgcaggtggccatcgccgtcgtgctggggatcaaggtgacggaccggtcggacaacctcggccacgggtgggcgatcatggtggtggtgatggtgtgcacgttcgtgtcctccttcgcgtggtcgtggggcccgctcgggtggctcatccccagcgagacgttcccgctggagacgcggtcggcggggcagagcgtcaccgtgtgcgtcaacctgctcttcaccttcgtcatcgcgcaggcgttcctctccatgctctgccacctcaagtacgccatcttcgccttcttctccgcgtgggtcgtcgtcatgtcgctcttcgtgctcttcttcctgcccgagaccaagaacatccccatcgaggagatgaccgagagggtgtggaagcagcactggttctggaagcgcttcatggacgacgccgacaaacaccacgtcgtccccaatggcgggaagagcaacggcgccaccgtttaatttagtcgctgaactgttctatatatatgtcactgtctcactgatcaaatcacggttgagaaactacaccgatgctatgtatcagctcatgcgtggccatgtgagattgatcgataagcagctagcgacggcatgcaaacttaagggtagtgtagcaatttcggctctgtacgtactgcaagcaatggcgagtatttcaattcggagtgcttcttgagtttgtagtttgttgtatgagttgtatccttttatgtttctccgagcaagcctgacacgagttggcgcctcagtgtaacttgcagaacagaatgccatatatctgcacctttttttgcc

SEQ ID NO: 22687 - DNA, 1782 bp, Oryza sativa
  ref <308>: DATABASE ACCESSION NUMBER: AK072851
  ref <309>: DATABASE ENTRY DATE: 2001-12-06
gacaacgtactatttgaagtgtcaagccaaaccaaaactagccctaaaactcaagggtaccccaaattccccatcgccgccgcccccgatccggcgatgccgctgcgcccgccgcccccgcctcagggattcctcaccgcgtatccatccgcagctttccctccggtgaagcggccgcatgaggacgacctcggcgccggtgacgtgctgaccttcaggttccactccctcgccgtcttgaaattattcgaccgcatccgcgagtaccgtctgcacgattaccggtaccaggcaacgcgaggctggtacagctccgggacggcgccggaggatgctcttcttccctgtgcggttgctcgaccaccgaggatgtatgggtgcgtgatcggggtgcagcgcggtcggacggtggaggtcgtcgacacctccgacatcttgctcgacaccgaccccggaaccctcgaccgcgacttgttgaagaagaagctcgagacctacaagaaggcgttccctggcttggccattcttgggtggtactccattgacactcatgtgacgaacaccgatatggaaaccaaccaggctttgatggatgctagtggaacaaccttttatcttctattcaatcctgcaatgaacctttccctgaaggatctcccagtgactatttatgaaaaagtgcactctaccaataggagtcccactccgttaatctttgtccaaggcaaatataaaactgagactgtagaggcagagaggatatctttagaccatacgtgtcctgtagtttctgatgttagtgtgccacctcttgttggaaaagggcaacatgcaaatattatgcagacttctggatttaagctgatgctgtttgaaattccttctggtttcgcgatgtttgaagtttcacaggaactgattgcacgccctaaggacatatgggcacgatttgcttatcaggatgacattacaaatgttattgttaccctgggttctattcagatccataacaaatctgttgctagggatattattgttggtcctggtgacgaactgaaagaatttatcctaagcttttgcactcacaactacttaattgttcaagatgtagagcttaaagatgttatcgagaagaaacttaatatctattgttactgtaatccaactgttgtcggtgaattgacatggggactgaactatgtcctacataagttgttacctcaagagcaaagtttaactcatgagccttatcttccactaagcaaggcaatgtctaagcagataaaagaatatggattcaaaatctcgccacgagagattgacagagagttcctaagagctatgagttttttaaattatttggggtatatgtcagagcgttattcactgctgctagatcatttgtttggacaatatcgtaagaataatatgtccgacattgaatttgctaaatcaattgcatctcatcttcattcctctgagggaattgtaccaagagatgagagatacactagagcagagattatggagttcattgacttcataattgcagctcctgaaaacagaagccggacgctatcgttcctgcggcgcatcgaggcagcttctattgatgattctcctccaccgccttcactgccaggagggatgggtgtttcgttgttgaagcgtcttcgtttggattggataactgtttgttgtctaggatgtgcagttgctctttaccctttctaccgcagagtatgaatgactttgttataaaattcactatgttttgagggc

SEQ ID NO: 22688 - DNA, 1630 bp, Oryza sativa
  ref <308>: DATABASE ACCESSION NUMBER: AK072852
  ref <309>: DATABASE ENTRY DATE: 2001-12-06
gggtggtggagcagccgcagccgcagccgcagcgggaggaggaggaggaggggcaaccgggcgtcggcggcggcggcggcggcggcggcgtggagaggtgcgggcggcacccgtcccaggtcttcaccggcgtttgctccacctgcctcatggagcgcctctcctccgtccgcaaccctgccgaggaggaggaggaggagatcgtcgaggtcgggaccgccgacgccggcgagggatccagcgccgaccacggcaagctgcggaagacgctcatgctgctgttccagctggacgactcctgcagcggcagcgccgttggtgccgcgcatccggccgacgccaaggatccccaggtcgccgatttcgaggtggaccctggaggtgggaatcgaggggctaagtggaagggcggggcgtggctcaggtcgatcttgccgaggaaggggatgcggtggagtaggaggaaggagcccccgcggccgccgcggccgaggccggtggatccggacggcgctggcgacaatgcgcaggtggagaggaagcccagcttccggcgatcctgcgagtggatggtctgccgggagcccgtgagagggtcgggctccctggagccgccgcggcattcgtgggacgggtcgatggtggggagggccttggcttgctcgttcgcctgcttggaggagcctcagccgcctccggatggggagaggagggctcagcggagcaatgcagaggaagaggctggggagagtcgtgccggcgttgcagagagcaggaatggggatcatttggctgatgccggcggcgaggggcgccatctcagtggaagaaggaattgcagtgacaccgggccggagatgacaatgtcaggtgtcggaaggcggaggtcgaacaggtggagcagggtgtgggatcgtagcatcactagcccactcaaggagtttgtgaggaaaggggagcatgttcttgagcggtcgctctcggaatcgaggaaggataccagaaggggtagaaatggggagactggagacatggattgcgaaattcagcctggacgcaacggccatggttcagtcagagcaagccaaggttcattcagaagctcacaagctgtagctaatggggatgtccataatttccgcacagattggcttaggaataaggaatgcaagattggcagaagcaggagtgtgcattatacttctcctgggaacttggataacgggatgttgcggttttacctgacaccaatgagaagtgcaagaacagcgaacagggggaggaggaggaattcacgcttgttctcaagaggactttttggcttcatttgagtggctgaagtagaattctagcccatgccatgtgttttagaagatggcagcagtagaagcaacttttcttcacaatctacttggtttctaaggactggcaacatagtaagttttcacactattctttcttctaggacattgttaagtcccaatttagaatcaggaagcttcagtattagttgcagaattgctgctctattcttttaagatgttgtttatagatgaaatctggacagagctgtgcagattagtatcataatgtaattatttactttgataataatatatttgtgttattt

SEQ ID NO: 22689 - DNA, 1523 bp, Oryza sativa
  ref <308>: DATABASE ACCESSION NUMBER: AK072853
  ref <309>: DATABASE ENTRY DATE: 2001-12-06
gatcgtgccaaacaaggcagaggaaagcgtcgtgcggctggaggatacttccctttcccctcggccgcctgcgccgatccccatccctcccgcggccgcgagcgaccaggggagggccgcagccgccgcccccggcgccgttcgtcccgcttcttccgccgcatcgcatactgaaaaaaaaattgtgccatgttatagagactgctaaaaacatcacatggaatcgctgtggaagctgagctacttgctcgagccagcgtcgcttgccctcatcttgaccgccgtctccgtcgcctacgcgtcggcgtcgcgcgcgctggaccatggcagggagatggagaggaacctcgacttctccgaggcctccatcacgctcgaccggtcgcaggcgctcatgatcccgctcgcgagctcctgcagcctgctgctgatgttctacctgttctcgtcggtgtcgcacctggtcaccgccttcaccgccgtggcgtcggcgatggcgctcttcttctgcctgtcgccgtacgtaaactgcgtcaggtcgcgcctcggcgttggggacccgttcgtgtcgaggtgctgctcgaagccgtttacccggttgcaggggttgctggttgcgatctgcgtcggcacggtggttgcctggttggtatcggggcactggttgttgaataacctgctggggatatccatatgcatagcgttcgtcagccatgtgaggcttcccaacataaagatctgcgcgttgctgctcgtctgcctgtttgtgtacgacgttttctgggtattcttctcggagaggtttttcggagcaaatgttatggtgtccgttgccactcagaaggcatctaacccggttcacacggtagcgaacaagctcagtctgcctggattgcagctgattacaaagaagctagaacttccagtcaagcttgtcttccccaggagtttgatgggtgggcttgctccaggaagcagtcctggggactatatgatgctcggccttggagacatggccattccagggatgcttctagctcttgtactctcatttgatcaccggaagatcaaagacatgagtgtttcacaagacatgcctccctcgaaacagcggaaatatgtatggtatgcgctgacaggttatggtgttggcttggtaacggctttggctgctgggatcttatcccagtctccccagcctgctttactgtacctggtaccatcaacgcttgggcctgttatgtatatgtcatggttgaggaacgagctatgggagctatgggaaggatccaggccaattataaacgacaaagctcatttgttggaggtttaaaattcaacaggacgtgaaaaaaggtctcgacgtccttgatgtaatctgattacaatttatttcagccatagtctaaaggagaatatttataaggtagaatgcagtgatgtaaggttataccctattgttctcgcaagagggaacaagatgtatcacttattagcaataatataaaggtgtctttcatccc

SEQ ID NO: 22690 - DNA, 2145 bp, Oryza sativa
  ref <308>: DATABASE ACCESSION NUMBER: AK072854
  ref <309>: DATABASE ENTRY DATE: 2001-12-06
gactttgaccatctcgcctcgaaggaggagtaggaggaagagagaagccggcacaagcgagcccagcaaacgcacggcaccacggatcattgggatcaaaacacgagagcttaattgagaagcagagaaggagatcaagaaaagcagagcaaagccgccggcgaagagggaggaggtggccggtgggatggacgtgaagcgggcccggagcccgcgggctccgggcgtcgacgccgacgacgacaagaagcgggccgccgagtggcgcggcgccgtccggccgcacatggtgctggtcggcttcctcatcaccctgcccgtcctggtcttcgtcttcggggccgctggggctccttccaaaccacctccgcccccaacgtcggcggccgccacgtcgtccccggcggcgtaacaacgacacaaaaaaatgaagccccgaaaaacgtctctgtaccagccactgcaaccaaatctctgccccaaccccaggacaagcttctcggaggactactctctgccgcattcgaagaatcctcatgtcagagcagatacaaatcatctctctaccggaagaagtctccgttccctctgtccccttacctggttcagaagctgcggaagtacgaggcctaccacaagaagtgcggccctggcacgaagcgctaccggaaggcgatcgagcagctcaaggcggggcgcaacgccgacaacgccgagtgcaagtacgtggtgtggttcccctgcaacggcctcggcaaccgcatgctcaccatcgcctccaccttcctgtacgcgctcatctccaaccgcgtcctcctcatgcacgtcgcggcggagcaggagggcctcttctgcgagccgttcccggggagctcgtgggtgctcccgggcgacttcccccacaacaacccgcagggcctgcacatcggcgcgccggagagctacgtcaacatgctcaagaacaacgtcgtccgcaacgacgaccccggcagcgtgtcggcgtcgtcgctgccgccgtacgtgtacctccacgtcgagcagttccggctgaagctgtccgacaacatcttctgcgacgaggaccagttgattctcaacaagttcaactggatgatactcaaatctgacagctacttcgcgccggcgctgttcatgacgccgatgtacgagaaggagctggaaaagatgttcccgcagaaggagtcagtgttccatcatcttgggaggtacctgttccatccgacgaacaaagtatggggaatcgtgagcaggtactacgaagcgtaccttgccagagtcgacgagaaaatcgggttccagatacggatcttcccggagaagccgataaaattcgagaacatgtatgatcagctgacgaggtgcatcagggagcagcggttgttgccggagctcggcacggcggagccggcgaacacgactgccgaagcagggaaggtgaaggccgtactgatcgcttctctgtactcgggatattacgagaagatccgtgggatgtactacgagaatccaaccaagactggcgagatcgtcgcggtgtaccagccgagccacgaggagcagcagcagtacacgtccaacgagcacaaccagaaggcgctggccgagatctatctgctcagctactgcgacaagatcgccatgagcgcctggtcgacgttcgggtacgtggcctacagcttcgccggcgtcaagccgtggatcctgctccggccggactgggacaaggagaggtcggaggtggcgtgcgtcaggtcgacgtcggtggagccgtgcctccactcgccgccgatcctctcgtgcagggccaagaaggaggtcgacgcggccaccgtcaagccgtacgttcggcactgcgaggatgtcgggttcggtctcaagttgttcgatagctaattttttggagaagtgacttcttcggtttcacgttccgaattgcgttcgttacgtcacgtcctgtggattaactaggccttttggagattcgttatattcgtttggactcgtatacacctgaaaatgcacaaaatgtattatgtaaaatgtattatgtatctgtattcaaattcgttcttcataaaacaattcggatatatatatacacacacgcaaacagattccctctcc

SEQ ID NO: 22691 - DNA, 1127 bp, Oryza sativa
  ref <308>: DATABASE ACCESSION NUMBER: AK072855
  ref <309>: DATABASE ENTRY DATE: 2001-12-06
gtctcttcccacgccgtctcgccgcaatcgctcgctcggtcgcctcctcttccgccgcgagacacgaagagcagcagctcacaggtaggcctgcgcgtcggcggccatgggagacagccagtactccttctccctcaccaccttcagcccgtcggggaagctggtgcagatcgagcacgcgctcaccgcggtcggatccggccagacgtccctcgggatcaaagctgctaatggtgtagttatcgccactgagaagaaattgccttctattttagtcgatgaaacatctgtgcaaaagattcagtcattgactccgaacattggagttgtctacagtgggatgggtcccgatttccgtgttcttgtgagaaaaagtcggagacaagcacagcagtattatcggttgtacaaggaaactatccctgttactcagcttgtccgagaaactgctgctgttatgcaggagttcacgcagtctggtggtgtaagaccatttggagtatcattattgattgccgggtacgatgacaatggcccacagctgtatcaggttgatccctcaggatcatacttctcctggaaagcatcagctatggggaaaaatgtctccaatgcaaagacatttcttgaaaaaagatacacagaagacatggagcttgatgatgccatccatactgccattttgactctgaaagaaggatatgagggtcaaatctcagccaacaatattgaaattggagttattcgatctgaccgtgaattcaaagttctaaccccggcagagatcaaggatttcttggaagaggtggagtaaattgtctgttgacatttgatagtttactgttctaagtgacactcttgagccgtagtcatgaggcttcttgtctcttaccatttgtcacttaaacctattgtaaactgatttgcttcagtgatatgcatgagatgaagtggtggacctacttttgaatccccatcgtaaacaagatattgttgggtgaatgttgtatttggttctcttctaaggaggtatttggcgcatatattgtgtctcctcccgacatatcatttgccctgacagtacttgtgagacagtcaaaacagatcacgaaggaatatcttggttg

SEQ ID NO: 22692 - DNA, 3022 bp, Oryza sativa
  ref <308>: DATABASE ACCESSION NUMBER: AK072856
  ref <309>: DATABASE ENTRY DATE: 2001-12-06
gggagctcctccctgctgcagccgcttcgccgcatcctgcttcttccccaccgccgcggccattctcctcgctcgctcctccttctccccacgtgtactgaagccgcatcctcgccggagcagccgctgctgccgctgccggatactgcttcttcctcaccgccacggccggatccgacctcggccccttctgccgtcaccgacaccgccgtgcactccgccgctggccggcaccgaggtcggccctcttccccatttgccacttcatcatcatcagatcgccaatgttgaccctattgttgaaagcctatagtacgagtaagtccctcaaatcctgtgtcttttcttaatcttctccgtacgtgtggaaattttgatatctatgtctgatgatcttcgttcttaagccttggctatgttggctaaatattcaagaaacctagatagtgactgctgatagattcatgttatgtcctgtccgatgctgaatcatgagggattctccaagaggacaggaagctgtcctacagaaccaggcagtcaagttgtagagatggtgaaaagtatggagaagctacagtcaagttgcttgctgctacattatgactaacaggtgatttttcatctgaataccaatccagaaatattgggacaatctgactgaataactgctaattataaccaacattttgatttattggatgttttcattagtggtataggtttgcttatataatctatgtgaattttctgtaggtgatttctttgtatttctttcaaacttgataatgtatttgtcaccgtgaacaatgtgaatattttcctttactgtttgaggcaaagaatcatccctttctgctacacaaaaatgtaagcctttattctgcgcaagggcacaagcacgatttatgcatgatggtttgttttctaatgcatgcattgcaggatcaatgggtgcttgctgataaaagaatgcatataaataacaaatggtccagcctcctacaactgtcactgtacagcatcaaaaaaggagattatgatatctgaaaacttcaatcgcaaagtttgaaaaatagagtgcatcaagtttgccatggagatggcaactaccaacccatggtcatgcggacatcaagaagcggacaacaagaaacatcataggagcacctcaccatcacatggctatgagcaagaggggtctgcaagagtaatccactgaactttgttgaacttgtaattttcatctgcatgctctggttctctaattgctttgaattacttatcatccttcaataaaccagctgttgtgaattcccaaaacaaagttggatgcgctagacaccatctgaagttggtcaatggcaactcgagaaattgtatatatttggaacattaccttcctcattagctttttatttcttcaatttcttctagcaaatacaggtattatgaacaacaactttttcatgattctaacctccaataatctgaagttcccagtttgattatataatctaggaaccaaatcatgaagctggcgacattggtaagaggtaatggtctagattaatctatattgagctacggtttgtattttgttgttggggtaaattatgatgtccttttataagagaaaagtttagttggtcaatggcaggttcatctcagcagtaagccaataaacataccgatgaacctgaaaaaattccatataaagaacattgcagagcaatttttggaatgtttcacgtccaatctgtattccccctctattcttctcataaattatcttatgatgagacattggcctttttatttaagatcaaatttatgagactattcaattgtggccttatttttgccatatatataggacagccatacggggcaccatggtgtgtgcgtgtgatggtgattgtttttctccagctgcattatgcatctcttttcaaatcttatgataggtgcttgtgatgccatccagcaaaaccactggttattttgctggtatactgatattaggcccataaatgatttttttttgcttttttacattctttggtgatgaagttcatagttctttgttcactgtattgaagctgcaatctatgacattagaaaaaaggtatggtgattgtttctatttttcagtatgtgattttttccaatgtttttcaatctttcctatttttcaatttgcctattttttacacatctatactccttttgcattatgcatctctcaatagatgagagccttattttattttccttgcaagaaatgctgctgatcaatttaattttgtgttatgctactgtaagatggcttgataggagttttgcaatacatactgcactactgtaggcactggcacagtttgagagcacaacatatagaatttccttatttgttttgtagtttacaatgtgatgtttatatcacaggcttggtgtttactgggtacttgatgctggaaaacatttatgactttatatatacttcctcaaacaatttaagattctctttcttgatttgtttctgcatgtaatggtgaatttcctgattactaataactgtcatatggcttcatttatttgtcggagctaactgggtttgattatttgtgatcaccttaagtgttgctgcttaagccaaaggaagaggaaaaacttttatataagcatttcatttcatacaggttccctcatattttctaggtaccattgccactctagaaaagattggaaggccttctaggcatcattgatactcctgtccaaaaggtgtttgacgaatttggaaggccttcgttgtttgctgcagatagaccaaacatgattgcttgaacaaaaaatagatggttgtgggagaacattcatctttacattctttagctttccctattttcttagtatcttgtagtacatgaaattgcaattccttttacttactagaaagtaaatgtcgtgcatttgcaactttgttatacaacgaatatatcaactggggtttgtgagc

SEQ ID NO: 22693 - DNA, 2170 bp, Oryza sativa
  ref <308>: DATABASE ACCESSION NUMBER: AK072857
  ref <309>: DATABASE ENTRY DATE: 2001-12-06
gacccctcgctgacgctccgaccccaccaccaccaccgccgctcactcacacatcgagcgccattattaaaccccaggaaaaacagacgacctcgttcgcttctcgcccgcaaaaggctaaacctcgattacgcctccccaaacccgccgcgaaacgaagcgaaagcgagttcctccgatcccgaccacttgctcttctcatggcgtcctcccacatcatccttccgccggacgacgacgacgaggagcagcgccggctggaggaggaggaggacgaggatccgtgggcgcggagcgggcctccccccgcggcgccggagcacgcgatgaaggcggcgctgccgttctccgcgacgtgcgtgcggatctcccgcgactcctaccccaacctccgcgccctccgcaacgcctcctccgtcagcctcgccgacgccgcctacgtgaagatctccgagggggacttcggctacgtcctcgacgacgtgccgcacctcgtcgaccacctccccgatgcccccacttatcccaatccactacaagatcatccagcctattcaactgtcaagcaatattttgttaatgaagatgacactgtaccccaaaaggtggtcgttcagaagaacagccggcggggggttcacttccgtcgtgctggacctcgtcagaaggtttattttgagtcagatgaagtgaaagcatgcattgtaacttgtggaggcctttgccctggtcttaacactgtcatcagagagctcgtctgtggtttggcgcacatgtataatgtcagcaaaatctatggtatacagaatggatacaagggcttctattctagcaattaccttactctgacgccaaagagtgtcgatgacatccacaagaggggtgggacagttcttggcacatcacgaggtggccatgatacaaaaaagattgttgacaacattcaggatcgtggaattaatcaggtctatatcattggaggagatggaacacagaagggtgcatatgagatcttcaaggaaatccgaaaacgtgggctaaaggtttctgttgctgggattcccaagacaatagataatgacatagcgatcattgacaagtcatttggttttgatacggccgtagaagaggcccagcgtgccattgattcagctcatgtggaagcttgcagtgctgagaatggaataggcttagtaaaactgatgggccgttatagtgggttcattgcaatgtatgctactcttgcaagtcgagatgtggactgctgcttaattccagagtccccattttatatggatggtgaaggtgggttgcttcaatatgtagagagaaggctgaaagagaacaagcacatggttattgttgttgctgagggagcagggcaggatcttatagccaaaagtttatctacttctgagcagcaagatgcatcaggaaataagctactgcttgatattggtctttggctgactcacaagataaaggaccacttcaagagcaaaaagatggagatgactattaaatatatagatcctacctacatgatccgagctattccaagcaatgcatcagacaatgtctactgcacgctgctggcccacagtgctattcatggtgcaatggccggctatagcttcactgttggaaatgtcaacggcagacatgcctacatacctttctatagggtgacatccacacggaacaaggtcaagatcactgataggatgtgggcgaggctgctatcatcaaccaaccagccaagcttcctaagccagaaggacatcgacgaagccaaagagaacgataggacggccaacaagccaccacttcccaccggcctcagccatcatgtggcaaactctttcgaccagtctgcatcatcttcgtcgaacagccagatatgaactccatcatgtggcaaaccctttcgaccagtctgcgtcatcgtcctcgaacagcgagatgaatccaatctgtagttctatatagaagctgttgctattcccgttgagaaacctgggccacgctacgcagttttgatttaatatgcataatatcacctgtatgaatccacggatactctcctggattgctggtaactacaagcgtaataagagaagcgctattgatgaagctatttctcataagcaacactcgtgttgtgtcttgt

SEQ ID NO: 22694 - DNA, 3313 bp, Oryza sativa
  ref <308>: DATABASE ACCESSION NUMBER: AK072858
  ref <309>: DATABASE ENTRY DATE: 2001-12-06
ggttgcctcctcctcctcacgccctcctcacccccttacgccacgccgccgcatactctctcgcacctccctctcgccaccgcggggccggttccggtgtaggggaggccgtggccaccggatccggcatccacgacctccccgccggcggatctagccacccgaaggcgtgggctggtctagtataagaggctcatcggtagtgtcgatggtggtcctttctccatagcagcgagctccatggggaaagactttgctccttcattttcttcttccctcctaccccactccggcgcgtcacctactctcctcgcgccgctgccccctattctcctcacagtcacagcaccgccgatgcctcttctcgcacccaatcgcatcgccttacctccatgttgctaccgcggggccagatccgccggtgggaaggtcatgcccgccggatccgtcagccatgacctccctgccggcgtattcggtcgctcggaggcgagggctatcacgggaggcacatcggcaacatcgacgacggtcgtctctccatggcagcgcactccacagggaaaggctctgctctcccaccctcttctttattctcactctccctctcaccgtgatccagatccatagctgggtggggaagttgaatatgatctagagctggtggggaactcgtgcaacccccttcactgccggtccatcccatcccatgtgcggctgcgcgaggcgaagataagcgaagatgccgagatcgcggcattggccacggatatggtggttgtctctttgtggatgggacatgatggatctagggattatggacaaggttgagtacaactacttcttggacatctctaaaatacaggcccgctcgtccctatgcaccacctactattgatctctgcagattacaggatcccaatatctgaaaccacatattatatcatatctttcagtgtctgagtatctgagaccacctattatgctggatctttcagtgtatggaattctagccagtgtgcttttctctctttgttgcaattagcgatgacctgattgggagaagtaggtaaagctgtgctggctttgacatatagtagcgactcttgctgcatcaaacaagtgcatcatcataatatggatatccagggaggcctgctggacaatcaatgctgttgtggtggtgaaagtattatgcataacactccttattttgctatcaaaatgttaatcagaattcaaagttcggtctccatcaaagtgatgtttaatatttatgacatatattacagatgcttgggcatgatgtgctgtaaatttagaggggtaagtccgtgctatcaaaacggaacatccaatagatttttggttccaaatactcagactgtatgtactttttcataatctgaacatattgagtgttttttttactttgtggccatctgtcctatcattttgttgtaggccgcaaaaatggagaacttctccttcacttgaatttctctattccaaacttgaatacttagtttaattgttcacttttgtttaataaatatcttgtcctttttggttagatcttagattacaccgtttaagatctaattcatttactagcagtgtacatactacattttattcattctgtgcttgtaatacagttcaaatataggactgaagttctggttttagtgctcctcttatccatttactagcagtgtacatgctacattttattcattctatgctggtaatacagttgaaatataggactgaagatatggttttagcgttttgtgtcaatcttttatgtttgactaatacggtgagtaactcattttttgaagcaattaagttggggctaaaatagttcttagatgcattagcacctaactgttgcctgtcagtttgatctaaagtgctcctcttatccatttactagcagtgtacatactacattttatttgttctatgctggtaatacagttgaaagataggactgaagttctggttttagtgttttgtgtaaatcttttatgttcgaataatacagtgagtgactaattttttgaagcaattaagttggggctaaaatagttcttagatgcattagcacctaactgttgtctgtcagtttgatctaaatgttttcactccacatcaacatggtggtatagctgcccactctggtcctgggaatggatggtgagttcatctaacagtacaattgcagaggtgcatgcagggccagccgacgagtggtccagctgcgtatgtttgatgcaaagtatttagcggtgttaaatctgattcttgaagttggcagaggcactaatcatgtttgccactcttccaaatgtgatactgcacttccatttaaaaatttaatcggacccttccatctagaaaaaaaaaatgatgctgcactcttgacaaaaaaatctcttcaggtttgctttgtatatgtttagatccttcatgatttcagatcattgactgtttttggtgcaattaatacaattccttctaaatttgcatggaaatatagaaaagtaattggaacagaagttcacagctaaatttcttttggctaaacctggtgatgactgattattactattttgttagctcatcatgtagtgtgatatttgaaactgttcaataatttcctaggtagtctatctattttcatcctttgctgaacaatattttcattggtaccagctatgtgtttgtggaattgcttccttggcagcagctgtggaagagtaagagaggagagggagttcagggcagagctgcctctatccaccgcagcggtacttccagcaaatcatggaccagcggttggtttcacgttgtgcctccacacttgcacgtccaccttcaaatccaagaaggcctccacaattgacaaggacaaagagcagcctgaagaaaagggaacaatggcaatctgcaaaagatttatagcccttcatctggaacctatgttcccccccccccccccaaactattgagtactattttttacctcggcctcccttaattcaagctgtaggaattggtggaagcacagttggtttgtttctgctcatcatcattttaggtgctcaacaataggcaaccaacttgcggtgttaccatgaagcttcagttgatgttgagtgttgtcctgcaggttgtaaccaaattatgactagcttgtaccttgtagtttcatcatattcctttaaacatactgatagtatctgctcacaaaaatattgtgcttgcaatgaattaagtgttaaaatcacatacctataatctatgt

SEQ ID NO: 22695 - DNA, 1845 bp, Oryza sativa
  ref <308>: DATABASE ACCESSION NUMBER: AK072859
  ref <309>: DATABASE ENTRY DATE: 2001-12-06
ggagagagagcgcgtctcgtcgtcgtcgtcgtcgggtcggacccgaaccaccgagctcgctcgctttgccgacaaatcacgccatagaccaacccaacccgtgccgcaaaatccccaaatcccaaatcccaaatcccgccgcctcccagatcgccgccggatcgatggccgccgcctcgccgctcgccgccgcggcggcgctcgccctcctcctcctcctcctcctcgccgccccggcggcggcggagatccgggagacggtgatccggagcgacccgcggagcatcatcccgctcgacgagttcgggttctcccactcgggcgtcctcgagctcaacgtctccggcatcgccttcgacccgccggcctcctccgagctcgacctctcccagctgggattcttcctctccacgctcgacgcctgggtgcacgtcctccgccagctgcaggatctcgacgtcacctgcgcgctccaggccgacctcgtcaagctcgcctactccttcgaccgcctcaggccgccatccaaccccgccggcgtcgaggtcgcccgctcatcatccttctccaccgccttccccgtctccgagccagggcagtacacgctcgtcttcgccaactgcctcggcggggggctcaaggtctccatggacgtccgctccgccatgtacaacgtcgacccgcccaccggcgagcgctcctacctctccgcgggggccaccgcgctcccgaccatcttcggcttcttcggcgtcgcctacgccgcgctcgccgccggctggatcgccatactcctgcgcaagcgcgccgccgtgttccggatccactacttcatgctcgccgtgctcgtgctcaaggcggtcaacctgctcgccgaggccgaggacaagtcatacatcgagcgcactggcacggcgcacggctgggacgtgctcttctacatcttcagcttcctcaaggggatctcgctgttcacgctcattgtgctcatcggcaccggctggtcattcctcaagccttaccttgctgaccgagagaagaaggtccttatggtggtcatccctctgcaagtcgtggccaacattgcgcaggtggtgattgatgagtctgggccgtatgctcgggcctgggtcacctggaagcaggtgttgttgctggtcgatgtgatctgctgctgcgctgtgctcttcccgatcgtgtggtccatcaagaacctccgcgaggctgctcgctctgacgggaaggcggccgtgaatctcatgaagctgacccttttccgccagtactacgtggttgtaatttgctacatttacttcacacgtgtcgtggtttatgcgctgatgaccatcacctcgtaccggtaccaatggaccagctatgtggccaaggagctggccacccttgcattctatgtgttcactggatacaagttccggcctgaggtgcataacccgtactttgcgattgacgatgaggaggaggaggctgctgctgaggcactcaagttggatgatgaatttgagctatgaggatttacaattgccggtcccttcttttgccactgatgatacagatattgtatgtgcctccaaaggacaaatggtatagactggtatctagtccatatccttttcttttcatttcaagttagttatatttttcttgctgtaactggttatggtcaaccttgtgtttgtgttaagaaatgcagcagcttggatttgccttggtctaatctaaaagcattgagatgagctgttctgattgtaccttcgtagcaaatgttgtatctagatgtttacttctcttgtaaaagaagttgactatgattcagtttgtttattc

SEQ ID NO: 22696 - DNA, 1636 bp, Oryza sativa
  ref <308>: DATABASE ACCESSION NUMBER: AK072860
  ref <309>: DATABASE ENTRY DATE: 2001-12-06
gaaagtgtaaaaattcctgccaccccaatccttctcccggccgtacaccatttcgttccgacgcgagtaattcctccccacgggcggcgactagggcggctagggttcgtcgggcgccgccgtgccggagatcgcctctcgccgccgacacccggatctccgccgccgccggtcgccccaggttatcccgctcccgcagtcaccatcccgtcttctccgccagtcgcctcacgcccggcctggacgccccggaatccattgtcggtctcgccccgccgactgccgttgacgccactggctgaaggtgtgaatatgtcggacagtgcgttgaaagatctgaatctagctcagtcagcagagctggagaaaaccaaggacagttctgccaagtcttgcatcaccaagcctgtcttgaatggcaacaaatgcaacaatacggaagaaaatgctccacctgtactccctgatgctgtgactaatgggtgtgaagctggaaatgcagatgttgagtatattgattctgagagtctgacagatcttgaagatgctggtgcaacccttagtactttagttgcaaggttggattcaaaagactgggttatgacatgtgaagctctaaataatgttcgtcagttggcaatatttcacaaggatagattgcaggaacttctagagcctctagttcctcttattgtgaaatctgtcaagaatccaaggagtgctgtctgtaaaaccacactcatgacctgcgctgatattttcaaggcatacggtgacctaatggttgactcaattgatccactgttagtgcagctatttctgaaatcttcacaagataagcgttttgtctgtgaagctgctgaggcagccctcatatcgatgacaagctggatcgccccttctgctctgttaccaaaaatgcaaccttaccttaagaacaggaatccacgaattcgagcaaaagcatcaatgtgcttcagcaagagcgtcccacgcttgggtgtggagggaattaaagaatatggaatggataagcttgttcagatcgcagcaactcagcttagtgaccagcttcctgaatccagggaggctgctcgcaagctggctttggagctacaagcattctatgagaaatcccaagcttcgagttctggtgaagttgacgacgcacctgctacctcacctgatgctgatgctgatgctggtgctgaatcatgggaagctttctgccaatcaaagctttccccattaagtgcacaggcaatccttcgtgtcacctctacgacgaaagagggtgtggctgtgggtgtcacctctacccctccgaaagaaggcgtcactgttggttgctagcatcaggaggtagtagatgcaatgaggttgtggtttttccatccgattcaccttttgctgtacatggttatggttgttctttctctacatccaatctgggattcgttcgttaagcatcggttcgagagttgaggtgtgacctgtgggtgttaatattggtgcgagatatacctgttatagttgactgtatgatcttccttttctcccactgcttggtattgattggtcaggcgaattgtagaatttcttccactattcaatattactacacagtaatttttcc

SEQ ID NO: 22697 - DNA, 1693 bp, Oryza sativa
  ref <308>: DATABASE ACCESSION NUMBER: AK072861
  ref <309>: DATABASE ENTRY DATE: 2001-12-06
gatggactactatccgtgaacaagaaatggatgtcaaccagctctggttactgtgggcaacactcgccgtgtcactgctctactacatcagcaaccggagacgccgcgtgggcggccggcgacgatgtccacctggtcccatgccgctcccgctcgtcggcaacctgctcaacctgcgcggccacctcccacccgcgctcgcgaggctagcgcgcacgtacggccccgtgatgatgctaaagatgggcctcaccaccaccgtcgtcatctcctccggcgacgcggcgagggaggccttcacgaagcacgaccggcacctcgccgcgcgcaccgtcctggacgtcactcgttctctcgacttcgccgaccggtccatgatatggctgccgagctccgataccgtctggaagacgctccgcggcgtcacggcggcgagcatcttctcgccgcgtggcctcgccgccctgcgcggcgtccgcgagagcaaggtgcgggacctggtgggctacttccgtgggcgcgccggggaggtcgtggacgtccgccacgccgtgtacggctgcatgctcagcctcgtgtcgagcgcgttcttctccgtcgacgtggtcgacctgagcgccgagtccgagaacgagttccggcagagcatgacgttcctcatggaggtggtgtcgaagacgaacgtctccgatttcttccctttcctccggccgctcgacttgcagggatggcgtcgcttgaccgaaaggtatctgggcagagtcacctgcttcttggatgacgtgatcgaccgccgtttcgccgccgacgcctcggcaaacaggcacggcgacttcttggactccctcctcgacctcgtgtccaccggcaagatcgtcggcgaaaacgtgacaaccattttgctcgacgtgttcatagccgggagcgacacgatcacggccacggtggagtgggcgatggccgagctgctccgcaacccaagcgaaatggccaaggtgcgcgccgagatggacggcgctctcggcggcaagaaaaccgtcgacgagcccgacatcgcgaggctgccgtacctccaggcggtcgtgaaagaggcgatgcggctgcacccggcagcgccgctgctgttgccccaccgggcggtggaggacggcgtggaggtcggcggctactgcgtgccgaagggctcgatggtgatcttcaacgtgtgggcgataatgcgcgacccggcggcgtgggagaggccggaggagttcatgccggagcggttcatccgccggggagatgatgacgaggtggatttctgggggaagacgttcgagttcatcccgttcgggtccggccggagggtgtgcgccggcctgccgatggcggaacgtgtcgtgccgttcatgctggcgtcgctgctgcgcgcgttcgagtggcgactccccgacggcgtgtcggccgaggagttggacatgcgccacaggtttaccattgccaacttccgtgccatccctctcaaggccgtgcccgttgtggtcagctagttgctctctttcactgcatcaatggtgaattgtggcgcgtacgtctctccatttggcccacatatgtcaagttggatattataattgaagctagtggtgtaagttgttcaatttaacattatcgtaatgataaagattttaatgataaataattatctaaatct

SEQ ID NO: 22698 - DNA, 1230 bp, Oryza sativa
  ref <308>: DATABASE ACCESSION NUMBER: AK072862
  ref <309>: DATABASE ENTRY DATE: 2001-12-06
gaggccattgcatacacacacagagttgtttgcattgtagattgacaatggcctcttgtctgtcagtcctgttgctcttgtgtctagcacttgcaggttcagtctccgggcaacaactgtcggctacattctattcgaggtcgtgcccgagagctctggccatcatcagggccggcgtgagagctgcggtggcgcaggagcctcgcatgggggcgtcactgctcaggcttcacttccatgactgctttgtccaagggtgcgacgcgtccgtactgctgaacgacacggccaacttcaccggcgagcagggggcgaaccccaacgtcggatccatcagaggattcaacgtcgtcgacaacatcaaggcgcaggtcgaggccgcgtgcaagcagaccgtctcctgcgccgacatcctcgccgtcgccgcccgcgactccgtcgtcgccttgggtgggccgtcatggagggttcttctcgggaggcgtgactcgacgacggcgagcttggcgctggcgaacagcgacctgccacctccgtccttcgacgtcgccaacctcaccgcctcgttcgccgccaaggggctgagccaagccgacatggtggcgctctccggcgcgcacacggtcgggcaggcgcagtgccaaaacttccgcgacaggctctacaacgagaccaacatcgacgccgccttcgcggcggcgctcaaggccagctgcccgcggccgacgggcagcggcgacggcaacctggcgccgctggacacgacgacgcccaccgcgttcgacaacgcctactacaccaacctgctgtcgaacaaggggctcctgcactccgaccaggtgctcttcaacggcggcgccgtcgacggccaggtccggtcgtacgcgtccgggccgtcgaggttcagaagggacttcgcggcggccatggtgaagatggggaacatcgccccgttgacgggaatgcagggacaaatcaggctcgtctgctccaaggtgaattaattagcggtgatcatcaacgaaaattctgagtgcatgaggggacaataataaggctatatatgccactgaaatcgatatttgtgctttgcactgatcagtgatcatgttcacgctttcttggatcaaattgtgtccgagaaagtggcgtgtttgcaagaatttgatcgtgtacactgaattctgaagagccctcatgcaaatgcccgcgagattaactcccttgcct

SEQ ID NO: 22699 - DNA, 1838 bp, Oryza sativa
  ref <308>: DATABASE ACCESSION NUMBER: AK072863
  ref <309>: DATABASE ENTRY DATE: 2001-12-06
gacagaacgaattagctgcatactgcagcaactaataaacgatggatcgtcccaacctcgccgtggccgtggtggggctaccggcggtggtggcggcgacgctgccggcgccgtcatggcagttcttcgacctattcctccccgccggccccagccaccgctcctccggcggagggtttggcaagtgggtgctgatgaaccacgaggagtacgtcgagaagaagtcgctgtacgccatgaaggccgccggcgacatcggcgggaagaccatcgacgcgagcctctcggcggcggaggaggccaaggtgacgtgggtggttgaccccaaggggacgccgggcgacaccaccttcaccaccatcgcggcggcgctcgagaaggtccccgaggggaacaccaagcgcgtcatcctcgacctcaagcccggcgccgagttccgggagaagctcctcctcaacatcactaagccctacatcaccttcaagtccgaccctgccaacccggcggtgatcgcctggaacgacatggctgccaccaggggcaaggacggcaagcccgtcggcaccgtcgggagcaccaccgtcgccgtcgagtccgactacttcatggcctacggcgtcgtcttcaagaacgacgcgccgctggccaagccgggtgccgagggtggccaggcggtggcgctccgcctgttcggcaccaaggcagccatctacaactgcaccatcgacggcgggcaggacaccctatacgatcacaagggactccactacatcaaggatagcctcatcatgggcagcgtcgacttcatctttggattcgggagatcactctacgagggctgcaccatcgtctccgtcaccaaggaggtgtccgtgctgacggcgcagcagaggaccaagaccatcgagggcgccatagaaagtggcttctccttcaagaactgcagcatcaaaggacaagggcagatctacctcggccgggcatggggggattcgtcgcgggtggtgtactcctacacggacatgtccaaggaggtggtgccgatagggtgggatggctggaacatcgccaagccggagagcagcgggatctactacggcgagttcaagtgcaccggccccggctccgacgccaagaagagggtgggttgggcgcttgacctcaccgcggatcaggccaagcccttcatcggcacgcactacatctatggcgactcatggatcctcccgccaccagacgggaaatcagcggcatctacctcgacggcgagtaaatcaaccgcatcggcgatacccaggaactcaactgcaccggcgacggcaacggaaagtaactcaactgcaccggcgacacccagcaactcaactgcaccggtgacggcaagtaattcaactgcaccggcgacggcgagtagttcaaacccacctgccacgaagagttactcgggtccaccggcgacgccaagtgcttcaagcacaccggcaaaggcgagtagataagtgcagcggcggcgcggtgagtcacaacttcatctacggcaattgaaggatcctcccgccaccaaagtgattcaaatatttcggagtaactattaccaatttaattgggcccaatcaattctgttttggaggcccgtttgttctttgtgttgtgttaattgggccggattggtcggccggccacatagatgtgtaacatttgtatttttttcccaattcatttttggtcttctatcagtgtacgcaccttcaaaatggtgaatttttacagaagtttttgaagaagacttgtgctctgtatgcgtggcaatttactttaacgatcgacacgacggcatc

SEQ ID NO: 22700 - DNA, 1557 bp, Oryza sativa
  ref <308>: DATABASE ACCESSION NUMBER: AK072864
  ref <309>: DATABASE ENTRY DATE: 2001-12-06
gagtggagtaaaactgtgcttcaaaccatccgcggcggcgtcagtgcaccagacgctcaggatggcggcggcggcggccatggccgcgagtcgccgcctgctccatctgcggccggagctagggctgcgcctgcgctcccgtgccctaatcccctacccttcctggacgaaggcgatgggtcgttgccggtatgagccgtcaccgcggaggctctcgagctgccggcgagcagccaagaatgagcggccatggaggtcgagttcaaatgagcagctgactgatggcgatggcacagccaagtacatgggcaggaatttccccgatgaattcgcacagctttctttggaagaggaggaaagcgacgatgaggcgcacggaatcagcgaaaccatggtgaaagatgtggagaaggctgcggtcgagttgcttgctggcagagcattcacagtttcagatcttaggaagaaactacgtgctaagaagtttcctgataatgcagttgattctgtaattgctgatttcaagtcaaggggtctgttgaatgatggttattatgcggaatctttttcacgatctcgatggttatcatcaacttggggcccaaagcgtataaaacaggcacttcgccaaaaaggggtgcaagatgcagaagtagaccaggcgacaaggagagtattccaagatggtcattcaaaccagacaatgtatggcatttccgaggattcaatggatcatctctttgagcaggcagctaaacagtggcagcgggggcaaagcttgccccttgagaatcgccgtgcacgcgtagtgaggtggcttcagtaccgagggttcaactgggctgtaaccaatgccattgttaggaagctggaagcacagaaacctccctgagcgtcagcggcgctcggagacgggctggatgcgctcctggcctcctctgccggatcgggggctgccgctggtctggccgggctctcagccggcgcctcggaggatgacacggatatcgcagaggtgccgatggagggaaccggatcctcgctacgtcagagggacgtcgggcgcagctgcgccgttcgttccgcatccgacggacaggctcgcccacggccccccaaaaaaaaaatacggtccacatcgccaccacggagccgcagccggccgtgccgccggggacgactggacgagacaagtgggagacctctgccgccgccgccacacggccgcatcccccgtctccccgacgaagccccttctgtcgccaccttcctcctcgtccccaacgccgcctccgtgtcctccgtcatgcgggaggcctccgctgctctccggcgtaaattgagacgcaacaggaatgaagcaatttgaacagagcaaacagtgcattgttgtgagatttttttttttgagagcatcctttgttcacagcaagagagcatttctgaagaattgagattgagtcaatattgaatgagatcttcaaatgtaattttgagtctgatcattgcgatcgtgtaaattgagattgcaaaataagaaacaagtgttttcagtgc

SEQ ID NO: 22701 - DNA, 2214 bp, Oryza sativa
  ref <308>: DATABASE ACCESSION NUMBER: AK072865
  ref <309>: DATABASE ENTRY DATE: 2001-12-06
ggtagctccccaaccccaatcccaagcccaagcaggtggcggcggcggcggcggtggcgggacggccgagcagttctggtcgctgctggacaaggcagaccggcgcttcgccctcgtgcgcgacctccccctcttcggccgccgggagcccgatgaatacggcaaggccttccgcatctacacccagctgtggcgcatgcagcaggagcaccgtcaccgcctcctcgacgccgggctccgccgatggcaggtcggtgagatcgccgcccgcatcgctcacctctactactcccagtaccagcgcacctcggacaccgccctcctctccgaggccttcgtcttctaccacgccgtcctcggccgcggctacttcctcgccgacgccgccgaccatctctttgcccccaccaagcacctccgcttcctcgccaggttcctcctcgttgcgcttctactcgccaggcgcgccgacactgtccctcgcctcaccacccacatccgcactctcctcgacgactccaagaagaccctccaagaagccgactacaaggagtggaagcacgtcgtccaagaaatcgcgaggtttctcagagctgactccccctttatcaacatgagaccactcaggtacagctacgcatttgatcctccccctgatactcttcctaccgtcccacctactgtcaagaagcgaggtctggtcttaagtgatgccatgctatgcagctactatcaaaacgaggtagggtaatgcttcctctgtctcaccttctctttttttctgtttttaacacaacaaaaataatgaggagttgcctcgctatgtttgttccactcagatcaaatttacagacctcaccatagatgttttcagaatgcttcaatgcctcgaatgggaaccatgcggttcttttgcactaaccaatggttacagtacccgcgatgaaagtggacaaaatcatcccaatctcttaaaagatctgagagatgctgcgctgcctccaaacccacttaaaacaattctctatcgtccctcagtgactcatttcctaacagtaagtctcttcttcctcatttgatgcttgacttactgtcttatcctatgatttagtgaatgcatgcaatcttaaaatgtatttcatacaccatagttatctactagtataatcatcagagattgaaaaaaaagggtaatcactatggtagacagttaccatatgaagaagtttttggtgcttgcatgttactactcccctgaaaaataatattggcatttgacacatttctgctgcatttagttcaccttaagatgagctagtttaacttgttggatgtttcagtaatgggctagtataacaattgacaacgtaggaaattccatgagaaaaaaactatattactagtattaactaattgatttaattattctgacaagaaagcatgccaatgatcttcttgattcctcccgagttcatgacatgaggttcaaatgcacaatgaatctgcttggtggcatacatctgattgtctaatgtctacaccaataatattggtattaatggaccagtaaacttttgacgacaaaactactcttttggtaaccatttcggagaaccacaccactaactattgttattgcataacaacaaggaaccatgcttcttgtggacatgatgacttggacctacatggtaacaacataatcctgtctgacccatcacatggacattgacttccacacccactggctggcagtaggtatcacttgtatatacttgacttccataccacactggtagcaataggcataccacttgtctatacttggaagggagagggatgagactatttgatttctgctttgtgttgtgcgtgaagtggctaggtgaggagagccaagattcatctgtttcttgcatttggttttcttattcatcacatagatcatgtttgttatcccttttgtttaacaattagttacatcgttgcaagccttataagaccaagcaatccacggaataaagcgagctgagattaatttgtaaactctatcctctctctctctctatgacatgacggctctgggcaagcaaggtcctccagttgagcatgggtatgcgttacgcagcttggggccacctccaagccataacatctgttcagtgtattgtttcttgtttggaatttctttcataccatggttctatattagtt

SEQ ID NO: 22702 - DNA, 889 bp, Oryza sativa
  ref <308>: DATABASE ACCESSION NUMBER: AK072866
  ref <309>: DATABASE ENTRY DATE: 2001-12-06
gagccgtcgtctacgtacgtctgctcctgctcgtatgccgccaccgacgtggggggcgaggcgagcgccagcggcggtgccgacttgggtgacctgggaggggagttgtgactgctgcggattcacggaggattgcaaggccccatatatcgctggcatgcgggcgccgtacgagaggatcgaggtgggtctgcgggctctgcacggacgccatcgacgacgagcttggctgcacctcttcgcccatttcgccggcggaggcgctcgaccgcgcgccgcgccttcatctgtggcgtcggatgagtctccaccgcgccactgttggcggccaagagcgcggacgggattgatattcgtcgtctttcttctcttgctccgccgtaggctcgctggccccgttaccgggaggcgtcgagaagggatcgattggaaggggaagatatgaggcatgaggtcaaccctttgggatccataccgccaaccatcgctctacgtcgcgccttccccatcacctcgtcaatcggaagcatcgccgcgtctagcccgaagaccggccgtcgaccactcaacagccggcccgtgtctgcatgcagccgtgcaccgagcccacgcagttcccaattgccaccaccacatctcaggccacttggacaacaacatcgagcgccacctcctcggttcacggtaaaatccattttccccatcctcctttctattcctcctatctaatgatattttgaggtttttttttctcctcatctccattatgggtacatctctgtgaagctataaaatacagagagattagcaacactaatatgcatgcctttgtcttttgtaaactgtcaggattaataaatagtatatgtcttagtatagttctgaattt

SEQ ID NO: 22703 - DNA, 1053 bp, Oryza sativa
  ref <308>: DATABASE ACCESSION NUMBER: AK099307
  ref <309>: DATABASE ENTRY DATE: 2002-08-28
ggtctgaacggggggagctgtggccacacctctccccccacctcctcctcctctagggtttcctcccaatcccctccatggccaagaccaagcagggcaagaaggacgtcgaatcctacaccatcaagggcaccaccaagatcgtccgagtgggggattgcgtgctgatgcgggcgtcggacacggagaaggcgccgtacgtggggagggtggagaggctggagacggacgggagggggagcgtgcgggtgcgggtgcggtggtactaccggccggaggagtccaagggcgggaggaggcagttccatggcgccaaggagctgttcctctccgaccacttcgacacccagagcgcccacaccatcgagggcaagtgcgtcgtccactccttcaagaactacaccaagctcgacaacgtcggccccgaggacttcttctgccgcttcgagtacaaggccgccaccggcgccttcacccccgaccgcgtcgccgtgtactgcaagtgcgagatgccgtataacccggatgatctaatggtgcagtgcgagggatgcaaggactggttccatccatcttgtatgggaatgaccattgagcaggccaaaaaattagatcatttcctgtgcgcagattgtgtcaaagaaaatggcacgaagagaccttcaaattcatatccagcatcatcaaattctgattctaaggttgagccaaaaaagcggaagaggtaattgctgtgacacgagccatccgtggtgaggagatgcactgtttatggcgtcagctcttcattgctggtgcaaagtcaaaacgtggagggtgtacagtgcagatgaagagctaggctaggtccaagatcgcgttaacttatcatttgcccgaatttgggaacgtttccatcagtctaggcaaaagaacgaacttcattgatgctgttggctcgttcagttgtagccagtgtggactggatgagtgtcagcgtgttttagctttttgcctggtacaggaaaacgttcccagcgtggatgatgttgatgatagcttaactgtagtttc

SEQ ID NO: 22704 - DNA, 1203 bp, Oryza sativa
  ref <308>: DATABASE ACCESSION NUMBER: AK072867
  ref <309>: DATABASE ENTRY DATE: 2001-12-06
gagctttcccctctctttcgcttcgcgagattggttgattcatctcgcgattgatcgagctcgagcggcggtgaggtgaggtggaggaggaggaggaggaggagatcgggatggggagagggagggtggagctgaagaggatcgagaacaagatcaacaggcaggtgacgttcgcgaagcggaggaatgggctgctcaagaaggcgtacgagctctccgtgctctgcgacgccgaggtcgccctcatcatcttctccaaccgcggcaagctctacgagttctgcagcggccaaagcatgaccagaactttggaaagataccaaaaattcagttatggtgggccagatactgcaatacagaacaaggaaaatgagttagtgcaaagcagccgcaatgagtacctcaaactgaaggcacgggtggaaaatttacagaggacccaaaggaatcttcttggtgaagatcttgggacacttggcataaaagagctagagcagcttgagaaacaacttgattcatccttgaggcacattagatccacaaggacacagcatatgcttgatcagctcactgatctccagaggagggaacaaatgttgtgtgaagcaaataagtgcctcagaagaaaactggaggagagcaaccagttgcatggacaagtgtgggagcacggcgccaccctactcggctacgagcggcagtcgcctcatgccgtccagcaggtgccaccgcacggtggcaacggattcttccattccctggaagctgccgccgagcccaccttgcagatcgggtttactccagagcagatgaacaactcatgcgtgactgccttcatgccgacatggctaccctgaactcctgaagggccgatgcgacaaccaataaaaacggatgtgacgacacagatcaagtcgcaccattagattgatcttctcctacaagagtgagactagtaattccgtgtttgtgtgctagcgtgttgaaacttttctgatgtgatgcacgcacttttaattattattaagcgttcaaggactagtatgtggtataaaaggccgtacgtgacagcctatggttatatgctgcacaaaaactacgtatggtacagtgcagtgcctgtacatttcataatttgcggtaaagtttattgactatatatccagtgtgtcaaatataataaaatgtcgaggtttaattacc

SEQ ID NO: 22705 - DNA, 2108 bp, Oryza sativa
  ref <308>: DATABASE ACCESSION NUMBER: AK072868
  ref <309>: DATABASE ENTRY DATE: 2001-12-06
gcattgctgcgccgtgctcgaacagatctcgatctcgatctcgatctccgcacgcaccaaggcgaagccaattccactaccaccgctcttccttcttctcactccttctcgcgactgcggcgagggtgagtctcctgtcgtgagaatttcggtctaccggcggcggcggcggcgttgggtgttcttcgcgtcgtcagacgtcgggatctgaattactagacttccaataagaaggaaacaccttagggaatgcagaaagatgtgcttgcatgctagagagctaccttgtgagggaattggcagggtagcaagccatatttctccttccacaactcttcatgacattggaacacaagagtatatacagcgcttgctccatgtgctctcgcactatggggttcgacgtggcaactcaaccatcttcttagatcaccatcttggtggagacggttgaagtcacctatcatttctaggctcctggttaccacactttgagctttgggattactgctttctttggcgtgatggcggagcagagaggaaatatgttgatgaaaaagtatgagatggggaaattactcgggcaaggaacctttgccaaggtttaccatgcccgtaacaccgagacttctgagagtgttgctatcaagatgattgataaagagaaggttttgaaaggcgggctcatggatcagatcaaacgtgagatttctgtgatgaagttggtgaggcatccaaacattgtgcagttatatgaggtcatggctaccaagactaagatatattttgtgctggagcacgtcaaaggtggagagttgttcaacaaagttcagagaggaagactaaaggaagatgcagcaaggaagtacttccaacaactgatttgcgctgttgacttttgccacagcaggggtgtttatcaccgtgatttgaagccagaaaatcttcttcttgatgagaacagcaatctgaaggtttcagattttggcctaagtgctcttgctgattgcaaaagacaggatgggctgctccacacaacctgtggcacacctgcttatgttgctccagaagtgatcaacagaagaggctatgacggtgctaaggctgacatatggtcttgtggagtgatactctttgtgctattggccggctatctacctttccatgataagaacttgatggatatgtataagaagattgggaaagcagaattcaaatgtccaagttggtttaataccgatgttcgaaggctcttgctcaggatacttgatcctaacccaagtacaaggatctcaatggacaaaatcatggaaaatccttggtttaggaagggtctcgatgcaaagctgctcagatataatctacaaccaaaggatgcaattcctgttgatatgagcacagattttgactccttcaatagcgctccaacattggagaagaagccgtccaacttgaatgcttttgatataatttctttgtcaactggacttgacctctctggtatgtttgaggagtctgataagaaagagtccaaattcacatccaccagtacagcttcaacaatcatatctaagattgaggatattgccaagggcttgcggttgaagctcacaaagaaagatggtggactgttgaagatggaaggctccaagcctggaaggaaaggtgttatgggcattgatgcagagatattcgaggttaccccaaactttcatcttgtggagctaaagaagacaaatggtgatacacttgaataccgtaaggtcttgaaccaagagatgagaccagctttgaaggacatagtctgggcttggcagggtgagcaaccgaagcagcagcagcagccaacgtgctaaaaaactttgacaagggcaagttttttgcaatttgagtcgacttccaatcgtttatgtatttctgcagcttttgttcctcttgttattcattttcattcctcatgtattgttaatattaatatcgatgctatcttcaaatgaggatttatttgaaaaaaatgttgagtttgtttctggatgttactgtttttgctcatggagaactgtaatactgacatttttcatttatcatgacgcaaaaagatgcatatt

SEQ ID NO: 22706 - DNA, 2851 bp, Oryza sativa
  ref <308>: DATABASE ACCESSION NUMBER: AK072869
  ref <309>: DATABASE ENTRY DATE: 2001-12-06
gattatgacttgtgatctgcgaggatgcaggtgcaggggttctttgacaggttgacggggaggaacaaggaggcgtggaaggaagggaggatccgtgggacggcgtccacaacatcatcggccacaaggagggcgtcgccttccgcctcgtcagcgccaccgcccgcgacccaagcaatggagggagggggaagctggggaagccggcgcacctggaggagctggtggtgacgatgaagtcgacggcggcgggggagtcggtgttccgggtggcgttcgagtgggacgagtcgcaggggatccccggcgccgtcgtcgtcaccaactccaaccggtccgagttcttcctcaagacgctcaccctcgacggcgtccccggcaagggcaccgtcgtcttcgtcgccaactcgtggatctaccccgccgacaactaccagtacgagcgcgtcttcttcgccaacgatacatatctgcctagcaaaatgcctgcacctttgatcccttaccggcaagaagaactcaacattctacgaggggacggtaaaattggaccatacaaggagcatgaccgtatctaccgttatgattactataacgaccttggccaaccagacaaaggcagtaaactagtacgaccagtcctcggtggcagccaagaactcccctatccccgtcgaggcagaactggccgggccccaacaaagactgacccaaatacagaaagcaggcttcctctgctggacttgaacatttatgtcccacgcgacgaacggttcgggcacctcaagatgtcagacttccttgggtactctcttaaggctattgttgagggtgttctcccaataataaggacctatgtcgatacgacaccaaaggagtttgattcttttcaagacatcatggaactctatgaaggtggattgaaagtggccaatgcctctgcactagcagagatcaagaagagagttccctttgaacttattaagagtcttttgccagttgctggcgatcaagtcttgaagttacccctaccacatgttatcaaagaggacaaatttgcttggaggactgatgaggagtttgcacgagaaatgctagcaggagttaacccagtgatgatcaagcgtctgacgaatttcccggcaaaaagtactctggatccaaatgtgtacggtgaccataccagcaagatcaccgaagctcacattaagcacaacatggagggcctcacggtgcaaaatgcactgaagggcaacaggcttttcatcctagaccaccacgatcacttcatgccgttcctggacaagatcaacaagttggacggtaacttcatatatgcgagcaggaccattctgctcctgaaggacgatggcaccctgaagcccctggcgatcgagctgagcctgccgcaccccgatggccagcagcacggcgccgtcagcaaggtgtacactccagccaacaccggcgtcgagagccaaatctggcagctcgccaaggcttacgcctccgtcaacgactctgcttggcaccagctgatcagccactggctgaacactcacgccgtgatcgagccgttcgtgatcgcgacgaaccggcagctcagcgtggtgcaccccgtgcacaagctgctgagcccgcactaccgcgacacgatgaacatcaacgctctggcacggcagacactcatcaacgccgatggcatcttcgagaagaccgtcttcccaggcaagtacgcgctcgagatgtcctccgtcgtgtacaagaactggaagttcaccgagcaggctctccccgtcgatctcgtcaagagaggggtggccgtgccggacccgacgagcccgtacaacgtccggctgctgatcaaggactacccgtacgccgtggacgggctggtgatctggtgggcgatcgagcggtgggtgggcgagtacctggccatctactaccccaacgacggcgtgctccgcggcgacgaggagctgcaggcgtggtggagggaggtgcgcgaggtcggccatggcgacctcaaggaccaggactggtggcccaagatggacaccgtccaggagctcacccgggcgtgcaccatcatcatctggatcgcgtcggcgctgcacgcggcggtcaacttcggccagtacccgtacgcggggttcctcccgaaccggccgacggtgagccggcggccgatgccggagccgggcaccgaggagtacgcgaagctggagcgcggcggtgacgaggccgacctggtgttcatccacacaatcaccagccagttccagaccatcctcggcatctcgctcatcgagatcctgtccaagcactcctccgacgaggtctacctcggccaacgcgacacgccggagtggacgtcggacgccaaggcgctggacgcgttcaagaggttcggcagccggctggtggatatcgagaaccggatcaaggacatgaacggcaactcggcgctcaagaaccggaacgggccggtgaagatgccgtacatgctgctgtaccccaacacgtcggatgtcaccaaggagaagggccaagggctcaccgccatgggcatccccaacagcatctccatctgagtctcgcgtgcattctttagatcgatatacgtgtgctattgctagtgttgcgcgtttgccgtcgtcgatttgtttcattgtttgtatcagtgtgcattaccgtgattcttcgtagttcagggtctcagggataagtcgttgcaaatgtgagtaaccttgaggcatggataatttcattaggaattattcacatggaataatgaaagttaataaaatcattttgctttcagagtttgtttcaacttttatgatcc

SEQ ID NO: 22707 - DNA, 1410 bp, Oryza sativa
  ref <308>: DATABASE ACCESSION NUMBER: AK072870
  ref <309>: DATABASE ENTRY DATE: 2001-12-06
gtctcgccgcgcgccacgcgcgggaaccggacgaacacccacctcccaccgcccaccgcccaccgccgcgccggccatggctcccctcctcctcctcctccccccactccgcctcctccccgccaccctcctccgcgccacaagccgcccggcgtcgccaaggcgcggcctctcctactcctaccccaggcgcgtcgccgccgtcctgcggcggggctgtacccggcgtacgtgacggccggcgccgcggtggccgtggcgcggcccgatgcgttccggtggttcgtcgcgctggcgccggggtcgtacacgttcgccctgggactcatcatgctcgccatgggcctcaccctcgagctccgggagttcttggctctcctccgcgagaggcccctctccatattgtttggttgtgctgcacagtacaccataatgcctgcctttggagcaattgttagccgggtgctggggctctctccaccaatatcagtgggactaattctgctaggatgctgtcctggaggaactgcttccaatgtggtgactttagttgctaaaggtgatgttccactatcaatcgtcatgactgtgtgcagcactcttggtgcagtgttccttactccactgttaacaaaaattcttgctggtgcttatgttccagtggacgcggtgaagctttccttaagtactctgcaggtggttgttgctccaattctattaggttcctctatacaaagtgcattcccatcagtagttaaatttgttactccttttgcccctcttctagcggtcttaacttcatcacttctggcgtgcagcgtgttctctgagaactttgtacggctgagatcgacaattgctgatgcatcatatgggaatggaggcctgttttctggggatattggggttgtgatgctgtctgtcttcttgctgcactgtgctggttttgttgtcgggtacacgacagcagctataggtggtttcaaggaaagacaaaggagagcgatatccattgaggtagggatgcagaattcatccttaggagtagtattagcaactgcacatttctcctcttccttggtcgccttgccagctgcactctccgctgtcatcatgaacataatgggtagcacattaggtcttgtatggcaatttatgacaccgcctggttcgaagaacgaaaaccgttgactcgcgtgatgtatgacctgctcctactttgtgtggttaatctcctgtcatagtctgctgtaagaaacattagaaacgttaaaaccatgccgtgtatatcctcaactttcagcccttcctgatgtcaacttgtcaagtagggattgtacatagttttggaatgttgattttctgaacttttgctgatatacagtctaaaatgcacatgtggccaaatcc

SEQ ID NO: 22708 - DNA, 2402 bp, Oryza sativa
  ref <308>: DATABASE ACCESSION NUMBER: AK072871
  ref <309>: DATABASE ENTRY DATE: 2001-12-06
gggcttctctcaactactgtttgcttcgccgccgtcgctggcggcaaaccgccatgcctcgtcgtcgaggaacccctctccctactatcctcctcctcctcgcgttcgtcggcggcgcatgcggaacggagatcctctccaagtcccgcctcgagagctgctcccacgactcggatgccggcggccgcctcaagtgcgaccggaagctcgtcgtcgacctggccgtccccagcggcgccagcggcggcgaggcgtcgctggtggcgcgggtggccggggtggaggaagagaacgacacgccatcggcgacgaagagcatccgggatccccccgtcatcaccgtcagcaagtccgccacctacgcgctctacgccctcacctacctcgacagggatgttgcttacaggcctgacgagaagtatgtcaaaacacacaaatgtgaaccatatgccggtgctaaagttgttggagagtgtgaaaggttatgggatgagaaaggcaatgtaatcaagcaaacagagcctatttgctgtccatgtgggcctcaccgtgtacaatcgaaatgtggagacatatggtctaaactgaccaaaggaaaagctaatacggctcactgtgtgcgatttccaggcgactggttccatgtattcggaattggagcatggtcacttcggttcagtatcagagtacaagtgaagaaaggatcttctgtatgggatgttgttgttggtccagagaataaaactgttgtttctggagataactttctgagagtaaaagttgttggtgattatactggttatacaagtatcccatcatttgaggacaactatcttgtgactccacggaagggtactggtagtagtcagccacaagaccttggtaatgaacattccaaatggatgatattggacagagttcgttttacactagacgggcttgaatgtgacaagattggtgttggttatgaggcttatcgaaaccaacctaatttctgttcagcaccatatgggagctgcctgggaaaccagctttggaacttctgggagtatgacaaaagacggatcgacaacagccaactgcccctatatattgtggaaggaagatttcagaggattaatcaacatccaaatgcaggtgctcatacattttctgtgggtgtcacagaagatcttaataccaatttactgatagagttgatggctgatgatatagaatacgtctatcagaggagtccagcaaagataattgacattcgcgttccaacatttgaagccttaagccaagttggtatagcaaatgtcactactaaaaatattggtaaactggagtcttcatatagcttgacgtttaaatgctcaagtggtatcagtcctgtggaggagcagctctataccatgaaacctgatgaagtgattgcccgatcatttgagttgcgttcaacaacagatcaagcagcaatgcatcaatgtgaagctattctgaaggcatcagactttagtgaacttgacagagaaggataccgtttctctaccgcagctacggtttataacaatggagcacagatcggtccaacgaatgaccacaagaaaggcggcttctgggattccatcaaagctttgtggcgtaacctgatcgatttccttactggcagattgtgctggaccaaatgcccgagattgttcgacttcggctgccatattcagtacgtatgcatcggctggatcctactgcttctcctgatacccgcagctgtggttttcctgtggcttctgcatcaggaaggcttgttcgacccgctgtacgactggtgggggctggagccggacgacgactaccgcgcgcgccgacggcaccagaaagggcggcaccaccggcaccatcacgaccaccggcaccgtcacggccacagccacggcgaccaccaccaccactaccacggcgggcaccaccagaggcgcaggcaccaccacccaccagcgtgggatgtggaaggccaccaccacgacaggcagcagcacagccacgaagcggggcgcaaccaccaccgtggctacggcgaggtggtggccgcgggcgcggcgccgctgcgtttggacagggcgagccggccgggccagacggaggtcgacgccgtggtggagtacagggagcggaggagccgccacgagaggcacggcgggcacgggcaccgcgacggccactactccccgtctgtgtaagggatggctctgacagtctgacgcatctagtgtacgtgggattgacatttgagtattcaccagcgatctcgtggtggacttttcagtcagttcttgacattgacgtttgccttgtactaaagccaacgtggacttttaataccctccgttttttaatagatgacgcagttgacttttttc

SEQ ID NO: 22709 - DNA, 1441 bp, Oryza sativa
  ref <308>: DATABASE ACCESSION NUMBER: AK072872
  ref <309>: DATABASE ENTRY DATE: 2001-12-06
gagaagaatcccagctaccaaatcgaacctaccaactcattcccgatcgatcgatcttaaaaaaaaactaatcgtaacttttctctctctctcctatctttagaactagcaggtagcaactgcttcgagtgtagtctggtgaacgtacgatctttcgttcgttcatcaagatgaccgtgatcgacggcgccgtcgctgccgacgccggcggcgcagccgcggcggtggtgcagccggggaacgggcagaccgtgtgcgtgaccggcgcggccgggtacatcgcgtcgtggctcgtgaagctgctgcttgagaagggctacactgtcaagggcaccgtcaggaacccagatgacccgaagaacgcgcacctgaaggcgctcgacggcgccggcgagcggctggtgctctgcaaggccgacctcctcgactacgacgccatctgccgcgccgtcgccggctgccacggcgtcttccacaccgcctcccccgtcaccgacgaccccgagcagatggtggagccggcggtgagggggacggagtacgtgataaacgcggcggcggaggccggcacggtgcggcgggtggtgttcacgtcgtcgatcggggcggtgaccatggaccccaaccgcgggcccgacgtcgtcgtcgacgagtcctgctggagcgaccttgactactgcaaggaaaccaggaactggtactgctacgggaaggcggtggcggagcaggcggcgtgggaggcggcgcggcggcgaggggtggagctggtggtggtgaacccggtgctggtgatcgggccgctgctgcagccgacggtgaacgccagcgtcgcccacatcctcaagtacctggacggctcggccagcaagttcgccaacgccgtccaggcctacgtcgacgtccgcgacgtcgccgccgcccacctcctcgtcttcgagtccccttccgccgccggccgcttcctctgcgccgagtctgtcctccaccgcgagggtgtcgtccgcatcctcgccaagctcttccccgagtaccctgtccccaccaggtgctccgacgagaagaaccccaggaagcagccgtacaagatgtcgaaccagaagctccgggacctggggctggagttccggccggcgagccagtcgctgtacgagacggtgaagtgcctccaggagaagggccacctgccggtgctcgccgccgagaagacggaggaggaggccggcgaggtccagggcgggattgccatccgagcatgaggaaaacagcagagcaaaagagcaggaaaaatgtccatatcgtgttagtgtttaccgtgctgtaaaaccaaagtagtagtgttcgctggtttgtctggtctgaagccctgtaatacacccctgttgttgttacatgtgcaccagagtgaccgaataagtatttctatgaagttctctatgttcac

SEQ ID NO: 22710 - DNA, 1279 bp, Oryza sativa
  ref <308>: DATABASE ACCESSION NUMBER: AK072873
  ref <309>: DATABASE ENTRY DATE: 2001-12-06
gataggtcaacttgaatcttgttcaaaaattcttttcaagtcttaggtaggtcactgttggtgccaccttcttgagaagtttatgatctgcatgttcacctaagatatccagtcaagtgctaaaaaggtcacaaaaatgggaggcagaaaggacaatcatgactcctcaaatgccgacaaagggttccatggagcgtatccaagcggttaccctggtgcatatcccctaatgcaaggataccctaattcacctggacaatatccgactcccggtggataccctagtgcaccaccgggacaatacccaccagccggtgggtaccctggtgcacaatatccaccaagcggttaccctccatcacaaggtgggtaccctccaggagcgtatccaccatcaggatatccacaacaaccaggctacccgccagctggttacccaggtcatggccatggtccacccatgcaaggaggtgggcatggtgcaggcgcatctggctatggagcgctgctcgccggaggcgccgcggtggcggctgctgcggtgggagctcacatggtacgacccggcggcggtggcggccacgggatgttcggccaccatggtggcaaattcaagaaaggaaagttcaagcatggcaagtacggcaagcacaagaagtttgggcgcaagtggaagtgataagcaaactaaattgcactgcagtttgcctccggtttcttgtttggttgaagtgctatagcatgatgggattaagtgtccatttaccatatatatatatatatattcatcgaaatataaccatacgagatcttattttaaagataattgtaataaatataatggtgtaatggatcacaaattagaaaaaaggtttaggagaaaaaacattttgagcttgctaacagaaaattaaacccaccataagcaatcagaataggccacatgtgaatggctatatccggttaaatccgccgaatccaatcatcgaactcttatttcccacaaaccaaactcatccagcctcatgcacctaactaatcacatccatccttagacgatgcatgcgtgtggacattcttgccaaaaccaacaattagccgtgagagcccaaacaactgagtactccagcctacgattgtcaggatattttctcatctaacttattctagtattaggagttatgaagatatgaaaagccattttagttcagaaaattgtacgataaatcatgtaacctgtttctgaaatggaaataaaatatgagaaaaagatactacc

SEQ ID NO: 22711 - DNA, 1997 bp, Oryza sativa
  ref <308>: DATABASE ACCESSION NUMBER: AK072874
  ref <309>: DATABASE ENTRY DATE: 2001-12-06
gtcgctgctccctattccccattccccccacgcgacagtggagacgacaagtgaagcgatcgccacaagccgccatccgcagcgccgactccgacgccggacgccgggcgccgcgtcggcgccgagacgctcacgccggccggccatcacggtatagccaccaccgtgtccggcatccggccaggcggcgcaggcggcaggggaagatttcagaaagcctgagtttggttggtattgttgcgcgaagataaacaggaaagaaagtgagatcagggaacaagtgtctaaggagaaagtgtgtgaagacgaggcgagctcccttttgggagaagattcctttttaggcatatgcttccctacaaaacttccccaaagtgaacctggaggagattttttttttggcgagagagagagagtgggaggggcacctaccccttcaagcccacgaccacggccgccgcctcttcttgtgcacaaggggacgttgtgtgcttcgtgcacacgcatggccgacacgagaggctccacttcctctggcggcggcgatgacaggggcagagaaggccacgatgacttcacagggggcggccaatacaacaggtaccataggatccttgaggccgtgccgtcaccccttgttaggcgtgagaatggtgtgcatcatcagtaccccactggcctaatccaccacccgtcgtcgacaatgccggtggcgccatgctcctacgtgccccggtacaccatggtgccaacatccgccatgctcccgctgcagcaccaccaccgccaattgcagatatctcaagaagacttccaagaccgagttccctccaataatgttgcagctccgcatcttcctagcaattttcaggatttgaggccaatgtgcaatgggccgccattcatgtcttatggccagactgcttccaatagaaatgttctttatcagaatctgacgccatactccttcaatgcatgggctagcaataacatgccgaggaaccctgtctacactagttaccaccctactgcaattgaggatccccatgctactccattccacatcaacaatcatgacacagaccaaggtttcttcaccgtttctactagcttcagggtggatcaatcatttgtacatgctccttcaccctttccaccagtgtcttcatcatcccgcagtttctcttcagctcaaatttcaaatggaccgatagacgctaagaaagccaagaaatcagatataaaagatcaaccaattgttttaagaagaagtgatacggagagtgaaaaaaatgatgaactagatcaaactccggctagtgagccttcaagcatgagtcataacagtgcaaattcgactattagattcaactgtagagaataccgtgttatcttgcgcaaggagttgacaaatagtgatgttggtaatattggaagaattgtgatgccaaagagggatgcagaggctcatcttccagcattgcatcaaagggaaggtgtgatgctgaaaatggatgacttcaagcttgaaactacttggaattttaagtacaggttctggcccaacaacaagagcagaatgtatgtcttggaaagcacgggtggctttgtgaagcagcatggtctccagacaggggacatattcatcatctacaaaagctcggagtctgagaaattagttgttcgtggggagaaggccattaagccgaatgtcatcatgcctattgtggactgcagctgcaaaaatgatctcaacaacagcgaagaatgcgggttcgctatcagcctgctgactaagaaaacctgatgtggaatggcagcttcatgtcttgagaccatcatctgaaagcctcattacaaggcaatgcatttttgttattggagaatgtgttgtcccacacttttaacttcatagataaaagtacaagactatggattattatttagtaactctttttttttccaaataatagtccacatcagagattgcaacagcc

SEQ ID NO: 22712 - DNA, 3453 bp, Oryza sativa
  ref <308>: DATABASE ACCESSION NUMBER: AK072875
  ref <309>: DATABASE ENTRY DATE: 2001-12-06
gtacttcgccggcggagtggtggttggcggcggtggggggcggtgagccggcgacggtcggcaccgcacgtcgaagcgcccggcgtccgcggtctgccgctcccggtggagctcggcgaggtggcggaggcgttgcagcctaggagaggaagcgctcggttgaggcggtggacggcggagtagcggcggccgtgggggcaggtgccggcgccaccgccaccgcagccggcttaggcggaagagacggcgggcctaacctgctactgtcccgtccccttacgcggtcacaagccattgacgccaagctggttccccttggcccttgccacttccacgccggcagcaacatccctgctacttgaggccaggtacagcttcttctttttttttttagaggtaaatggatagaaatccggcctctatggaatggaaatcatggccaggcattgctaatttggatatctatttcaataccaaccatagtctttggttattatcttctattaaaagccggcttatgaccttttggctaaaacaaatggtttaattggtttttaaaaatgccattataatttgtgtatttgtaaacatgtcacattcttttaggtttatgattaacttcagataaaagcaaccacatgtggaatagaaatacagtgtttgcaaatttgtaagcaataccttgtctgcaatgtaacattttttatatataaataccaatcaataagattaatattcacaagcattcttcaccacgcagcaaactccactgttttccattaaagatttaaagtcatatatcacatcactgaaattcattatcataagcattaaattgtaaaaacatagaattatctatgctgaaatcatgtatagtaaagcttgacctcttagtctagcgtccctccagtgttgtggtactcattgtattcacagagtacacactttcttctgtcgcttcttgtgttccgtggttcttcatttcaaaatacacaggctgctttggtgcaggaagcagcgtgctttcattttctaacataaaaacaacagatgacatcgatggtctatcattcggatgatcttgaacacacaagagcccaacgtgaatacacctgaaagcttcatgaagtggataactgtcaacaaaaaacttgtccaacaattctgttgcatttccatctttccataatctccatgcctgtagaatgaagttctgaccaaagttactaatgcatgttgctccaaaatactgctgactgctaaagtttaatttggtatcaaaattatcggcattttagagtacttacataggctgtaaggctgaaaaagtttggtgtgagtttagatgaactgattttcaggccactgacaatctccaaaagaagaacaccaaagctgtatgtatctgacttgaccgaaaaggcaccacccaacacatattcaggagacatgtaaccactgtataaaccatttcattagcaatgaatgcacaatcgttggcaaggattaattcacagtttgaatttaactagtcaataaaacctagagtgttgaaaactatctagtgggctaattactagttattacttactatgttccaacaactcgagtggtgtttgcttgctgctgattaccatgaaaaatccttgcaataccaaagtctgatattttggggttcatttctgtgtccaacaagatgttgcttgctttgagatctctatgaattattgtcagtcttgaatcttggtgaagataaagaagcccttttgctatccctttgattattttgaaccttgttggccaatcaagcacatattttcttgtagcatctttcaacaagatcagtatgtacaaaatctaatgttagtcatcataaatatattttagtcaatgtaagaacctttttgcaatgggatagaaagtcataacacaccaaaaaggaaggcgtccaagcttttgttaggcaagtattcatagatcagtaacttctcatcttcatgaatgcagcaaccaagaagtctaactaggttcctgtgctgcagttttgcaattagaaccacttcattcctaaactcttcaatgccttgtccagaaccctcattaagccttttgacagcaacttccgtgcctccctccaatattcccttcatgttgtcatcaatataaatagggaaacgctggggcagtaatattttatatagtttcaaaacgtgttatgatgtagataaatttagtactctttcttaccttgtaaactttgccaaagcctccccttccaagtagattggactcacagaaattatctgttgcagccacaatatctccaaagctaataaatggaaatttcacattttcacctccaagttcattggaggtgcccggatattctagcatcagtctcttttggatttccttgttttgtttccctgataaagttcaacacatgagatttttacaatatacttaagaaggtaccatctggaggcactatacaattttagtgtaaattcccggtatctctatagtgtcgaggcaccagtgctatctcaagaaccgtaagtcattgtcaatgcatttatctttcaaattacgaagtagctttacatttggaagacaaggccttatatcatctacctctgtgcttgcatatccaggtaaggactatgcatgtgagtagcagcatgcatactgttatcggaacaacaatcttcagtaacctgtttttctttccaactgcagaaatgtacacctcagatgttagtgttatggcatggagcataacttggaaagttaagtgttcatataactacatttttttataggaactctcatataatatcatgagcattgccactatctgaaaacgaggcgacagtgtgaaattttgcttaccaggaggctcagcaaggcggaggtacaggttctcaccaaggctggccttcttctctgagtcgacaagctcccctgtccaaaccaagcatcttgacgggtcagccatggtgccgccactgctcaagttggcgtaagcatatgccttgcaagagcagttgctgctgcactcggccgcgcactggtcgaagctcctgttccggatctgcaagaacttgtcggggaccttcatgtcaggcaatgacacgaagcggtgaccgccctctccgcatctcagctcttcctttctccggcatcctgattgcgagatgctgggatctacaggctcgaacccatcgaggcaccggcacgccgggacggcccccgtgaagtcgcagtagccaaacgggccgcacgagccatagacctcgcagctgccggcggcggggcgctggaagatcaacatccatgacgacgagctgttgtcccagctcaggaacatcatcgtgcccgtgctgtcaagtgtgaggcgtgtgtagatggagctgtcggagacagtgtatgagtagtagagcttgttccctg

SEQ ID NO: 22713 - DNA, 675 bp, Oryza sativa
  ref <308>: DATABASE ACCESSION NUMBER: AK072876
  ref <309>: DATABASE ENTRY DATE: 2001-12-06
ggcgcttcctcctctccgctcccacatcagtcaccgccggtttcgctcctcctccggttcgctcccacgcccgccaccgccaccacccgcccttcctcctccgctctgctcacacctgccgccgctaccgcgcgcatctccttcctccagatccagccaccagcatcctctcctccctccccatacacaggcgatggcggctcgcgcaggtggtggcagcggctccggcagtggtggtggtggctcgcgcaggtggtgaccgtgatgggaggtgggcgcgcgactacgacgggaggcggtcgtcggggggttcggcgatggcgacgggatgagtcgtcgggggacgcggcggcaacgggacggcaacggtgacaggggcgcggcgagctcctcctccccctccacctccccctcccacggtcccgctggcggctgggcttcccagatccggtgctgtggggcttggtgcggcgggaggacctcggtggcagtgatgctcggcgatggggctccggtgctgctcggtcggcgacggcgacgacgacctccttcctctctcctgttgatgctgtttttcttttttttttttcatgttcaaaatgcttgtatgccgtgttcacttgcatgttgattgaatctaatgaactttggatgaggatttgaatcgatgctctc

SEQ ID NO: 22714 - DNA, 1023 bp, Oryza sativa
  ref <308>: DATABASE ACCESSION NUMBER: AK072877
  ref <309>: DATABASE ENTRY DATE: 2001-12-06
gttctatctctccaccatccgcacatccctgcccgtgccctcccttcctccgcctattgctgccacgcccctccttcctcctcccatgcctaccgccgccacgggaaggaggctcgccgtcgcagccggcaaggagtgcctcggcttcatcgccggcgacaagatgggagaccagcagtgaagagggccaccgctgtgcgcctcctctcaatcccgctacttcatgggcaccgagagatgttgatgtcgaggatgtccagcagcgcgggcagcctgagttgccagtggtcgttccgttacttgcgtccgagccacatgtgccggagggcgatgtagctcaaaattcgcctgtggagatgagcatggcaacggctcccttagacctcgagagtgcgcttgctgaccaggatcgtcgcatccagtattggaggacgaagtttgaggtcgcggaactcgagaggactatgttggaagtgaggaaggactaggccgtggagacactccgtggtcgcgaggtgtggttcaactcgtatctgaagagttgctgtacctccatgtcaagagtctttagagagcttcgagtaccccgtggggatcccgaggaatcggcggctggatacatctcgtggctgaatggggcctgcgcccagctcgagggcatcggccagcatatcgacgaggccctgaagcaggagtgtcgtcgatcgagctgatatgccggggggcatgtattggcttgtatacgagatcatcgtccgcagctgcacctcgagttcctccacgaagggttttctcgctctcggagaactcctacggagatagatggcctagcgaagtcgatggcgccgctggcggaaaaggtcttccagtctatggactggcgttggccttcctggtagtctccgtgtcctatgacaaatgtcttaggggaaaagtgtaatataattttggatttttatggaactgtaagaagtacttgtaaaatagaaaagaaatctatctaactaagctttcttactctgg

SEQ ID NO: 22715 - DNA, 3547 bp, Oryza sativa
  ref <308>: DATABASE ACCESSION NUMBER: AK072878
  ref <309>: DATABASE ENTRY DATE: 2001-12-06
ggggagcacctccattgggcatgtggaggtgtggcccaagggcgggacggacctggcggtggcggcgtgggcgcgggagatccgggtggaccacctgtcgccgcccagcgagcggtgcccgccgctcgccgtgctgcacgccgttgccgcgggcggtcgctgcctcgtgatggagtccaggcccacggccaccgcggatgagcccccgccgccgctcgtcgccatgcacgccgcttgcctcagggacggaaagactgctgtttttcctctaggagcagaagagatccatttagtggcaatgacttccaagagaaacttgccgaatcttgcttgtttttggggctataagacagaattgatgcacttcagagaaagttgagtaacgagattgatcctcaacatattagtggtatgtcggcagagatcaagaggtaccaagaagacaagtctatcctaaagcagtatatagaaaatgatcaggttattgatggtggcaaggtttataaagtacagactgaggttatcccacctttacctgataatcatcagcctatgacacgtccaatcataagattacaagagaaaaatattatcctgacgcgtataaatccattgataagagataccagtgttctggtacggttgaggcctgcatgggaggatcttcggagctacttaattgcaagaggtcgcaaacgttttgaggtatatgtgtgcacaatggctgagagggactatgctttggaaatgtggaggttgctcgatccggattcaagattgataaactctgttcaacttactgacagacttgtctgtgttaaatctggctctcgaaagtctctgctgaatgtattccatgatgggtcttgccacccagaaatggccctagtgattgatgatcgcttgaaagtttgggatgagaaagaccagtgtagggttcacgttgttcctgccttttctccatattactctccccaggcagaggcaaacttctctgttccagttctctgctttgctagaaatgttgcatgcaatgtcaggggtggttttttcaaagaatttgatgaggtccttctgccacggataagcgagattcactacgaggacgaaataaatgattttccgtccgctcctgatgttggcaattatttgattaccgaggacgagaatgctgccattttgaatgtaaacaaagatcctcttgcttttgatggtatggcagatgcagaagttgagaggagattgaaggaagtgtcttgcagtgttcaagctgtgaatccaataccaactaatgctgatgtgatgcctgtggcccctaaccagcaacttattacatcatctgttccagaagcaccatcattgggcatgattcctttgaataatgatcaaggtcctcagcctccttcaagctggccggttgctcaatctgctcctgtggatccatcgcaaagttctccagctagagaagagggtgaggttcctgaatctgagttggatccggacacaaggagaaggcttctcatattacagcatggtcaagacacgagagatcctgcaccaccctgtcctgcaggatcacccgtacagacctcagtattgccagtgcaatctcatgggaattggtcacatgtagaggatgagatgaatccaagaagcctaaataggacctcaacagggttccatttagaatctgatgatataaattatgataaaaagcaaccacataatccaccgtattttcctgatgaggataatcttataacttctgatagatataaccgtcggatccatagatacccctcacagctgcctcacagtgaggatcatcatatgctgaatcgttcatctatagcctacagatcttttcctggagaggacatgggaaaccgatttggtccttcgaatcatagaagcagtaaaatagaaccaggacaccagtttgtacaaaacgcagagacctcagctggtgtgttggaggaaattgcagtggaatgtgggtttaaggtggagtaccaatcaactttgtgtagtactgcagagttgcaattctccattgaggttaggattttaggagaaaaggtaggtgaaggaattggaaaaacaagaaaagcagcaaaacgccaagctgttaatatgtccttaagaaatctggcagaaaaatttctaacgtctgatccggataagatgatgattctgaaggagaatggttttagtagtaattcaaactcattcagatattcgggaggtagtagagatgacacatcaccagttgcaagcacttcaaacgagtctagatacatgggcgagagagttgatactttaagaaaacctgctggttctgttgctgctctcaaagagctttgtacggttgagggttacaacttagttttccaagagcagccatcacgtcctcgtggttcatcaggtaaagaggcttatgctcaggtcgaaataggtggtcaaatcctgggaaaaggagttggagcaacatgggaacaagctaagctgcaggctgctgatgaggctctaggaaatttgaaatccatgcttggtatctttgcacataaatcatctggatttcaaaggtcatcggtatcaaattttaatcgcttcaaaccagatttccagcggagtctacaaaccataccttctggttgggactctaggaacaatggtcgtgttctttgatgttcgtcttctggacatctgaacttgatgggatcaatagcatggaacctgttggcccagaagaacttcaaggactgcaagtatggacgagatggtcatggaaggagaaatcgctgtgcacatgatgcctgcatgtttcgttctgtcgttctcgatttggtgatagaattgtgttgctgtcatttccaatctagtaactcggtaactcccaacaggtgctctgtttgaagatgttgtaacctggcctccgagtgagctcacgccacacggtgctcggctgtgatttgccctgactctgttacccgtgataccccagtggagtgtggatattagaagcatgacagttggtaaaatggcttccttgcgttcagtagattagccaattgtattgctcgaattaatttgtttcttcagatcttagatttagggtggtagcttgattggacagttttgctacgtagtggtagcttcaattccatgggggtaattcccatggctttgattccagttttacactgcttcctgctgctcttcatggccatgtttggttcatacagcaaccgggttcggctggtgttggtccaaggcttaaggaggttggctatgtatacagattggtgccatactcctgcattgggtgatgcatgatgctgaattgctgattgatgctacagagtatatacctgcattggttgaagatctttatgagaagctcgaatcttggtggctacgtgcacaatgttgtccctctttctgtttatctgtatgcttgagataagcagactttggccttctatttccgtgaggagatagaggccggagggtgtatttcttatcacctcaatcaaaaaagataatt

SEQ ID NO: 22716 - DNA, 3788 bp, Oryza sativa
  ref <308>: DATABASE ACCESSION NUMBER: AK072879
  ref <309>: DATABASE ENTRY DATE: 2001-12-06
gatatctatctccgttgcttcgcgtctggggcctcgggcggcgcgcgcggggaggggcgtggtgcaattaacgggcgcgcagctccaccttgccgcgatccgtcgcaattctttgattcccttcgcggaatttttctttcttttttttccccattccatgtgcgtggatctcggggcgcggggctagggtttagtatggctttggtcaatccatggcgtgcggtgccgaggtcgccctgtcgcttcttctttaatgcgcgttgatccccatggacggcgagtgccgggacgcgtatggattcgcggtgcggccgcagcatctgcagcgtttccgcgagtatgccaagatttacaaggaagaagaagaggagagagcggacagatggaaggacttcttggacaggttggctgaatctgcagatgacatcacaaccagcatttcaccttccaaagaggactctgctgctggagatgtcaatggtggagaacaccttgatggagctgaaaacttagagaatagcaataggggtggaataaaatgcaacaatgaagaagaggagggagaagaggatgcagaaaagagcgatacaccagaaaattcgaaggaaattgatggcaacaatcaatcgcaagaagcaaatggtgaggcggacgatatcaatgatgtatctgccaactcagaaaatctgaaacaggagagcattgcaaactccgtagaatcggacaaagctccagaagaattgaaggaggtgagtgggtgttcagaggaactattaaatgatgagaatggtgattctgaaggattaaaagattctcatggtgccttggaaggattaggtgaagcgaacaacgacaactcggaaaagttagaagagcttttcttggataaggggttgttggatgaactgaagcctataagagttgagtctgggaagcgggtgcgggcatcaatcagaatcattgagaaaatgatgagctctcgagtgggcaagataaggaacactgcaaatgacatgtgtggaaatggtgaagcacagcttgcatcaattgaagaggaggaaagggcagcagataagagttgtagaggggatccagcagaggaatcttctaatccagataaggtggagcaggcacaggacagggaacaaggtgattctgcgagtgctgctttggagggaggcaatggcgagtcttatttcccttggagggaggaactcgagagcttggtccgtggaggtgtgccaatggctcttagaggagagatgtggcaagcatttgtgggtgttggtgctcgtaaaattactgggtactacaacaaattactagatgaaggtactgaggaattggatgaaaagaaccctgaggaccaagagttgaaagatcagacaaatgcacagaaaaagcccccagagaagtggaagggacagatagagaaggttgctctctgatttgaaatgggaggaactaatgtcatgttttagaagttctactgttctaggtctctactctctacacacttgaatgcttgatttgcctgttatcattataggatttgcctcgaacatttccgggacaccctgcactagatgaggacgggagaaatgctttgcgacggttattaacagcatatgcaaggcataacccatcagttggatactgcaaggccatgaacttttttgctggcctatttttattattcatgcctgaagagcatgcattctgggctctggtgggggtcattgatgagtattttgatggttattacactgaggaaatgattgaatctcaggttgaccagcttgttcttgaggaagttgtacgagaaagattcccaaaacttgcaaagcatatggatttcctgggagttcaggtggcatgggtgactggaccatggtttctttcaattttcatcaatatgcttccatgggaaagtggtcaggttttatgcaatagcttggtgctttcattaagatatatactcatacttatacatttgatgttcggtaccagtcccttaaattgaacgaaacatgcataccaaattgttaggataatgagaatcccgttctattattttttgaatgttacatattcttgtcatgtatgttaataatttgttaggtttaacatcatctgattgaaacttttgcattctcttagttcttcgtgtttgggatgtgatcctttttgaaggaaatcgaacgatgttgttccggacaacgcttgctttgctcgacttatatgggcctgccctggtgaccacaaaggatgctggagatgcaattacattattgcaatctcttgctggctctacttttgacagcagtcaacttgtgttgacagcttgtatgggttttcaagcagtcagggaaatagggctgcaggagttaaggaaaaaacacaggcctgatattatatctgctatggaggaaagatcaaaagaccgccattcttggaaagataagaagggtttagcaactaaactttacagctttaaacatgatcctctatgcccacaagttaattccaaggaaggggaagatgatttgcaagtgaatggggaaatgcaatttttagattctgggtcagcaaatctagaaacctaccttactagttcagctctagataatgagttggaagagggcattgatcttcaagatcaggtaacatggttgaaagttgagctgtgcaaactgctcgaggagaaaagatcagctgaactcagaagcgaggagttggaaactgctttgatggaaatggtcaagcaggacaacagacatatgttgagtgctaaggttgagaaattggaggcagaggtatctgagttgcgaaagtcctttgcagacaagcaagagcaagagcaggcaatgcttcaggttttgataagaatggagcaggaacagaaagtggcagaagatgcccgcatagctgctgagagagatgctgctgataagaaatatgctgctcagttgctccaggagaagtatgacgcagcgatggcagcacttcgacaaatggagaagagagctgtaatggccgaaactatgttggaagctacaaagcagtaccaggcagggcagtttaaggccaaccagtccttcaatccaagttcacctcgtgctgcccctcagtctgggaagccaaatcaagatcctaaccaggatgcacctaacaggagattgggcttgctttctaggggccttggttggctagagaaaagcaagggaaagtctagttccactgaaacacctgaaggctaaactcctgtcgaatcaggacatgattgttgctaaggattggattacctgatcaccagaaaaatgcgttcatgcaagcatcaatgttttgcccgcaggaagattcaacatgaatttcccatgaagttttgctgaaattgtcatatgtatcatatcgagcccagttgtcagatgcagcttccttgttaggttcgaattgttgtaatgcatccgtgtaaattttctttttcaattagttttattaagattgtcgatagttagttccggataggagaaagaaaaggcacactacttcccatacacattagattagtttgcgacgatgtcgtggtattataccggtgaagagctgtttttatacctcttcgggaagagttgtgcaggagtagtgcaaagaaatgatgtttttttattcatgtgacttgctttcacacgagtgccttaagcatattaatttcatatgttgtgtaaacaccgagtctccactgagaatgctcttttttaaaataaataaataaataataataatcg

SEQ ID NO: 22717 - DNA, 898 bp, Oryza sativa
  ref <308>: DATABASE ACCESSION NUMBER: AK072880
  ref <309>: DATABASE ENTRY DATE: 2001-12-06
ggttgctgctgcttccggcggcggcggcggctgtgtccctccctccgtcgaacaaggtggtgttcatcctgggagggcagtcgaacatggcggggcgcgggggcgtggtggggtcccactgggacggcatggttcccccggagtgcgcccccaacccctccatcctccgcctctccccgcagctccgatgggaggaggcccacgagccgctccacaacggcatcgactccaaccgcacctgcggcgtcggtcccgggatgtccttcgctaacgccctccttcgctccggccagttccctgtcatcggcctcgtcccctgcgccgtcggcggcaccaggatggccgactgggccaagggcaccgacctctactccgatctcgtccgccgctccagggtcgccctcgagaccggcggccgcatcggcgctgtcctctggtaccagggggagagcgacaccgtgcgctgggccgacgccaacgagtacgcccgccggatggccatgctcgtccgcaacctgcgcgccgatctcgccatgccacaccttctcctcatccaggtaggactagcatcagggcttgggcaatatactgaagtagtaagggaagctcagaaagggatcaaacttcgaaacgtgagatttgttgatgcaaagggtttgccactagaagatggccatctgcaccttagcacccaagcgcaagtccagcttggacatatgttggctcaagcctatttgaactatggtacttccacgctctagtcctctctgtgttgtttttcttttatcagataaatagctaagagactacgcaccttatgttctacttttcttatttagtttcatggaccactcattcttatgattattgaattggcttggtataattaaattttccg

SEQ ID NO: 22718 - DNA, 636 bp, Oryza sativa
  ref <308>: DATABASE ACCESSION NUMBER: AK072881
  ref <309>: DATABASE ENTRY DATE: 2001-12-06
gtgaatcagttcacccccggcgagctgccgggatcgttcaagaacttgacgagcctgaagacggtctggctggcgcagtgcaacctcaccagcgatttccccagctacgtcacagagatgatggagatggagtatctcgacctgtcccagaattcattcaccggaagcatacctcctgggatttggaacattccaaagctgcagtacttgttcccgtacaccaaccagctcaccggcgacgtcgtcgtcaatggcaagattggagcagcgagcttaatttatctcgacatatctgagaaccagctgactggaacgatcccagagagctttggaagtttgatgaacctaactaacttagccttgatgacgaacaacttctccggcgagataccggcgagccttgctcagcttccatcgctggtgataatgaagctgttcgagaacaatctcaccggtcagattccggcggagctcgggaagcactcgccatttctgagagacatcgaggtcgacaacaacgacctcaccgggccaataccggagggggtctgcgacaaccgccggttgtggatcatctccgccgccggcaaccggttgaacggctcaattccggcgagtcttgccacttgcccggcg

SEQ ID NO: 22719 - DNA, 2633 bp, Oryza sativa
  ref <308>: DATABASE ACCESSION NUMBER: AK072882
  ref <309>: DATABASE ENTRY DATE: 2001-12-06
gggagggagtccagtccaccaccaccaggcgcgcctccagtgctccctgctgtccacgccggcgccgcgcctccccaccgtccccgccgccgtccgctccgtccccaccgtccaagccgccaagccgggggccgcgacggagcgactcctcgggtcgccgcctcgccggttgcgggttgccggcttggtggcttggcgcggcgccttctccagttctcttgcttggcaactgatccggcgctccaccattcaaccgacccctgttgaggtaaggtgaggtgaggtgaggtgaggatggcgatgatgaaccggacgcgggatctgctgatggaggggttcgagggcctcgtgcgggagggctccttcagctgggccctcccccgccgcggggcttcgccggtggacgacgccgatgaccccgacagctcctcctcctcctcctccggcaagcagccctccatctccggcctctcccccaaggccaacgccgtcgtctctcgctgctcccgggtacttggtacttccacggatgagctgcagtatgactttgatatgcaagcatctgattccataaagcagccaagaaattatgcaagaaattttttggaatattgttgtttgagggcacttgcacatgcctcacaagttgcagggtatctttctgacaaaagctttcgtcgcctaaattttgatatgatgctagcttgggaagttccctcttcttcaagcgagctcactgttaaggttgaagtagacaacacagtcagtttagaggctttttcaagaatagcacctgcaattccaacaatcactgatgtggtaacatgttcaaatctatttgatgtactttcatcttcaagtggaggccggcttacatttcctgtatatgataagtaccttacaggattggacagagcaattaagaaaatgaaaggacaatctgagtcctcgcttttatctgcccagcggtctcagagaggagaaaggattgtagaagtagatggaacattgacgactcaaccagtacttgaacatgttgggatttcgacatggccaggaaggttaacacttactgatcatgctctttacttcgaagcacttcgggttgtgacctatgataagcctaaagcttatgagcttgccgaagatctaaagcagtctgttaaacctgagctgactggtccatggggctcacggctatttgacaaagctgttatgtataaatcaacaactttaacagaaccagtgatcatagaatttccagagttggctggccactttcgtcgtgactattggctggccatcatatcagaaattctctatgtccacagatttgttaggaagtttgacataagtggagttgacaaagaggaaacaattttgaaggctgtactaagcattatgcggctacaagctattgaagagttagccattccagtttctaatcgattcgagtctcttttgatgtttaatctatgtgacaaacttcccggaggtgatgtaatacttgaaacactagctggttctatatcatcgagaagatcaactcaagttaaccaacctggcactagcagtggaaggcattcaatgtccccctttactgttctgtcgaatcttggagtggtatcaccaattaataaaggtgagagactctttgttggcgagatagttgttggggaaatgagtgccttgcagaaggtagttaatgagtcaatgaacaactataagaaggttgaattggcccaagccacagttgatggagtcaaagttgatggcctggatacaaacttggcagtgatgaaggaattgctatctcccgtaagtgagctatggaggtttttggtgttgctggcatcttgggatgagccaattaagtccatggtattttgcttttcatcgtcttatatcattatcagggggtggttagtctattttcttgttttggtgctcttgttttcggcagctttcatgttccttacaagactaactagccatggaaaaccaatgacggaggtcaaagtgacatctccacctccaatgaacacaatggagcagctcttagctgttcaaaatgctatttccaaagttgaagagcttgttcaggatgcaaatattgttcttctgaagattagagctttattgttggcttttccctcccaggctactgatagagctatacttgccttggtagtgatggctctgagccttgcattcgtgcccacaaggttgcttgtcctgatgatgtttctggaggcattcacgaaccactccccaccaaggagagcaagcacagaaaggtggaccagaaggttaagagagtggtggttcagcattcctgcagctccagtagtcgtggagaaggataaagaagacaagaaaacaaaataaaagatatatatgtatattcaatgtaattatgtgccatgtttggccgatgggttggggtggatcaccaacgctcgtcttgtacagtagcagctagtatttttcaataaaaatgcgagttctcacctagaattaattgcttgcctcgtactttgattatttcgtatatagtttcatcgggtgatcgggaatgttggacaacaccccaggtttatgtgattttagctgaatttcttactgtttgtcgt

SEQ ID NO: 22720 - DNA, 1565 bp, Oryza sativa
  ref <308>: DATABASE ACCESSION NUMBER: AK072883
  ref <309>: DATABASE ENTRY DATE: 2001-12-06
gtagcaactctcctctcctccttgtccgtctcgatctagtcggatccggagcggcggtgtttgaggaggccgaggcggcggcgtggatccagagcggtgatggcgaggaggccgaggcggcggcgtggatccggagcggcgacggtcgaggaggccgaggcggattgatctctcttctcctcccttgccggctcccctctcacctcacctctctggacgagcggcggcgaaggtggagaaagaggaggcgaaggtggagaaagaggaggaggcgaggtcgcgccgaatcgaagcaatgacttccacagtgcgagtttccttcgccacgcgccctcgttgcagcgagaaaacacgtctcccagttagggggcgagcggccgagcgaaggtgcgggtctcagcgccatgtacgcgtgaatctgagctggcgcagtaggtaactcctccatgtagaagaactgtgaagggccatagatccgatcaacaaatcatccaaaccgtacattacacagtacaaaaggctactataccaagtaaatcttcctttttaccattagagagagatacactgtgtggcagtatgactgtgtgtgacactcttgagtgtggtcgtactataaaaccatgaatccatctcagattctcaggtttgcaagcctagggtagaccatcgaccaaatccaatggctgcttggctcgcctcgctgaccatctccttcttcctcttcttcctccatggcgccatggccatgtccaccgccgcgcagctcgccggggaggcgccgccggcgtagctgccaaggtcagaactggctgccatctgtagggtgatggctgacctcctcggcgacccgacgtggccgcagctccaccggcgtccctgcacggacacgccatggccgggactccagtgcgagctcgcccccgacgacgcccgccacctgcgcgccaccaggctccacttcggccccgacgtcgccaccccgccgtgcaggcccggcgccaggctcgccgcgcccgtgctcctgggactcccccacctcaagacgctctccctcttcggctgcttcgtcgtcgccgactgttagaaattaatcttgttgtttcttaatttcagcatgtttatctatatgcatgtgtgtattgcatggcctggagagctagctatatgtacgtgggtgctgcatggcttagtgagtagtggttggcagtgagtagtgagccaataaaaagccaggagatgagagcacatgtatgtagcttagttagttagccatgcataattgtgggctagtgattagccgagtcttgcacaagattatgagtaggatgtggtcagtttgcatgcatgcaggttagttgggtggtgcaagcaacgacgtcggcgaggactcagtacttgtgaagttgcggccaagtaaacagggcgtgggcgtcgtgtgtggctcgagaagcggaacaaccagcttcgtgtgtgtatgtgctgtgttataaatagctgctcattgtaatcatttagttaagagaaaaaaccagtgaaaagggcacaagttgttttggtgccgc

SEQ ID NO: 22721 - DNA, 871 bp, Oryza sativa
  ref <308>: DATABASE ACCESSION NUMBER: AK072884
  ref <309>: DATABASE ENTRY DATE: 2001-12-06
ggtggcgccgcgagtttcctttggcaaccaaccaaagtcgtcgtcttcctcctctcgcactttactcccctccccctcctctccctcttcccccaactgcaaagcagctgtccacctccacgctcctcctcctcccccaaccccaacctctccgccttccctctcgccggcggcggggatcctcatccgccccgcgacgcccggccctaaccgcggcggagatccgtggagggtggggggacattcttggtaattaagccgcgcggcgcgcgcctcccctcttcttcttggattcgacggggtggcgcggggatgaacacgaggccggtggtgctcgtcttcctcctgctggtgctcgtcatcacgtcgcagttcgagtggaagcagcagatcggggacgccgccgccgaccccgccgacgcgcgccgcaggcaccagggcctcgccaaggaggacgccgtcaaggagaagataatattttctcaggagaaaaatattcaacaacttaacgagcttattgagagccttcagcggcagctcctgcattgccgtggtagcaacaacactgtccacaccacaacagtttctcatactgaagttagtgaggtggacgggcaggaaagcattgatgattgatggtattggtagataacctcttggcaggttgttcactgattctagtacagaagccaaagaacaacggctgatcaggcagcaccatactctacaaatgccatctaatagggaggtaccaaatcacactgtattgtacacttgctaccagtgtttctctggtaagattgtagagagctgtaacatgtaatatgttggttttaggtcacggccactaattcaattgaaaagttgcttg

SEQ ID NO: 22722 - DNA, 1502 bp, Oryza sativa
  ref <308>: DATABASE ACCESSION NUMBER: AK072885
  ref <309>: DATABASE ENTRY DATE: 2001-12-06
ggatctgcagtgcgagccacgaaggttggcgtcgtctcctcctccctctcctcctcgcgcgcggctgccgtcgagaagacgctcggcctcccttgtgcggcctcacctcctcgcgctgaatcccctactccccgtgttagatttgaccttcataatccaaaagaagaggttttagttcaagcgaacgataatggggatatccaaggtgattggcatcgctggaacaactcttctagtcacgtctgttggtctgtggaagatcggcttaagaattgtcgcggttccttttctagcaaccagtactattgcctatatcatcgctgttgcatcccacaattccatcaacataccttggatcttgggaaagaattcaaaggggaggtttccaatttggtcaagtgtactttttggtcctttcttgatacttgcccgggtatatgcaactgtgaagagacatatgaggaagaaggaggctgtgtataacatgatcactgaaggtgtttatctgggaggatggccgtttatgttgaagcatttgcccccaggagacccgtctgttattgattgcacttgcgagttgccaagaagtgattttgtcccaacaaatgagtatctttgtgttcctacttgggatacaagagccccgacgatatcccaaattgaatttgcggcatgctgggcatgtgaaaagagagccaaaggaaaaccagtttatgtacattgtgcatttggtcatggaagaagcgcttgtgtcgtgtgtgcagttctagtagcattgggcattgctgaaaactggaaggatgcagaaaacatcatccgagaaaaaagaaagataaaaatgaatgctgttcaccggaaaaccttagacgattggtcaaaatatagagcttctcagaagaaggataaataactgacattaaatcatttgacatctcaggcaaattaccatgtgagttctatgcaatctgggttctgagaaatcttcctagttctggagcttgcattgtttcccagctcatatcagtgtttcccacacgtgtcagattacttccaaaatttgttcccagttttgcttacttctgctcctatctgaaggttagtcttcaaagtccttgtaaatcagaaagctgaaaattggctttcagatggttgtgctgctatgcttagctctccacagttgccttcatctgccaccaatatcctacaggcaaataaggctccagctataaatatatgatggatgcgtccagataaatagcactacagctgctgtcctattattcttttagacttttatagaatttagttagttggctgaaagcctgaaatagttgaaacatgcatagaaagggacaaaatccatatctagcccttattttgtacaccttcacatcattgtattttatcataatcttttttaggataagggactaccactagtttattggtgtaatgaccttcaaaattatgataaaataaagtgcatgcagtatgcatgatgt

SEQ ID NO: 22723 - DNA, 1210 bp, Oryza sativa
  ref <308>: DATABASE ACCESSION NUMBER: AK072886
  ref <309>: DATABASE ENTRY DATE: 2001-12-06
gatgccgtgtgggtatggggtacccataatctccacactcgacttcacggcgcggcggggcaccacgttcgcgtcgcaccagtacgacacggggcccttctacgacgagatccggcggcgcctctccttcgacttcaccaagagccagctcgtcgagaagctccgccgcctcaagaagaagtaccgcctctgcgccgcccgcatggcctcctccccccacgccgccgccgccggcttcgccttcaggaccccccacgagggcgccatctacgacctcgcccgccacatctggccccccgccctcaagcgcgacggcaccgcctccgacgacgacgacatcaaccccgccgccgcagctgccactgcggcagttatgacgcctgttgcgatggaggatggtttcggcggaagcgcccctacgccgacgccgacgccgaggggcaggggagggcggcgcgtccggcggagaatggcgcaagagcaggaggccgcagcattgccttccgcgccggcgctgacctcaacagatggagctcatcaggagccgcttgtcgcggccatggagaacacattgccgcagattgcgcagctgccaccggtgtcggagacggagccaatgccagtgattgccaatggtgctaatgaggaggctgtccggagcgttctgtcacgtctactgaaggagttcatcacctcattcgctgtggttgggcagactggtccaggaatgggcttaaacatgggatttgggggtgctggattaaacgctgatattgctggccttggtttcggcattgccgggctgaaccctggggtgcccggtgctgataggtggaggcagcatcagatacttgagctggaggtttatctgaagaggattgagcttgtgcgtgagcaagtcaccgccgcgctagatgagctcaggtcatcggaaggttgatttgttctcttgtttcatagtcccgtcgatactttctctcattagcagggagtactttcaacttcttctgttgtagtgtgtgccattagttgatgcatgtattataaagttctgattgtatacttggatctagcttagctgcaggtagttgcccataaggttagaggtgagaacatcgatgtgtagatgaaatgaggatcaaagctgatcaatacttgtagctctactttatcttataatttgataaaatgcaatgaagagtttcgagtc

SEQ ID NO: 22724 - DNA, 1998 bp, Oryza sativa
  ref <308>: DATABASE ACCESSION NUMBER: AK072887
  ref <309>: DATABASE ENTRY DATE: 2001-12-06
gacttccccctcccatctcccatggcaaccacggcggcggcgtcgccgccggcgatcgcgaccgcgctctccgccctgctgcggcgacagaggaggagaagcagccgttgcgtgggggcatcgcacgccagatgcctcgccgccgacgcgaatgctgaggcggtggcgccgagccggaggggaggccacggtgggacgcgccttgaggaggccgtgccggccggcgaggggcgctcgaggatcgacgcgtggatctccgcgaggctcgggggcggaggcgtcagccgcgcgcgtatccaggcgagcatccgcgccggcctcgtcgtcgtcaatggccgtcccgtctccaaggtttcacatatggtaaaaggtggagacattgtcagctgcacggtgttggagctgcagccactgagagcagagccagaggacatcccactggacattgtttatgaggatgaccatcttctcgttgtgaacaaaccggctcatatggttgttcacccagcaccaggaaatgcaaatggcaccttagtcaatgctatacttcaccactgcaagatttcaacatttacctgtttagcacgtaattcaattgatgatgaatgccctgattcttcagatgatgatattgatgtgtttgacatcgatcaatttactactggcgaagtaagttcagaagtccgtgaagctcttgtgcgtcctggtatcgtgcataggcttgataagggtacaagtggactacttgttgtagccaaggatgagcattctcatgcacaattagcagaacaattcaagctgcatacaatacgcagagtgtacatcagtcttacttgtggtgcaccgaatccgaattctggcaggattgaagttcctatagctcgtgatcctaacaaccggatccgtatgattgccactcctggatcaggccatagatatgcacgacatgccgctagtaggtataaagtaagagaggtctttgctggtggtggatcagcactagtagagtggagattggagacaggacgaactcaccagattcgagcacatgcaaagtacctagggattccccttcttggggatgaaacatacggaggtaccaaaagcatggcattgtcacttttgagacccagaactccttcaagatatcattgtgatctttcaaatatgatatcaaagatagacaggccatgtctccatgccgcgttgcttggatttaagcatcctcactcaggaaagatccttgaattctcatgccccccaccagatgattttactgaggtactcaatgaacttcatcaggttacactggcaagtaatggtaatagtggtggcggtgttgcccgcatttgtgattagtgcaaggcagaaatccacgaaaatgttgccgaggaaatggtatgcctgcctttttatctgacttctgcactctgatcaaggggcaagactgcagatacagaattggaactgattataaagctagcttcccttgtttcatactccgaagggaggggccaaaatgttcttaatcagtaggtcctgtgctctccatatcttcaacgagtgaccaggactacaccaagatgatgaacaagttaaacttaacaaggaagatgctttgaggatttttttttcttttacaagaccaagaaacagagctttagcactcggtgtacacctgatgtaggaaaagaatgtgattcctaaaagtattctagcacagttcgctctgttgaatgtacagataactaaaaaacgccaaaacaaatctgctgtgcggaaggaagaatgttatctgcccttttgctttctttaaaccttacctttatatactataatttcctacttgactgaacggccaaatcaggccgtaagtctgtaactcaggcctgtgttggtcgctgggctcagaattttgctgaggagctcgaacaagtgattgaatactcatgatagcatatgcaattgccagaatttcttatgctgcagtttacatgt

SEQ ID NO: 22725 - DNA, 3297 bp, Oryza sativa
  ref <308>: DATABASE ACCESSION NUMBER: AK072888
  ref <309>: DATABASE ENTRY DATE: 2001-12-06
gatggccctttacttttcccctcttgtcctctctccggactctgggtcgtcgcttctctccccacaaggattttctaaatttcattgccatcaagaacacacaggcttcagttccagcatgatgttagcgtcgttttgagacaaaatcaggaaaggctctttcacaacatcaagcatgtcaatttctatgaaagatgtagatccggctttccgtggagttggacaaaaggatggtttggaggtatggcgtattgaaaacttcaagcctgttcccgtgccaacatcttcacacggaaaattttacatgggtgattcatatatcatcttgaagacgacagccttgaaaaatggttcatttcgccatgatctccactactggcttggaaaggatactagtcaggacgaagctggaactgctgcaattctaactgtggagcttgatgctgcccttggagggcgtgctgtccagtacagggaagtacaaggcggtgaaactgaaaagcttctctcctattttagaccatgcatcatgccacagccaggaggggtagcttctgggttcaatcatgtagaggtcaatcagcaagatcatgttacccgcttatatgtgtgccaaggaaagcatgttgttcatgttaaagaggttccttttgttcgttcatcccttaatcacgaggacatattcattttggataccgcgaacaaaattttccagttcaatggctctaactcatgcattcaagagagagcaaaagctcttgaagttgtgcaatatatcaaagatactttccatgagggcaagtgcgaagttgcagctgttgaggatggaaagttgatggccgatactgaagctggtgaattttggggtttgtttggtggttttgctcctctcccaaagaagacatcttcagaggacaatgaggatgataaggaaactgtgaccaaattgctatgttttaaccaaggaacgctggagcatattagttttgaatctttggagcatgagttacttgagacaaacaaatgctacttgttggactgtggagctgaaatgtatgtttggatgggcagaggtacttctttgcaagtgagaaagggtgcaagtgaagctgctgagaaattgctcattgatgagaaccgaaaaggatcaaatgttatcaaagtgattgagggattcgaaacaatcatgttcaagtcaaaatttaacaagtggccgcctactcctgatttgaagctgtcatctgaggatggccgaggcaaagtggcagctctactcagaagtcaaggattggatgttaaaggattgatgaaggctgctcctgaagaagaagaaccccaaccttatattgattgcactggtcatttacaggtctggcgagtaaatggcgatggcaagactcttctttcatcttctgatcaatcaaaactttacaccggagattgctacatttttcaatacacatacactggagatgataaggaggaatgtcttattggaacttgggttgggaagaagagtgttgaggaggacagaacatcggcaatttcactagctagcaagatgtttcaggctgcaaaattccaggctgcccaggctcgcctctatgaagggaaagaaccgattcaatttttcgtcatatttcagagtcttcaagtttttaagggtggacttagctctggatacaagaactttattgctgtaaatggtaccgatgacgacacttacgttgaaggtgggcttgctctcttccggattcaaggctcaggatcagaaaacatgcaagcaattcaagttgatgcagtgtcttcgtcattaaattcatcctactgctacattctacacaatggaaacactgtgttcacatggactgggaaccttacaacctcactggataatgacttggttgagagacagctagatgtaattaagccagatctgccatccaggtcacaaaaggaggggagagaaaccgaccaattctgggaactcttaggtggaaaatgcaagtattcaaacaaaaaaataggaaaagaaaatgaaagcgaccctcatcttttctcatgtatcttatccaaggaaaatctaaaggtcaaggaaatacaccactttactcaggatgacctgatggcagaagatattttcgttctagactgccgcaccgacttgtttgtttgggttggacaggaggtggatgccaaattgagatcacaagcgatggacgtcggtgagaaatttcttctacatgatttccttatggaaaatctctcgcaagacacaccaatttttattgttacagaaggaagtgagccacagttttttactaggttcttcacttgggactcagcaaaatcgctgatgcatggcagttcataccagaggaagcttgcaatagtaaagggtggagcaactccatcgcttgataaacctaaaaggcgaacaccagcgttttcaggaaggaacgcaggacaagataaatctcagcagcgcacaagaagtatgtcccacagcccagaacgtcaccgtattcgaggaagatctccagctttcaccgcaatagcttctgcctttgagaacccaagtacccggtatctttccacccctccccctgctgtcaagaagcttttcccaagatccggagggtctgaattgccaaagacatcatccaaacaatcagctatcaatgctctcaccagtgctttcgagggtcctacgaaaagtacaatacctaagtctgtaaaagcgagccccgaggcagagaaggcaatacaggaggaaggctcaacgatcggtgaaagtgaaaacgagccagaagatgatgagaacagcacaatctacccatatgaacgtttgaccaccacatctgatgatcctgctcctgacattgatgttaccaagcgagaggtctacttatcatcagttgagttcacagagaagtttggcatgacaagggcatcattcaaaaaccttccaaaatggaagcaaaacaggctaaagtctgatctccagctcttttagctcaactctgaggaacagccccttgtcctcgccttgaaggcatcacccatttttgagggcacgcaatttccgtgccattctcgagttcttctcttcacctattttggtctgctattgctctaggatcaccctgctctttctgcagtagcaagtaggtcttttggtagtgtttttcttttccctttattgatatagagtgctcatgaatgtttctgttgtgagcctcgcatttttgtgccgctacaaaatttttttaagaaaaggtctatttattgtctccc

SEQ ID NO: 22726 - DNA, 2096 bp, Oryza sativa
  ref <308>: DATABASE ACCESSION NUMBER: AK072889
  ref <309>: DATABASE ENTRY DATE: 2001-12-06
gggctttccagaaggcacgggtccaaccgattacggggcacgcgcggcggcggcggcggagtgaccggcgcgacgccgcaggcctgcaatgtgggcattcctgatctccccgccgctccgggatgccccccccccctccgtcgccggtgccgttgagcgtgcttgccccgcggtgagattgtttggttcggccgcggctagggttcggtttttcataggttgtttggcttggcatttttcttttgctctttggtggatcccaaataaatggctttttgtgagcaagcgtttggaaaaccatagccctgctggtgagatgtgattttcatgaactggctttggcagtatgtaagattccaacaacgagagttgggaatgaaagaaggaagtgaccctgccaactactacaagattttgaaggtctcttgaaagagcctaagaaattaccactgaaataaaatatgattatgccattccttgtggtcctggcactgcacctgtaaattctaatccttaccagcattgataactgcacaaagacaacattgaggaaatggcgcaccatatgttttttcctcaaaactgcaacacatgcttgctaactgtgttattgaactgggtgcaagccctttcaagttacctttagtcttagtgaagattgtggaagggtgggagtttcaaatgtctaatgaattcagttctgcagctttatcttattaagttcactattgtgttcttggatgacgtcttggtattacagtctttcaaggcacatgtgaaaaacttggagcatgtcctgaccacaccgtggcaacatcaactctgtgttagacgcagaaatgtagttttgcacagagaagactggagtaccttggtcatgttcttaagaaaaggtggccactaatatgcacaagacataagcaatgttgccctggctacaagatagaattgatatggagttgtgtggttgctagggctaatgggggcactgtcagctcttttgtttgtcaggcattattgaatcatctctgagccacaagctaatctcctcaaaggaaggtgttacattgagagtttggaacagagaagtagcttcagattttcaatgattgaaggacaatccagatttcataaggcttttgaagtcaatggaaacttgagatgatggtagaggttccattcacatgcaaagtgagcacctgatagcttacctggccaagtctctcaattcaatgcatcaaaagttgtctaagagagaatttctggcattgatcatggtcgtatactgctggagaccatacctacagaaagtggaatttgtaatcaggacctgcagccatgttatttataagaccatcagtttctgtatgacatgcccgcaaaacgcaatgacaaaacctaatgaattgcagttcatgatccagtgcaagaaggtcgagagaaaggaatgcagatcaatgccttggcttgtacttcctcatcacttacagtccaagctgtctcagaatgccaacagagtttgtcttcaggagagaacagcagcttaggcatcaatcctcactacatccattcccgtggttgcgtcttttatcgtggacatcacaggttgcaccatttcttaagaagaatgatacttttgtagcagcactaaagaaggaactgtctgaacacattgctgatgtgcatgttcaaaacgattttctcgatggcatgttcactttctgtggtgctacaatggcacctgcacctctaaatagagctcccataaatgtgtaaatgatgggatacacgattgtgccacaggcaaaggaaagagattgagaggttttgagaaggggcccagttcatcgagattgtggcaatggtggtactccaagccaaaaaaagaaaaaaaatattggaggcctcaggtccgaagaattgaaggatgtcagaatgtgagaagtgtgaagcagataagggttttttcttcttttttttttctcttttggtgtgtaatctgttgaggatggtgcctgatgatagagtagttcaagctttgcaagtgggttgtattttcctgttcccagaatctaatagaaactgaactctaatcg

SEQ ID NO: 22727 - DNA, 2249 bp, Oryza sativa
  ref <308>: DATABASE ACCESSION NUMBER: AK072890
  ref <309>: DATABASE ENTRY DATE: 2001-12-06
gctcgaattttctttccccccgtctctcatgcgccattgatcggatcgcttgatgccgcatgccgccaccgacgatgatgctgccgccgtcgccgggcgactccgacccgtcggggtctcgcgacatggacgacgaggacctcgtcgaggatctcctcgtcaccgtcaactcggcgcgggccttcgtcgagttccgccgcacgcagcgcaaggagtgcgccaacctcctccgctggctggagctcgtcctcccgctcctcgaggagctccgcgactcggcgccgccgctcaccgaggacgcctaccaccgcctcgccctgctcggacgcgccttctccgccgcgcgccgcctcctccggtcgtgccacgacggcagcaagatctacctggcgctggagagcgaggcggtgcaggggagattccgcgccgtgtacgagaagatgaactccgctctcgacgggatgccctactcggagctcgccatctccgatgaagtcaaggagcaggtggagctgatgaacgctcagctgacgcgatgtaagaagcgggcggacacgcaggacatcgagctgtccatggatctgatggtgatcctcgacaacaaggagggggagaggaacgcggacagggcgatcctggagaggctggccaagaagctggagctgcaaacgctggcggacctgagggcggagacgatggccatcaagaagctcatcagcgagaggaacgggcagagcggcgatagcaccaagcagatcatcgagctcctcaacaagttcaagtaggtcgccggcgtcgacgagaagaacgtcctcggcgaggtctccgtgacgaaatccctcgacaagtgcccctcgttgatgatccccaacgacttcctctgcccgatcacgctcgccatcatgagggatcctgtcatcgttgccactggacagacgtacgagaggaggagcatccagaaatggctggacagcggggagaggacgtgcccgaagacgcggcagcggctgtcgcacatgtcgctggcgcccaactacgcgctcaagaacctgatcctggaatggtgcgacaagaacaaggtggagctgcagaagagggagccggagcccgtggcggagcaggacgacgagcatcagcgcggcgccgaggacatcccgtcgctggtggaaggcatgtcgtcgatccacctcgacgtgcagcggaaggctgtgaagaggatccggatgctgtccaaggagtgcccggagaacaggacgctcatcgccgacagcggcggcatcccggcgctcatcgggctcctcgcctgcccggacaagaaggtgcaggagaacacggtcacgtcgctgctgaacctgtccatcgacgagagcaacaagcgccacatcaccaaggggggagcactcccgctcatcatcgagatcctccgcaacggcagcgcggaggcgcaggagaactccgccgcgacgctgttcagcctgtccatgatcgacgagaacaagctcaccatcgggaggctgggcggcatcgcgccgctcgtcgagctcctccagaacggcagcatcagggggaagaaggacgccgccacggccatcttcaacctggtgctcaaccagcagaacaaggtgagggccacccaggccggcatcgtgccggcgcttctcaagatcatcgacgacaaggcgctcaacatggtggacgaggcgctgtccatcttcctcctgctctcctccaacgccgcctgctgcggcgagatcgggacgacgccgttcatcgagaagctcgtgcgtctcatcaaggacggcacgcccaagaacaaggagtgcgcgctgtccgtgctgctggagctggggtccaagaacaagccgctgctggtgcacgcgctcaggttcggactccatgaggatctctccaagatcgccaagaacggcaccagtagagcgcagaggaaggcgacctctctcattcagctggcgcgcaagtgctactgaagatgaggaccccgtttgtaattgtaactcattttctttccccctctttctcagtagaaaaaattctgttgcttgccctgttctagctgaatgcatatgtggtgtatcgccagaatggggaattggtggtggaattgctgaaaaaaaacaccctaaatgtatttgtgccgatttcagtcaaactagttgatattcctataccattataagctgagttagattttaatgctaggatatacgatattagtttatacaagatcg

SEQ ID NO: 22728 - DNA, 3569 bp, Oryza sativa
  ref <308>: DATABASE ACCESSION NUMBER: AK072891
  ref <309>: DATABASE ENTRY DATE: 2001-12-06
ggcagagagaaagaatggcttcctctacctccgggagaagaggagagctgcggcggtggtgctggcggccgtggctgtgctgctctcggcgtcacaggcactggcggcgccgtgctatccgcgcgtgttcagcttcggggactcgcttacagacaccggcaacatcgctttcctctacggcaacgactcccgccggcccacgctgtggccaccctacggcgagaccttcttccaccgcgccaccggccgcgcctccaacggccgcctcatcatcgacttcattggtacgctactcgcaaccaatccagcccctcctccctgtatttgcttgatccaacacaggagtactactaattacttgagatttggaaatcgcgcgcgttgcgctggccgcagctgacgcgctggggctgccattcgtgcggccgtactggagcgggcggaccgcgggggacttcgcccacggggccaacttcgcggtgggcggcgccacggcgctcagcccggatttctaccgggagagaggcgtgcacgtgcgcgacaccgtgcacctcgacatggagatgaactggttccgcgatctgctcggcctgctctgcccagacgatcttgccggtatatatgttatccgcattttatcctccactgccgatgatccgtttccagcagccgccagtaggtgaggctttaatgccatgaaggtggtgggagagaccagagactatattttggacttttttttttgtttaggccttgtttagttcctaaattttttttctcaaaaacatcacatcaaatatttgtacacatacatggtgtattaaatatagataaaaataaaaaactaattgcacagtttgcatggaaatcacgagatgaatcttttaagactaattagtccatgattagccataagtgctatagtacccacatgtgctaatgacggattaattgggcttaataaatttgtctcgcggtttccaggcgagttatgaaattagttttttcatttgtgtccgaaaaccccttccgatatccgttcaaacgtccgatgtgacacccaaaaattttcttttcgcgaactaaagcaggtgttaggggttggatggtggtgatattgggcacacttccaagcttaagatttcgctcagaggtaagtttgagctaactactgctataagcccatataaaaataatgttgaagtaaatatatttgcagatattagttataaggttgtctatacttctcttcttctctctatctatccattgctaatgctgggtggatcttgctctatttatgcccatcgccaccggatcctgctgcacgtcactaattctatgcacctattactgactagatcccaccgtccatcaccaacactatggcaacacactctagctaggaagcagatagcggccagaggggtgtgcattctggtggtacgccgcctattgtccgctctagcccagtcgtgtggttgctggttgtgcgcctctcccatcacacctccatccgggaagcatagtaaaaaaaaaacccagaccggtgatcaacccagtgacctcgtcggttcactggttcaccggtcggaccgccgggtcagccggttcaggtgctgaaccggatgtatatagttactatatctttttattagacaagatgagctagctagtaaaatggtaaggctgacaagttctcaacccacatgtcatgggttcaagtcacttcccagtttcccacatatgttttattttgcataaaatgtaaatgggccatagagtaagatgatgggccttacaaggccagctgaactgacaatgaaccactagttcttactagcccggttcaccggttttcaccaaaacctgcccggttcacagggttcttaccggtcaaatgcatgagcggtctttctactagaccaaaccggtgagaggcatggttccggttttttatactaagccgagaagtgaatgccactatactggattggttattctattcgtaaaaataggaaagagataggttggcgaacgcatgggcaaaggaggcttgtgcacccccttacggctgcatgacacatttaaccactggctagtgcatcggtttgatagattgtgatgacttactgttaatggtacggtggtcttgggctcatgtgtgcttgagcaaacaaattcactaatccaaggcaagcgcggagcagccccatggcgtcatgtgtgtgtacgctgcggccaactagtcccaggcaagcaacacggcaaaaagcatataacattaaagataaagttgcatcaaaatatttttcatgataatatattgatacagtccctacatttctttacttgttagggtatttacattgtatcagcatgttgtatcactatctcttatcatacgaaacattaaatatatatatagttgcatcaaaatattttccatgaaaatataataatgtcattttaacatatcaaatcttaatatgtttatatatattagtgacttaagatttgatggtttgtactgcactcattctaggacataatctatttgagaatgaagagaatttcataaatcctaatagaacaattcatggcactagatcatccagtgagagttgtggttaaaccatcatctactattagttcaaaagttcggcatcagtgccgtggatggtagaaacattgtacctcactttttttagtttaccttccttaactttccatgttcattttctgtttaagaagtgggaatattggattgtctggaataaagtcggaaagataaactcttatgtgttgtggttacttagtcaaatgtggttacttagtttatggcacaacaataaattgtgcttccaaagaggagaactgcaccaacaaaaatatggaaagcaattcatcattaccaagaaatagtggaatttatttatggattgaagattggtggcttctggttgtactaaggaatactgtccattccaacatccggggggatattcgatgagaacccgtgagaaaactggatgtaaacattttctaaattcatgaagaaatgttaatctaaaatttgtctttttgttaagcatgaatacgttcccaccaaatctacttttaatcgaaaatttgtctttttgttctcaagaacttgagtttgaacttgaatatatttcatgtatatacctatcactagtattttttttcattaatttagaaaacctttaggttcggttttcacgggtttttacttatttgatggttttcattggatattcccccccaacatccataccatgacatatcaattaatcatcgagatacacaataattgatagtgtgttttcttaaaattaaattcaataaagagacattttcagacattttgcttatctcctcattttgcactacaaatctgaatgcattggtttctaaatagacatactcatgggatgaaatcataaattattaagagtatttcataaacgcacaccatgccactgctaaatatatggttggcatgatgtgattgtcaagtgagaaatggttacactcctcaaaggcct

SEQ ID NO: 22729 - DNA, 1249 bp, Oryza sativa
  ref <308>: DATABASE ACCESSION NUMBER: AK072892
  ref <309>: DATABASE ENTRY DATE: 2001-12-06
gagtagtagtagtagtgcagagatatctgaagaaaagtgcagagaaaaaagaagcagccgaggtaatataaaagttggagagaaacaggtgaagctgcaatatttcgccacatcttcttcttcttcttctccatgccgatcgcctccaagctcgtctacttccagcgccgccgcccatcgccggcgccgccggagccggagccggagcctcccgaccctcgccgcaggccctgccgagccggagccggagcctccgccgcacgccgccgcaagccgggtcaggaacatgttccaggaagcaaaagagatacctcaaagggtgtcgcatctgctggaaacataacaggacaagcaggcagcacgggctccagctcaaggctaaaccgcagcgtatcagatcatggccggcttcctgattccgttcagcaggctagggaacggctacttcagaggcttaacagcgtggacttatcaggaagaaggcaaaatacatcgttgtcatcagaaaccattcatggtggagtagccccgggcgtctccaccaccgcagatagcatattcagcagtctaaccagttgcttccacactgacgtatcgatcgctccctgcaaactccaagagagcacagctgaaaccttcaacaccgcagataagcatacgttcatcgcgcattgttctgaaccggctcctacacaagaagtagcaagctgcagagtaacagatgatgacgaactcgcgggaccttcaacggagtgctctatatgcctggagagatgtggggatgcagatgggctcctcgagctgcggtgcaagcacatcttccactcggcctgcctcgagcgatggctgcgctctcgcagcgactgcccctactgcagggccagcgtgctcctaacagcagaaggatgagaatttgaggatgaaactaaacccagctctgtagaacctctctttaagcccttaactttgtcactgctcacatgctcttcttccagtaccaagttttttcccccctttgctgatgaggctgtgaaatctgtgatacttttgtcactgtgtgaggcttcagaaagttagcatcttactgtaccatgaatgtgtcttgaacctgactgggttgtttgcaactggatcatgctctctccatgcatatagagtgagagctgagctgctacctgtttttccatggaagcttttgtttgctcttccatgttgtgcaatctgaaagtgagtgattgcttttgctctg

SEQ ID NO: 22730 - DNA, 1526 bp, Oryza sativa
  ref <308>: DATABASE ACCESSION NUMBER: AK072893
  ref <309>: DATABASE ENTRY DATE: 2001-12-06
gatcctccccacctccctcctcgccggccggagttctcgtctccggcgaccgccgccgccgccgccctcaccgtccggtggagctccggtgatcgacgccgcgatgtcgaggtctggggccatggatcttgcatctggactcggggggaagatcaccaaggatgaggtcaagtcggctgtcgatgagtatgagaaataccatggatactatggaggaaaagaagaagcaagaaagtccaactacacagacatggttaataaatactatgatcttgccaccagcttctatgagtatggttggggtgaatccttccactttgctcacagatggaatggagaatccctacgtgaaagcattaagcgacatgagcactttcttgcccttcagcttggagtgaaaccaggaatgaaggttttggacgtcggttgtggaataggcggaccactaagagaaattgccaaatttagcttggcttcagtcactggattgaacaacaatgagtaccagataactaggggaaaggagcttaatcgggtagcaggagttagtggaacttgcgactttgtgaaggcagacttcatgaagatgccgttttctgataacacttttgatgctgtctatgcccattgaggcaacatgccacgcacctgatccggttggctgctataaggagatctatcgtgtattgaagcctggccagtgttttgctgtgtatgagtggtgtattactgatcactatgaaccgaacaatgcaacacacaagaggatcaaggatgaaatcgagcttggcaatggcctgccagatatccgaagcactcaacaatgtcttcaagctgcaaaagatgctgggtttgaggttatttgggataaagaccttgctgaagattccccggttccttggtacctgcccttggatccaagccggttttccttgagtagcttccgtctgactactgtggggcgtgcaattactcgcacaatggtgaaggcattggaatacgtcggccttgccccacaaggaagtgaaagggtatctaactttttagagaaggcagctgaaggtctcgtcgaaggtggcaagaaggaaatcttcacgccgatgtacttctttttggttcgcaagcctatctcagaatgagctcccagaaccacatttcagagataaggcgaggagtttgaaagaaacattatggcggtcaaagaaacacctgatgaagctcagaagcttgaagagttcttatgcgtacgaagagatgctgaaatgtgtttaactggtgaattttcgtctgttggtttgccgtgtaaaaaccgtttgatcaaggcacttgtctgcagggtgcctgttttagtctaagacgatgaactgactggtttttgtttgctcgtttctaagttgttagtgacacataagttaagtttgcagttcattcgccagtgtgtattgtaactttgcaataaggcacctgcttgatagctttcttttcatattgttcttcgacaaatataagtgatgattattacctgt

SEQ ID NO: 22731 - DNA, 1273 bp, Oryza sativa
  ref <308>: DATABASE ACCESSION NUMBER: AK072894
  ref <309>: DATABASE ENTRY DATE: 2001-12-06
gtgactccacgtgcactaccttccccatcgccggagtccggcgaccccgccgcttgccggcccctcgaccgatggatcggccgtccacgtgatggatccctcgcaggaagagcccgcgccacaggtcgccgcggccgaaggggcggagccgagacggcggcggccgggggccgcggtccgcggcgccctcggggtggccgcccccttcgcggcgtcattcctcttctccttcgtcgtcgggctcgcgggtctcgtccttggtggtctctcctccaccgcgtccgtctccatgccttccacctgccggatcctttccaccggtgttgatcttaggtcatcaaaagtttgtgagctcggactgttgaactatagagctaagcatgtattttacccctcgagtaatagaaaatttcgatgccatgatgactactattgggcttcagtctttgaggttgaatacacagaatatttttctggtcagacatcttatgcggtggcagaggccccaaaggaggctcttccgctgaattgccggcctgactttggtgttgcatggtcaacaacattgaagttcaaggtaaatgaatcgtatagttgcagatacacattgggaagtagcaaggctgatatttattcagataggctgttcaattgcaccagcgaagaaccttcaacaattgagatgctcaagaggatatttgtattgttatcgaagtcctatatgttggaggatttcaattccattggaatgcttggatacgtagtggcaggggttgtggctggtattttgagtgccttactcatcactatcttactcagaagtctccgaggactagtccttgcagttgttgggtccagtgtaagcaagcatagcatcagagtgtttgcctgtcggcttaagcgtgcctgccttcttgtagcatatgtatccgttgttggctggattactttgcagtacagcaaaatgattggattgaaagaacttctgttagattatgaaatcatggagagattcttgtaaactatagacgcttgcggcactgtatatgatatcagccgattctggtccttgagggaagaaaattttctttatttacatgtgtgcagccagaaatgctgctgccttaaccatgccgcgtgttgcggagtatgaggtccctttttgggcttaaaacttaaaagtcctttgagccgtcgaatcctttttgtggagaagcaatggctagtaagttgtaacctctatccagttcatatactggtagtttacaagcgg

SEQ ID NO: 22732 - DNA, 1222 bp, Oryza sativa
  ref <308>: DATABASE ACCESSION NUMBER: AK072895
  ref <309>: DATABASE ENTRY DATE: 2001-12-06
gaggcgtcggggtttctgcaggacaaatacaagcaagcacggctggccctgggcgacgtgacgccggcggagctgctggtgcaggaggcgaccaacaacgacggcggagtgggccccgacgccaggaccctggccagcatagccgacgccgccttcgacatggacgactactggaggatcgcgggcgtgctgaggcggaggatggcccgcgccggcgactggaaggagtggaggcccgtgtacaaggctctggtggtgctggagttcctgctcacccacgggcccgacgaggtcccacgagacttcctgccggacgttgccgccctgcgcgacctacgcggcttcacccacgtcgacgacaggggcttcgactggggtgcctgcatgcagaggcgctgtgacagcgtcctctcgctgctcaccgacgccgaacgcctccgcgacgcacgacgccgcatccgcgtctcccactctactcacgagctggtgcagcagcatggttccccttcctcctcctcggggtccccctcctctgcttcctcccggacctcctcgcagtcgcacgccagcagctggtccgtcgcctcctccgatagccccaccatggtctgccactgtgccgccgccgccgactaccgccacgacaagaagttcgacgcctacacggcggacgacgactggatgcagcacctgcaggttcacaacaccaccactacgctggagtacgacgacgaccacgaccacgaccacgactgcccgaatcatcctcctctcactacaccccgcagctgggacgcccacgacgaccacgactgcccgaatcatcctcctcacactacaccccgcagctgggacgcccacgtccacgacttgtccctgctgcagcggcgcggccgcccaggaacagatgccaccttctgctccaggatgcttggcgccgtcaacgtcagcagccgggcatccggcttccagagcttgtcgcagccggaacggaggtccgccagcaagaagctccagcgtcagctttccatggaatattgatccccccccctccattaattctatcattccaacaacaatataattccgatccgagtttagtccagccagctagctgaattgcagagcttagcctaagccagctagctagtagcttctttgatttctttggtcccttgctacactcgactcaaatcaaatgttattgttacttgtttcttcc

SEQ ID NO: 22733 - DNA, 3286 bp, Oryza sativa
  ref <308>: DATABASE ACCESSION NUMBER: AK072896
  ref <309>: DATABASE ENTRY DATE: 2001-12-06
gactcacacctcaacctcccccgagacgacggcggcgacggcgacggcgatggcgaaggagaggaagcggaggcagcccgccgacgcgccgccgccgggggacgacgacgaggggagggaccaccggagggagaagaagccgaggaaggagaggcccgacccggtgctgccgtcgcagatcaagaacaaggacaagcgcaaggaggtgcacgcgaagctcaagcgcgagaagaaggcccagaagcgcaagctcgcccgcgagcgcggccaggccgcgcagcgcgccgtcgagctcggcgagcagccgccggagaagctggtgccgcggacgatcgagaacaccagggaacctgacgagaccgtgtgccggcccgacgaccaagagctgtttgcagggaatgatgctgatgaattcaatgcagttctgaagcagcaaacaactccaaaagtgttgattaccacatgtcgcttcaattcaggcaggggacctgcctttattgaggagttaatgcaagtgatacccaattcgtgttatgttaaaagaggaacttatgaactcaagaaaattgtggaatatgcaaataacagagatttcacttcacttgttgttgtccacacaaaccgaagggaacctgatgctctactgatcatcaatttacctgctggtcctactgcacattttaaactatctaaacttattctgcggaaggacataaagaaccacggcaaccccacaagtcataagccagagttagtgttgaacaatttcactacgcgccttggtcatcgtgttggaaggatgatacaatctcttttccctcaagaacccaatttccgtggtcggcgagttgtgaccttccataatcagagagactatatttttttccgtcatcacaggtacatctttgagatgaaagaaaacaaaattgcttcaaaggacaagaaagctaagacttctgaaagcaaaagccaacctgagaagcaagtaatttgtcgcctccaggaatgtggtcctcgcttcaccctcaagctgctcaccttacaacatgggacctttgacacaaaaaatggggagtatgaatgggttcacaagatgtatcatcaaatctgctgccatacaaaggtcgttatcatccaactgccatgggattacacctcattgttcctgcccttctctccatccaagaacttatcattgctggccccatgttcttcaaggctgctatagccaccagcggcgccatgacagccccaggatcatcgtatccccgaggtagtggctgagctctgatgagcaggctggctggcagatagctgcctgctgctgggtactgctgctacacatggcctgggggtcccatcctatccaagtaaggccatatgtttctgcgcgtacgtccgtgcaggccagggcgtacgacacagaggtgggttggtcacgagtgcagcagtgcagcggcacatggcttgctccctcccctggccctgccatgttatctgctccagtttggtccaatgggtgagtgaagttatactgccacttcatctctgtttctgcagcatctgcatgctagctactaggtaaatgtttgttcatccctcttcttgaacactgtcagttagctgcatatacatgctcagttgctggccctggccatggtagatctcgagttacagctaaaaatcaccccttttatcttcagttttgaactgagttccaggtcactagaagtcttaaccatgcagtcaaatttgggtgagcagcttttatgcagccatttgggtattaaagtggatactggaatattagtatcgcgcacaaaagctaagcctggacataatttgggtgagcagccattgcgtacatgcacctacgtgcaactaggcgttaattactctcgtttttagatgggaaatacgttaatttatggcgtgttactgcatgatagcgaagatgatcactctgaataatctgcactgtacgtggcaagtgtgcatgcatgggttgtggtgcagactatttacatgagtggatcagatctgtgcactgttggatcttccgtgttcgatctgtgtgtgttctcatgcaactcaaaactattatggtccgagctgagcgaaagcaactgccgagtaacaactaagctacctgcatgtagctatatatacttctgtagtctgtaccgtaccacgtacgcacgtacaactacgataatatctctcggagggcgtatcagcgcatagccaatatgaggtgctaattaatatccgtgcttgtatacttcctctgcctcgttaatttgtccagtttcatcgctcgaaataaatttgcgtatagttacaccagaaatctaaggtatatactcctcatttctaaaatgtagggccagttcggtttggttccaaattgtgccctatcaattcattggtaattttcaatagtgtttctagttgtttggattggtgccaaattttaacaatacatctctttagataaaaaagttttggccgtctaaatttggtagtgccaaaaattgcttaaactttggcactaccaaaattttggtatggcaccaatccaaactgacccgtaattattttttaaatctaaaatagaaatgtagctatattttaatacgaacagagcaattactggcatcaaattgacgcagtacgttaagtaacatgaggtccttccgtcctttgctagtggctacaaactacaagttatacaaaaacaactagttatataagctgcctgtcagtcagtggtggtcactactacaagcacacggcgatagccaatatgaatggccagaaaattaggctagctctctgcattcacatacgtactgacgtacatatcccaatcaatacaccacgttgagaggctttcggccggcaattaagcccgaaagatatctgcaggctaattactgatcatatacatatcacacagggatattgcacaatcactgcatgccagatgccacattatattgccacatatacacccgggctagctagatgcttgctagctagctaccttttcaacctcatcgtcattaactattatcacgactactctttccattaatcaaaatgtatacatatcaagaacacatgcatggttgcattttggatatctcgatctctagctatatagctagctagctagcttcttaattagccggccggtcattcattaccttaatttgcatgtacaacgagaccaaaaaaataatgagtaaatgatgattcagttcgttcgaactcatcactcacc

SEQ ID NO: 22734 - DNA, 885 bp, Oryza sativa
  ref <308>: DATABASE ACCESSION NUMBER: AK072897
  ref <309>: DATABASE ENTRY DATE: 2001-12-06
gccccgctcggaaacccagcgccgccgccgccgcgccgctggtgccgctcaccactgtgcccgctccccgtgagcgcggccaccgcagggagcaggctcgcttatatcccccgcgcctccgccgccgcaaacccgcatcccgaccctcaggtgtctctcaccgtctcatcacttacccaaccacatctgaactctgaactctgaactctgtgaggttctgaatgactgggatcccatccttacctaagctctcgtcaaatttctgctcgatttgcaggatgagccggagccgcagccgaagggcgggttctggaccaggtggatggcggagagcgcggagatgagggccaaggtggccaagctcggcctggccgccgtgctggcctacgggctgttcgacgccgtcacctacacgacgttcttcgtgctggccttcctcggctacgagaagagcaccggcaagaacccggcggccaatctcaaggccttgctggggatagttatcctaatgtggaccggtaacaatgttactaggccattccgagttgctggtgcagctgctttggcaccggcgatcgacaaagggttgaagggtattcaagagaaacttaaccttccaagccagatgtatgcttttgcactcgtggttggctccgtggctgcggtatgcttcacaatttttggatgcttgatcctctcgaaatggggaaagtgatttgttggaatcctggccatcaagcatgattggtatgaatattggatccaactaggttagtctagttttattagaatcttctgtttcccatgctctttaagatgatgttagttttctaaacattattcagttggttaattgacaagatataaaagttacttgtcccattt

SEQ ID NO: 22735 - DNA, 1893 bp, Oryza sativa
  ref <308>: DATABASE ACCESSION NUMBER: AK072898
  ref <309>: DATABASE ENTRY DATE: 2001-12-06
ggtcccgcgctctctcctcccctcctcgacgaacagcaagcgcgcgcgctctcatctcgagatcgtagctgaagattacacattgggaaactggtgtactgcctgcctctgcgatcgatcgatcgatcgatcgccatggctgacgcgaagggcgacgaggtgttggcggagggacagatgcctctgggacggtggccgatcctgtcctacggtgtcggccacatgctgaatgacatcacgtctgcctgctggttcacttacctgctcctcttcttgcaagaaatcgggcttgctccaagggatgcagctattgtgatgctttctggccaggttgcagatggcctaatgacgattcttgcaggcgagatgatcgaccgatttgggcacttcaagctgtggcacatcggaggatcaatcctagtcggcatctccttctcctctgtcttcggtggatgtcttctctgcaccgtcctggggaccgattcctaccttgtgagaaccattggttacagcttcttcgctgccgtcttcaacatcggctgggcggccacacaagtttcacacatgtcaatggtgaactgcatgacactgaattccacaagccgggtagccttagcaagctgcagaaatgcgttcactatggtggcaaatcttggtttatatgcgatagctttggttgtatttgctttagtgagcgcgaaggcatgctcagacattgttcttcagtaccgttggatagcgtacgtttcaatttttgtgggatgctgcttcctagtggtgttctatgctggaacaaaggagccgactttgcagtcgggatctgactgcaagaaatcggctaggatttcctggggctactggttcaagaaggccttgtactaccaagtcgctctgttgtatatgcttgcaagattgatcacaaatgtctctcagtctctcatcgcgttctacgtcactagagacttgaagatgaatgagtactccaaagcgattataccagccatcatattttgctgcagcttcctcgtctctgttgttctccaggagataaagtggaacagccgccgcctgaagtcgctcctcaccatcggagcaatactctgggtgatcgctggagccgccgtcttcgtcctcccgagtcagatgcacaaccttatgtaccctctcgctatggtcatcggagctgcaaacgccctcgtcatggtgaccacaattgggctagagagcgcgctggtaggagacgacttgaacggctgcgccttcgtctacggctcgctcagcttcctggacaagatgtcgtgtggaatcgccttgtttgttctagaatcatacgaagattcgattagctgcggcgagacgagggggctgtacacggtgagcaggtttgggacaggtctgatcccctcgtgctttgcagtcttcgcgctgctggtcacctcaaccctgaagctccaggacaccaacccgagagctgccgccgctgcactggaagctccactcctcgtctgaagcacgcctccgagtgtgcttctcttaaactacaggacaccagaaaaatcgactgtatgtatcactgtatgtatcacgggaagaagaagaagaacatacataagatgaaattgcattgcagaaccctcttcagttcggtctgaagaggtaagctgcagtctgaagaggtaagctgcagcgtgatagtgtctagtaagattcagaattctggcccgaatcttaaaccttcgatgcttgtaggcagttagaaatgatctaatcagctctgttactgcttcttttcaattagatttgaaaaggtccaatgcttgtagcaatctgtaccagtgttgtatcaaagattcagtttcgagtgaggtttccgtggaaaacagcaaaagattc

SEQ ID NO: 22736 - DNA, 2027 bp, Oryza sativa
  ref <308>: DATABASE ACCESSION NUMBER: AK072899
  ref <309>: DATABASE ENTRY DATE: 2001-12-06
gaggaaacaggggagggagagaggttttgccaccgttgttttggagggaaggaaaatcctaagaaggggaaagagtttagcttggcaggtggttctcaggctcaatggctttgagcaagagaatgctattcatcttccaggccatggtttgcctctgctccttcagtttatcccaaggcaaccagcaattcagcttaaggaatctccctaccctccagaaggcgagcagcttcccagcgatgcgccacgagacatacgactacattgtcgtcggcgggggcaccgccggttgccccctggcggcgacattgtcgctcaagtacaaggtgctcctgctggagaggggagggtctccgtatggcaaccgcaacgtctcctacatggagaacttccacattggcctgagcaatatggcgccggactcggcgtctcaggccttcatctccactgacggcgtcatcaatgcccgagcgagggtgttgggaggtggcacctgcatcaatgccggcttctacagccgggccagctcaaacttcatccaggaggtaggctgggatgaagacctggtgaatgagtccttcccttgggtggaggacaagatcgtccagtggcctaagatcgcaccttggcaggctgcactaagggatgggctactccaagcaggtgtatctcctttcaatggctacacatatgaccatgtttctgggaccaaagttggtggcaccatctttgatgagactggctaccgccacacagcagccgacttacttgcagctggagaccctaacaacctaagggtgctgcttcatgctagtgtgaacaggatagtctttaactcgcagagagggcaactgaagccaagagcaaccggagttcagttcaccgatgagaatggaggactccaccaggcattcctcaacagcaactgtgatagtgaaatcattgtctctgctggcgcaattggcagcccccagctgctattgctcagtgggattggacccaagaatgaccttaggagccataaaattcctgtagttctccataacaagtatgtgggtaaagggatggctgataaccccatgaactccatattcataccgacgaaaagcccccctcgccagtccctgattgagactgttggaataactgaagctggtgtgttcattgaggccagtagtggttttggccagtcaccagaaagcatccattgccaccatggaatcatgtccgctgagattggacagctgtccacaattcctccgaaggaaagaagcctggaaaaagcacagaagtatgcaaataccaaacttaatctacccaaagagatattccatggtggttttatcctcgagaagattgatggtccactgtctacgggacatcttgccctgatagacactgatgtcaagaagaaccctgcggttaccttcaactacttcagtcatccacaggatctcactcgttgcgtctatggtatcaagaccattgaacgaatactgaagacaaaccgtttctctgaactgtctgccaacactgatggacattcaatggaaagagtgctcaatatgagtgtgcaggctaatgtgaacttgatacccaagcatacaaatgacacagaatccctagagcaattttgcagggatacagtaataaccatctggcactaccatggtggatgccatgtagggaaggtggttgatcagcaacaccgtgtgcttggagtttcaggcgtccgtgtagtcgatggctcaacattttctagatcaccagggacgaaccctcaagccacggtcatgatgatgggcagatattttggagtgatgatcctaaggggaagactaggtcgagcagctggagtgtaatcgattcctggacaccagccttttgttatgtgtgacctagagaagaaaaattactaattattgctgggatctagtgtgattcaccgaagaaagacaagctaggagtttcatctgtacccagtaatcatttgtgtcatgtgatattgcagatcaaatggtttattg

SEQ ID NO: 22737 - DNA, 2722 bp, Oryza sativa
  ref <308>: DATABASE ACCESSION NUMBER: AK072900
  ref <309>: DATABASE ENTRY DATE: 2001-12-06
gataggtgtccatagcaagcagagcaggagcagagccaactgcacaaggcaaggcagggggcctctcctcgctgttctactgctgctatactctggcatcgcgtcgcgcgcgcaagcaaaagggtagttcctcaatcaaacgctccaagagaaatcaccccgccacgccacgccgcgccgggctgggctgctgctcccagatctcgccgagcggggcgctcgattatgtgggattaggtagatgagggcggcgctgttcggtgccgagaggagcggggtagtggaccacggcggcggcgataaggaggagctgttttggccggcggggaagggggggctggtggtggtggagccgaggtcggtgctggactgcacgcgcagcccgagcccgccgtattccacgtcgacgctgtcgtcgtccctgggcggcggctcggcggactcgaccggtgtggcggcggtttcggagagcagcaccgccgccgccggagccaccaaatggggagccccaggcgagcatggtggcggcgggaaggaggagtggggcggcgggtgcgagttgcccccgatacctggagcactggatgtggggctcgtcgggggcgagggctgggacgccacggccacgctcggcaacgcagccgggccggaccagtcgttcttgaactggatcattggggccgccggcgacctggagcagcctggtccgccgcttccagtgctccagcagccgcttattgacaatgcggggttcgggatcccggccgtggacaccatgggcttctctctggatcaccccctcagcggcgtcgcctccgacctctcgtcctccggtgcgcacactgccaccggcggtggcggcaaggcctcattagggttcggtctcttctcgccggaggccacctccctcgagcagccgccgccttcgatgctgtttcacgaaggtatcgacacgaagccccctcttctgggtgcgcagccgcaatttctcctgaaccactaccaaccccagccacccaaccccgccgcagccttgttcatgcctctcccgcccttccccgagcacaatcaccagtcgccgcatctccagccaccgctcaaacgccaccacgccattccagatgacctctacctcgcccgtaaccagcagcagtcatccgcggtggcgccaggtctcgcctattcaccaccgctacatggcccggctccgttccagctccatccttcgccgccaccgattcgcggggcaatgaagtcgacggcggcggaggcggcgcagcagcagctgctggacgagttggcagcggcggcaaaggcaaccgaggctggcaattccgttggcgcgcgagagatattggcgcggctcaatcaacagcttccccaacttgggaagcccttcctccgctccgcctcctacctcaaggaggccctcctcctcgcactcgccgacagccaccatggctcctccggcgtcacctcgccgctcgacgttgccctcaagcttgcagcatacaagtctttctctgacctgtcacctgtgctccagttcactaactttaccgcaacacaggcgcttcttgatgagattggtggcatggcaacttcctgcatccatgtcattgactttgatctcggtgttggtggtcagtgggcttccttcttgcaggagcttgcccaccgccggggagctggaggtatggccttgccgttgttgaagctcacggctttcatgtcgactgcttctcaccatccactggagctgcaccttacccaggataacctctctcagtttgccgcagagctcagaattcctttcgaattcaatgccgtcagtcttgatgcattcaatcctgcggaactcatttcttcctctggtgatgaagttgttgctgttagcctccctgttggctgctctgctcgtgcaccaccgctgccagcgattcttcggttggtgaaacagctttgtcctaaggttgtcgtggctattggtcatggaggtgatcgtgcagaccttccattctcgcagcatttcctgaattgtttccagtcctgtgtgttcctccttgactcgcttgatgctgctggtattgatgctgattctgcctgcaagatcgagaggttcctaattcaaccaagagttgaggatgcagtgattgggcggcacaaggcgcagaaagctatagcatggaggagcgtttttgcagcaactgggtttaagcccgttcagctcagcaacctcgccgaggcacaggcagactgcctcctgaagcgggtgcaggtccgaggattccatgtggagaaacgcggagctgctcttacgctctactggcagcgtggggagcttgtatccatatcatcttggcggtgctgatcagccataagcttcactccaccaaggttccaccaccgtttgcaagcatcgaccactccagtaatgtccatttattcttgcaattaaatgttgcaaatgaaattgttgtcttgagctgttgaactcttcatattgcttttcgttgcagcttattagctagcctagtggatttaggaatattggtgtcagtctctatagctaatgatgttgctttaggttgttgccatgctctgctcaattagccatgatcatctcattggaaacactgcttatgagtagagactagagggtaatttaacctatcaaatggttgtgtggtacagaattaatattatactgctgttgctctgt

SEQ ID NO: 22738 - DNA, 1060 bp, Oryza sativa
  ref <308>: DATABASE ACCESSION NUMBER: AK072901
  ref <309>: DATABASE ENTRY DATE: 2001-12-06
ttgggacaaatctccgaaccacaaattccaattcaaaaactttttccccgagtagcctcgccgtcgccgtcgccggagatggaggcggcgcgggagtcaatggcggcgctcgtcgacgccggcctctacgactgcgcccagacgctcgggtgctttcttgtgtcttcatcacctgcgagcagcgaggctggtatgtccatgaaggtggaaagcttggtactgcatggtgatgctttgcatggagagaaagaatttcgcagggcactgagtgcctacaaacaagctatgcaatacagcaaaaacattcctaggcaagcaacaagtaatactagaagctcagtaactgccactggccggtctccttctccaaattcttcaagtcttgcaccactcaatgaaaatgaggtgaaatttaaaattgcactttgctattctgctctacgtgagcatcgtgaagcacttcaagagatggaagggattccttctaaagcgaggactctaaaaatgaatctgatgttagggaagctatatcggatatccagaaataatcgtgcagctgctgtatgttataaagagtgcctgaggcaatgcccttatgtttttgaggctattacagctttggctgaaatggggctttcttcaaaggagttctctttgatattctcacaagcaccaaatcgaggaggcaaggctccaggtgactctttagatgcacagcgttggtggaaccgctatgttgaggcccaatgttgcattgcttcacatgattataaaggtggccttgacatatatctagacttaatgcagcgattcccgaacaatgtgcacatcttgctggaaattgctaaggttgaagccatcataggtaggaatgatgaagctatcatgaactttgaaaaggctcggttaattgatccaaacatcatgacatatatggatgagtatgcaattctccttaagtcaaaatctgactacacaaagcttaacaagttggtacatgatatgctgcatattgaccctgcaagaccagaaacatgtcttgctcttgcagcattgtggg

SEQ ID NO: 22739 - DNA, 1437 bp, Oryza sativa
  ref <308>: DATABASE ACCESSION NUMBER: AK099308
  ref <309>: DATABASE ENTRY DATE: 2002-08-28
gttcaccacctcacaagctaattcaacctactaagctagctagctagtgacaattaagtgatcacaagtgttgttgcgatgggtagagtagtggtcgtcgtggcggcggcggcggtagccgtggccgtcgtcgtgctgctgggcgcggcggcgccggcggcgagcgcgatggagttcggcgacaaggacgtggcgtcggaggaggcgctgtgggagctgtacgagcggtggcgcgggcagcaccgggtggcgcgggacctcggcgagaaggcgcggcggttcaacgtgttcaaggacaacgtccgcctcatccacgagttcaaccgccgcgacgagccctacaagctccgcctcaaccgcttcggcgacatgaccgccgacgagttccgccgcgcctacgcctcctcccgcgtctcccaccaccgcatgttccgcggccgcggcgagaggcgcagcggcttcatgtacgccggcgcccgcgacctgccggcggcggtggactggcgcgagaagggcgccgtcggggcggtcaaggaccagggccagtgcggcagctgctgggcgttctcgaccatcgccgccgtggaagggatcaacgccatccgcaccagcaacctcaccgcgctgtcggagcagcagctcgtcgactgcgacaccaagaccggcaacgccggctgcgacggcggcctcatggacaacgcgttccagtacatcgccaagcacggcggcgtcgccgcctcctccgcctacccgtaccgcgccagccagagctcctgcaagagctccgcggcgtcgtcccccgccgtcaccatcgacggctacgaggacgtgccggcgaactcggagtcggcgctgaagaaggcggtggcgaaccagccggtgtcggtggcgatcgaggcggggggctcgcacttccagttctactcggagggggtgttcgccgggaaatgcgggacggagctcgaccatggcgtggcggcggtgggctacggcacgacggtggacggcaccaagtactggatcgtcaggaactcgtggggcgcagactggggtgagaagggctacatccggatgaagcgcgacgtgtccgccaaggagggactctgcggcatcgccatggaagcatcctaccccatcaagacctcgccgaacccggcgcccaagaagatcaagaaggtcaccgacgacgacgaagatgatgatgacgaggagcaccgccaccacgacgaactctaagctcatttaattgtgtgttttacaacagtaactggctaccgtttggaggcgattgatcgacgtcgtaacaaaataagcagttcgttaatttaatcacctgtagttgatttgattgcatgctcgtattttttgcaatctagctcgattatgtttacgctgtgtaatgattattgattattaatttgaaaaagattgttaagt

SEQ ID NO: 22740 - DNA, 1256 bp, Oryza sativa
  ref <308>: DATABASE ACCESSION NUMBER: AK072902
  ref <309>: DATABASE ENTRY DATE: 2001-12-06
gctcacgttatccgcgagcgaaccaatggcggcgctctccctcgcgcgaagccccccccaccaccaccacgccgcggcggcgctcgcgctcccggccccgcgcattccccggctcgcgccgctcctccgcacccctcgccgcccccacccgctcatcgacatccgccgcctcccggccgccgcggtcgcggcctcctcgcctcccgaggcgcaggcggtcgaggatggtgaggaggaggaggaggaggggggagagaagcggcggaagctgtacgtggccaacatcccctggtccttccccgcgccggagatcgagaagctcttcgcgcagtgcggcgccgtcaaggacgtcgaggtgatcaaggggaaggatgggaagaagaaggggttcgcgttcgtcacgatggcaacggcggaggaggccgccgctgctgtggagaagctcaactccctcgatgtcatgggaaggaccatcagggtggagttttcaaagagtttcagaaaacctgctcctcctcctcctccgggcacaattttggagaggcacaaactttatgtgtccaatctcccatggaaagcaagggctcccaatatgaaggagtttttctcaaaatttaatccactttctgctaaggtggtctttgatagcccatcaggaaaatcagctggttatggttttgtttcttttgggacaaaagaggaagccgaagctgctctcactgaactcgatgggaaggagcttatgggaagacctgttcgtttgagatggcgacaaagtgtagatgattcggatgacagtgtaaaggctgatggtgaaattgaagatgcaaatgttgatggcgaggctgaaggtgtcactgataatggtactaaggatcatggtgaagataaacaggaatagtttaacaatactgtgtttggactcggagaaagttaccagcagcctcattaatagtacatatgtggagcctcattgtacagctacaagttttttacatttcctgattttaaacagaggagatattgtaatcaaatactgcaatatatgtctgtggttgacggcttgacgctgataaggagatgaggaacaaaagggtgccacctctgacctaaggtgaaaaattgttgttgaatggattaatattttaaattttagtgttcattttcagtaatgtatttactctaattatctgtaatttattgtgatcatcaatcttctcctgctgagacaattgttgtctcagcaacttttaggt

SEQ ID NO: 22741 - DNA, 3192 bp, Oryza sativa
  ref <308>: DATABASE ACCESSION NUMBER: AK072903
  ref <309>: DATABASE ENTRY DATE: 2001-12-06
gcgatgccgaagcgcccggcgagcggccgccatggccgtgaccggccacagttcagtcgcaggtgtaaacgccgatttcgcggccttagccacgaagggagtcgccgaacaaaggatagtccccaccctgtccggctcggtgatgacggcagttagatcggcggatggggaattgcggcagcggtgagccggtgactgtggggaattacggcagcggcagcagcgccggcaggggaggctgctactgttgttcatacacgagtagccccggcacgttgggcagaagcttatcgaggtcggagagaggtgcccgcttcatctccagaggagacagtaagtaacctacccctttggcctttgctcgagtgctagattctctcacaaattgctgtgatttcgctagtttggacactcgtagatctaattgggtcaatctagcatatgttaatttatccattgaattgtttgcaatatgtcaatttctgaaggaaataatgggaatacttcagaagcgattggaccccggggcttgaatttccggatagatccatagaaaattaaataagttgagattgaagttcttcgtttcaaacatactttgatggaatttggagcatattttcttattccttttggagtcttagtatgtaagagtaagactgactgcaatttaagatattcataaccttgtctttctaaaataataaggaaaccagagtagcttcagccttcttgtttagctgccttcaacaacaagactacagctgagagatgttaagccaaaacgccaaatttcgatggttttgtattaattctgaatactgaaggtcatctttttcacagagttggtagtcattgtaggaattctgaattcacaaggctaatctcttcaacattcagtatttcactaacagcatatgctttgtcagtagcagagcttgtgctttccgcatttaacttgtgaaccggatgttctctgcaaaaagaaatggcatcggtgaatttcatggagaatgcttgtaccaaacagcacaaaaaagtgggaagataatgaggtgtcttacagtgattcacagaagctttgctttggaggcatgtccagttcgtctaaagctttctcaaacatatctaaaacctgggttattgttgggcggtgcataggtaatacttgtacacaccacaagccaattaaagtcatctttttggcgatttcctcaacctcacttgtgacttcacaagcttgcaatccatcaccttgataaaagtggtcataaatccagtctgggaaatatttttcactagagttttgaaccattgatttcacatttttccggcctccaatcatctcaagcaacatcattccgtaactataaacatccgactttattgaaacaaccccaaaagaccgatacaaaacttcaggagcaatgaatccaattgttcctctagcaccggtcattgaaagcttgctctccttggtacaacacaatttagctaaaccaaaatcggcaatctttgggcaaaaatcctggtctagaaggatattttgaggcttgatatcaaaatgcacgattcgtgtattacaaccatggtgcaagtattctagcccacgagcaatcccaattgctatatcatagagcttttcccatcctaaagtttctttgggtttttctgagtaaatgtagttatccagagaactgttgggcatgtagtcatatataagagctcgttttgagccctccaaacaaaatccaaataagctaacaatattaacatgtgatgtcctgccaatgctcattacctcgtttacgaattcttccccatttcctttggagtcatgcaagaatttcacagcaaccagacgaccatcttgtagctttcctttgaaaaccacaccataaccaccttctccaagcttattactcagaaatgatgttatctttgctacctccgaatacttgtatctttttggagctagggatccgtacgatactattaatttctgaatgttactttcatttctgctgcgagtcttgttgcataggagatagcacaatatttgcccctttctatgccatatcagcacataagcacatggaaagagcaggcttacagctactggtatcaaaactgagaaaaaaaagagaagttatattctttttcaagatcataagtcgtattattgatatcaatattttgatttttttttagtaaagaactaattaaaaagcataagggcggcaaaagtaggactacactaggccataaattttgctccatatctgacacaattttgagggttgcttgtttttaatattcatcaattgaaataaagcataaatgattatagcagggtagattttgaaaagaatttttgttatataaaataactactctatttgttctactttagttgtcactttggacatcaacatagtcttcaattcacacatatggccactacatttgtagttatatgctagtacgaaatactgaaactacactgatatgaaaaaaaaaaaggccagtccactggtgtcattttcatgtgagaaattgtatatattagtgactgaaatttttaaggcttgactgcatagattctgaaatggcagtcattaaagaataatagctgaaacagggatgggttagatatgaaagaagaataaaattttacatacctattagcgttttcttcctgccattgctcttgctatctggaatagaacagaacattaatcgtcaacgcattttgagtagaactatatttatgatttcgttaaagaaagaaacgaagaatgtgtgaagaaattttaatattttgaagatgaatgatgggaaatatattgcaagatagcgaggagcatgggccgttcgtctttcttttgatgaaagattgaagaagtatgtcaattaaacctcgatttaatataaccataggaattatatgttctttatctcatactaggttgatcgattgtcgatatagttgtgtaacactactttgtttttgttagtgtttttccctgcactgtataacaaattgatattcatgcagagttcacttctttacagctaactgattgtctagaacagtccaacacttgactgaactgttcaacaaaaggattgaccgtagctaatgtaataatagtgcactgaaagtattgaatattgtcctgtcatgttacc

SEQ ID NO: 22742 - DNA, 2972 bp, Oryza sativa
  ref <308>: DATABASE ACCESSION NUMBER: AK072904
  ref <309>: DATABASE ENTRY DATE: 2001-12-06
ggctgtgaggcccgagccgcgtcgtcctccactccggcggctgagcgagcgccgcgcagcgccgccgcatgaacgggacgccgcttcgttccacgccgccgcgccttcctccctcctccggcgaagaggccgcggagcgccgccgccgacgccgccgatgatgatgcaaccatcacagcggccgcgcacacgggcacggcgagggcagcgccgccctcgtcctcctcgtcctcctcctcctcctccgttggactccggtggatcggcgtggatcgggacctgcgttgattcctcctctcggtggagtatattctgttccaaagaaatgtctgcctccgaaaaccaggccgctgaagctagcaagggtgatgatgagaagatggaccctccaaagatgaaaatacgtatacgtctaccacccagaaagagattgtctaatggcctgctcaaggcagacatggacggacctgatgatagaaacaacgcccaaagtagtggagtgcctgtgcaaactaagagcacaataccaagcaagcagttgacaatccctgcagctcagtgttacgcaagcagcatctccaccagtatactgtggaatgagggtaataacaatgcctcgagccagacacttcccaatgaacctaactgtgacacttctagcgacaagctacctgaagaagccagtgacagcatcccaagcaagaagctgataatcaaagcagctcagcattacacaagcagcatctccacaggaggactgtgcaatgaggctaataacaatacctcgagcaagacactgaccaatgaatctaattgtgacacttctagcgacaagctacctgaagaaaccattgacaacatctcaagcaaggttctgacaatcactgcagctcaacatcaaatcgacagcatctccacaggagaactgtgcaatgaggctaataacaatacctcaaggaagattctgacaatcactgcagctcaacatcaaatcgacagcatctccacaggagaactgtgcaatgaggctaataacaatacctcaagcaagatacttcccaatgaacctaattgtgacatttctagtgacaagcaacctgaagaagccaatgataccatcccaagcaagaacctgatgatcactgctggtgtgtgtatggacgatgttagcaattactctgcaaaagagggtctatgtgaggatgccaatgacactatcccaagcacgaacctgatgatcactgctggagtgtgggggcacgatgttagcaattactctgcaaaagagggtctgtgtgaggaggccaatgacatcatcccaagaaagaacctgacaatcgttgatggagtgtgggaggacgatgttagtaattattctacaaaagaaggcctgtgtgaggaggccaatgacaccatcccaagcaagaacctgatcatcactgctggagtgtggggggacaatgttagcaattactctgcaaaagagggtttgtgtgaggagaccaatgacatcatcccaagaaagaacctgacgatcactgctggagtgtggggaaacgatgtagcaattactctgtgaaagaaggtctgtgtgaggaggccaatggcaatatcccaagcaacgcacatcctgcaacaattaaggaattacctgcaaagcctttagagagcacgccaagcaagaacctgacaactattgcaatgctgggtgaagaggaaaataacaacccccttaggttgtttcatgagactgacatcaacatccccagtaaggtagtattacctaaaaaatctaagaacaaccaaagaaggaacctggtaaccactgccgtcaagtgtgaggaggcaaacaacgaccccctgagccggaggttttctgaagatgctaatcgtaacattcctaccagaaacctgtctgataagactaagaacaatgcccaaagcaatagacctactaatccagataggaagaacaacccacagaagaagctttctaccactgcagtacatgctgctcctgccagaaagaacacctctgaaatcgagatggctaactctgaaatgaagccttctacctcttttggccaggctgcagaacaaggcatcaatctggcaaacttgaaggccataaaacagtaccaagaatttgaggaaaaggtcaaaagaactgtatatcttgattacttctcgcaccaagctacagagtcagtcatcagaactgctctgaatcaatttgggactgtgagagagatcaattttgtggtgaactacaccattccctttagcatcccacagtctgcattggtcataatggagactgagaaggatgctgtggctgtggtcaatatgctcaatgagttcccttttatgatgtctggaatgccaaggcctgtgagggcaactcgtgctacagctgagatgtttaatgatcgcccccggagacctgggaacaagttagagtttcgctgggtgggcccttcagatgctgattatcatattgtcaaaaagttgaagttaatgtcgaggagacatgagctggataacttggcattagtcaagcatgagctggaagaagagcatttccttgcaaaacatcaggaggagattttgaattgcaatcagaggaagcttgaagttatggactccatcatgttgaccggcaagtttacccacttgcaacacatttatagcgtcaaggtggatgaagtgttttgtaacaaatggctcgtgtaattagccccgttctccacacagcacgggtaccttattggattggttcaatgtttgtgaactgacgtcaagggtttcgcagaatttgaaacgcttctgaaatttggacttcaaagtaggagagcaaatctgtcttcaattgcttgtatttgacattggacaattaaagaactctctatggatggaaatttatttgtccttagaaagttgattcagaaagtaacgaaagtagctgaactttg

SEQ ID NO: 22743 - DNA, 2613 bp, Oryza sativa
  ref <308>: DATABASE ACCESSION NUMBER: AK072905
  ref <309>: DATABASE ENTRY DATE: 2001-12-06
gggtcggagcaagcccaccgcaccactccagtcgccggcgacggaagcggcgcatcggcgatggacggggcgcacgggcagaggcagccgatgtctccggcgatctctgcttcggcggtgctcccgcagcagcggcagatgcagctccaccaccaccaccaccacccggcgcggtcgtccatcgccgatctcttcaccctatacctcggcatgaactcgaagcagcgggtcgaggatccaactagggagacctcgaacaagttgcagaagagagtaactgctatgaacagagatctgcctccccgagatgagcaattcatttcggattttgagcagttgcacatgcagttcccagaccaagagcagctgcaggcagttacggaatcagttctcatctcatttgtcctgcagtgtagtagccacgccccacaatctgagttcttgctctttgccacacgttgcctgtgtgctcgaggccaccttcgatgggacagtctccttccttctctacttaatgtagtttcctccgtggaggtaccaatggggcaaggggtttctgtgactactggtggcccggcaacatcttcttcatcagctattgcagtgccaaatgccccaagctttcacccttcaaatcccacatctccattgtcagcaatgaacactataggatctcccactcaatctggtatcgaccaacccataggtgcaaatgtctcacccattaagggagcagaattctctagccctggacagcttggtctgacagctagaggtgaccagtctcgcaggggagcagaaattagttatctgcatcacttatcctgtagaattattctagcagggctggagtctgatttgaagccagccacccatgctgtgatattccagcatatggtaaattggcttgttaattgggaccagcgaccgcatggtgtggaccaagctgatgcattgcaattgcaaaccttgaggcttgaaagacctttgcatgaatggatgcacccatgcttagatgtgatatggattctagttaatgaagataaatgtcgtgttccattctacgagcttgttcgcagcaacttgcagtttctcgaaaatattcctgacgatgaagcactagttagtattattatggagatccataggaggagggacatggtatgtatgcacatgcagatgttggatcaacaccttcattgcccaacatttgcaactcatcggttcttgtcgcaatcatacccaagcatagctggtgaatctgttgctaatttgcgttattctcccattacttatccaagtgtattgggagagccgctacacggagaggatcttgcaaactccattcctaaagggggtttagactgggaacgtgctttgcgttgcttgaggcatgcactccgcacaactccgtcaccagactggtggaggcgtgttcttcttgttgctccttgttatagacaacatcctcaacaatcatcaacgccaggagctgttttctcacctgatatgatcggtgaggcagttgctgacaggacaattgaactactgaggctcacgaactcagagactcagtgctggcaagattggcttttatttgctgacatttttttctttctgatgaaaagtggctgtattgattttcttgatttcgtggacaagcttgcatctcgagtaacaaatagtgatcaacagattcttcgcagtaatcatgtcacttggttactcgcacagattatccgcattgagattgtgatgaacacccttagttcggacccaaggaaggttgaaactacaaggaagataatttcgttccacaaagaagacaagagccttgatccaaataatatcagtcctcaaagtattcttcttgatttcataagtagcagccaaactttgcggatttggtctttcaacacttcaattagagagcatttgaacagtgatcagcttcagaaaggcaaacagatagatgagtggtggagacaaatgacaaaagcttctggggagaggatgatagattttacgagcttggatgagcgggcgatgggcatgttttgggttctctccttcaccatggcacaaccagcatgtgaagcagtcatgaactggtttacatcagtaggagtagcagatttaattcagggacccaatttgcagccaaatgaaagaatgacaatgatgcgtgaaacttatccactgtctatgtcattgctttctgggttgtctatcaatctatgtttgaaacttgctttccagcttgaagagaccatatttcttggccagaatgttcctagcattgctatagtggaaacctatgttagactgctgcttataacccctcattcattgttccgcccgcattttacgacattaacacaaagatctccatctatcctgagcaaatctggtgtgtctctgctcctacttgagatactgaattacaggctacttcctctatacaggtatcatgggaaaagcaaggcattgatgtatgatgttacaaagataatatcaatgattaaagtcaaacgtggagagcatcgtctttttagattagcagaaaatttgtgcatgaatttgattctctcactaagagacttctttttggcg

SEQ ID NO: 22744 - DNA, 3435 bp, Oryza sativa
  ref <308>: DATABASE ACCESSION NUMBER: AK072906
  ref <309>: DATABASE ENTRY DATE: 2001-12-06
gaaggaggtggccaactggggacttgtcttccgaatttctatcttttgccagatcaccacggcatgcctcttcctcctccacttcaactaccgtgccatccgaagctactccagatgccattcgaccaagaagatcagcccggaatccatggcgtgatgctctcttctgaccactgcgggctgtaccctctgccggcgcttccgttaagcaactccgccgccgccgccgccgcaaccgtcgcattggggaagcacagtgcagccgccggttccatgcccaatattggcggcgctgaggaggtggccaccactgtaaccaaagctggcaatgagagtactacttgcaatggctccactacatggtggaggggctcgacgatggcggcgatgggggagaaggggaagatgaagatcaggaggaagatgagggagccgaggttctgcttccagaccagaagcgaagtggatgtgctggatgacgggtacaagtggaggaagtacggacagaaggttgtcaagaacagtctccatcccaggtacatatgctcaacttaaccaaaaccctacatatttgatttcttatatcatttatacatatgtgtagataatagattccccgtttcttatcaattaactaattataaacataaacagaagaatgtctcgatgcctatttaatttggttaattagtaatacgcaagtttatatataccagataaaatatcaattttatatgtacagaactgagccatgttgatcttgttttttctcctaaagggcttcttcagaacatggaaaatttgtaggattttcacaggaaacatttcaatttctcccaaattctcgtgaaattcctcccaacccaatataccaagggtactctctatggcagaagagaattaatgcatgcctggttaaactaacttgtcaacaaaggtcttgatatgaatagattagaagctgatttaagacaaggcaaaatatctacaaatataattatatatatgcaggctagattattacttttcctttttatatcaatatagttaaaagcgattttacagtacttaagagatgttaggaggtgccaccgtttttaatgtaaattctggtacctctgtaattagtatttaaggtactaccaagtctttacaatagaaaatatggtatctcttaacaagggaaatgtaaaattcctcatttaatttggtatgtgcttatctattagctctgtacttatgatatatatgtttattttgcttctacctacaatcgaaataaacgcagctactcctataacatattgctgtccaattatatgatccatatgtcaaaagtgttcgccagtatatggaaaagtttcacacacttgtcatcagatgacccttgcaaataatcttaattatgtactagttaattaaggtccaagaattaatgggtattttaattaaatgggggttcactttgttataacaatgaaaataatctattgagctgaatctgacaggctcaccttctgcacagttttattaaaaaaatatttttaatgcaaattgttacattttggtgaacaagcttaattagttactagttacatttcggtgacaagtttaacaaactcatcatacataactagccgtatcagttctttaatttatgataggtactgtcatccctgatgcagataaagggacgggtcataaatagattaaggatcgagttcttaccacaaatattctgaatatgcatgtatgagaaggagtcttggggtaattaattaaggtataacggatcctaatatgggcaccatgaaagagaggaccctaaatttgccaaactaaggacgatgcatgccattctacacactcatacaacacaagtagtgtaagccttagctatttcatgcgataaaataaacggcaattagcagccaattaacataggcacaaaaggtacattaataagaaagatgcttcagttcccaattcatacatccgtttgtgagaagctgtgttaggagtatactgcactgtatctggcatcttatatatctatgtataatgttcatataatgatactatttctttatctcattaaaccatatcacctcaattgtctttgacacttagatgattaatttatggtccaaattatttttatcattttctttctcatacgaagttatatcaccttagttttgtctttagatgattaatctatattatttctccttttttttattttgtcgttgaggcatatcaccttagttttactttttaatgatcaatttatatatgatttaaattattaaaaatcacgccatctaaactatttttaacttttttcatggtcgatcaaagatgaaaattatataaaattacgtcatccgtcatctagctatttttacatgttatttgttctattattatacagaacttccgctgcgatgcgcgggcccaatctaactcccatctccttgcagaactcgatcgataaaaattaattaatgttgtcaattagctaattacgtcgcatgcgggagtcatcgcacggccaaatatctaaaaaaacatgtaatagtcctttcatttcagtaaataaacacatctatatttttttaatctatatattagattgagaaatggaaattggttagtcagtactccctccgtcccctagtataagggatagactagtactccatccgtttcataatgtaagtcattctagcattttctacatttatattgatgttaatgaatctagacatatatatctatctagattcattaacatcaatatgaatgtgggaaatattagaatgacttacatggtgaaacggaggaagtatataggaggacaccatgaatataactctctggttttgcggagcttctgatctgttggagatcagaactacaaacaggcatttttgtgtgatttggatgtacacatgccaaaactgatcgacgatatatatatgaatgcgcatatgcatgcatgcaggagctacttcaggtgcacgcacagcaactgccgcgtgaagaagcgggtggagcggctgtcgacggactgccgcatggtgatcaccacctacgagggccgccacacgcactccccctgcgacgacaactcctccggcgagcacaccaactgcttcagctccttctgaagattttagcactttgcattttcgtcgttgatccatccatcaatatatataccgtcgtatacctatatgtccaccgtttgatcgattaactgtggctagctctagctctctttcattttgatggttgagatatataggcgacgtaatatcgagccatgcctgcgcaatgtaccagtactgctagctatacgtgagatgtattgcgtgcatgcacgtacaatttacaagcagcagtcaataaattaagctatgtatttcttct

SEQ ID NO: 22745 - DNA, 1478 bp, Oryza sativa
  ref <308>: DATABASE ACCESSION NUMBER: AK072907
  ref <309>: DATABASE ENTRY DATE: 2001-12-06
gcgacgtgcaaggggagggggtaccggcaggccatggagttgatcgacctgatgcgcgccgaggggtgcacgccgaacaacgtgacgtataatgtcctcatggatggtatgtgcggagaaggtgatgtggatgacgccctcgagttattgagaaacttgccctctcatggttgcaagccgagtactgtcaactacaacactgtcttgaagggcctctgcagtgccgagaggtggggagatgccgatgagcttgtaacagagatgctccgagagaattgtcccccgaatgaagcaacgttcaatgtggtcatttattcattgtgtcggaaaggactgctccagcaggcaatccagcttctagagaaaatgtcaaagcatgggtgcacggcaaatattgtcacctataatgccatcatcaacggcctctgcgagcaaaggaatgtggatggtgctatggggttgctaagcaagatgaaatcttatggttgtaaacctgatattgtcacctacaacactctattgaaggggttgtgtagtgcagcgcgatgggtggatgctgaagagctaatggataacatgacccaaaatggttgcctcccagataatgtgacattcaacacactgattggtttcttgtgtcaaaaagggttgatggtcgatgctattgaagtatttaagcaaatgcctgacaaaggttgtactccgaattcgatcacttacagtacaataataagtgggcttgccaaggctactaagctggatcaagcccttgagttattcaatgaaatgggtcacaaaggattcaacccagataaaatttatcagttattagctgagtgtctgaatgatgatgatacaattgaggaagcaattcagactgttcgcaaactgcaggattcaggcatatcacctcacactgtgctctacaatgcaatcctcgtaggactttgtagaaatggcaaaacagagtttgctattgatatcatggcttatatggtgtctagtggttgcatgcctgatgacttgacttacgtcatactcattgaaggtctggcatacgagggctatttgaatgaggcaagagaattgctaatcaagttgtgctctagagatgttcttgttaacagcttgatcaagagtgaagctctgttgttagatcaaaatatccacgcttcttgattcatgttgaggtcaagggcttgcttgttcttttgacttcatttatgtcatagtgaattagtgatggagtaggttagcacttacacattgcttcagttttgttgatatgtttagttaccattgcttcagttgtattgtagactaaagattagttctccatttgctttagttatttatctgaagatgtgctcaaatatctgtcactgttggttggtcttagtagcaattttctaaggataactgtatggttacaaatgtcatcatgttggattgtaaatatgacttggtttttactttct

SEQ ID NO: 22746 - DNA, 1309 bp, Oryza sativa
  ref <308>: DATABASE ACCESSION NUMBER: AK072908
  ref <309>: DATABASE ENTRY DATE: 2001-12-06
ggcttctttttttttaaaaaaattatttctctctctttaatttgttcgtgcaagtgcgacgcatagcagccaacctcgccgaggcggagacgacggcgatattgtctcgttctctcgccttccctcgtcgccggatttcgtctcgcaggattcgtcgcgcgcgtccccgtcgcctgattcctttcgccgtcctcctcgcttgattcatctcgcaggcggccggttcgtccaatggcgagggagggaatatcctacatattattgaagaaaatggaggagataactggttcacatggcgagctgctgttgtcgttgggtggaagcaggtagcgggcacatgctctggcagtgatggtgaagttggtgtgcttggtgacgtaatttgattaccttttgaagtgatgaggatgaattgacaattttccactggttttagcatatgagtgcactgtggtatgttgctatacacgagctcacagggatcagggacgctagagcactcgggcttgacggcgcttttttaatttctcctctttctcttggggagtcatttgcgcatatcgctcccgatctctctgtctttttcgtatattgggatccaagtgtgaagatggcgatccagatggtgtggtagcatcaagcatggaagatggagctgttgataaacacatatataggcaatatagaaagtgttattcaaggagtacaggtagacaattgcataagcacttggcaagcgaaaggatcaactacgatattataccaagtcatgaacagtgcatcgaggctacctgatgacattcttacgatatacatgtgtgtgcctgaaatttaaactttcttctacttcagaggctacatgatgacattcttgctggttgctgctgctagctgctgtgctacctggtgtattcttttcttgcaattttgctcctagcttctatgccaagctaatatgtggtgtggtgtggtgtggtgtatatatgtaactagctagcctataatcctactcggtacgcttacgctcggagagaaaatcggagatgttgcgatggcacaaccgtgatgtaagcggtggacggacggacggacggacgaacggaaatggctgttgaagcatatttcagttgcatatttgtttttcctactacagttgactaatgcagatgatgtgaactacagtaatctgtatgtgaccagcatgttcatattacagatcatgttgacatagaggaagcatattatgtgctaacaatttctgaagaaaaatatctatctatctatctatctatctatctatctatctacc

SEQ ID NO: 22747 - DNA, 2685 bp, Oryza sativa
  ref <308>: DATABASE ACCESSION NUMBER: AK072909
  ref <309>: DATABASE ENTRY DATE: 2001-12-06
gcgaggaagcagccatccttgtgccgggggacatcatcagcgtcaagcttggagatatcatccctgctgatgcccgtctccttgagggtgatccgttaaagattgatcagtctgcgcttaccggtgagtcccttccggtgaccaagggccctggagatggagtgtactctggctccacatgcaagcagggtgaaatcgaggctgttgtcattgcaaccggtgtgcacacgttcttcggcaaggccgcacatcttgtcgattcgacaaaccaagttggccatttccagaaggttctgactgccatcgggaacttctgcatctgttcaattgctattggaatggttgtagagattattgtcatgtaccccatccaacacagggattaccgaccagggattgacaatcttttggtgcttctgattggaggaattcccattgccatgcccactgttctttctgtgactatggcaatcgggtcacaccgcttggctcagcagggagcaattacaaagaggatgacagctattgaggaaatggctggtatggatgttctttgcagtgacaaaacaggaacactaaccttgaacaagttgactgtggataagagtcttattgaggttttccaaagaggtgttgaccaggatactgtcatactaatggctgccagagcttcacgtaccgaaaatcaggatgccatagatgccacaatagttggtatgcttgctgatccaaaagaggctcgtgctggtattcaagaggttcattttctgccattcaatccaactgacaaaaggactgctttaacctacattgatggtgaggggaaaatgcaccgtgtaagcaagggagcaccagaacagatccttaatcttgcacacaacaaaactgagattgaaagaagagtcagagctgtaattgacaaatttgctgagcgtggcttgcgatcacttggtgtggcataccagcaagtgccagatggtaggaaagaaagtcctggaggaccatggcaatttgttgggctcttgccactttttgaccctcctcgacacgatagtgcagaaacaatcaggagggcactcaaccttggtgtcaatgttaaaatgattacaggtgaccaacttgcaataggcaaggaaacagcacgccgcttgggaatgggtactaatatgtatccctcatctgctttactgggacaagataaggatgaatcaattgtggctttgccagttgatgaattaattgagaaagctgatggctttgctggagtctttcctgagcacaagtatgagattgtgaaacgcttgcaagcaagaaaacatatatgtggtatgactggagatggtgtgaatgatgctcccgctttgaagaaggctgatattggcattgctgtggacgactcgactgatgcagcccgtagtgcctccgatattgtcctaactgagccaggccttagtgtgattattagtgctgtgcttacaagtcgagcaattttccagaggatgaagaattacactatttatgctgtttcaattacaattcgtattgtgcttggttttatgcttcttgctctgatatggaagttcgatttcccaccatttatggtcctgatcattgccatcctcaatgacggtaccataatgaccatttcaaaggacagagtaaaaccatccccacaacctgatagctggaagttatctgagatttttgcaactggggtcgtccttggtagttacttggccatgatgacagtcattttcttctgggtagcatacaagactgatttcttcccgagagtgtttcacgttgaaagccttgaaaagactgctcaggatgactttcagaagcttgcatctgctgtctatcttcaagtcagcacaatcagccaggccctcatcttcgtaactcggtctcgcagctggtcatttgtggagcgcccaggattcttgttggtttttgctttctttgtagctcaactgattgctactctgattgctgtatatgccaactggggattcgcttcaatcaagggcattggatggggctgggctggtgtcatctggctctacaacatcgtcttttacttgccactggacatcatcaagttcctgatccgttatgcgttgagtgggagggcatgggatcttgttcttgagcaaaggattgctttcacaaggaagaaggatttcggcacacaagaaaaccagctcaagtgggcgactgctcagaggaccatccatgggctccagccagccgccaccgcggctgtcttccgcgacatgacaagctacaacgatctcaaccagcttgcagaagaggcccgtaggagagccgaaatcgcaaggttgagagagctgaccaccctgaaggggcggatggagtcggtggtgaagcagaagggcttggatcttgagaccatccagcagtcatacaccgtgtgattaacagagaatctccaatatatatatttattatatactatttataatgtgctaggccacaacaataatttacctggatgatgatgattgagcggatttccagtgtcggtgcggtgctaatcgctagagttcatcccccatctatcttgtgtccattaaccacccccggcagatgggcttgcattgagatactatatacaaactctttttactactagatgatataatagttcaattttgttttgcc

SEQ ID NO: 22748 - DNA, 2800 bp, Oryza sativa
  ref <308>: DATABASE ACCESSION NUMBER: AK072910
  ref <309>: DATABASE ENTRY DATE: 2001-12-06
ggcgatccaacccccttccccttcgccggcgcagcatcggacctcgccgccgcggcggttcttctgagcggggccggggcggggcggcagctggggattcgtcccgtgccccgtgctcttcctctgcgtgggccggggcggagggagggaggggaagtcggtggtgaggtggcgtgttgtgtggcgcagatgtgagggcggaggaatgcagaggtcgcggagagcccttctgaagaggaaggcggcggcggcggcgaaggaggaggaggaggaggcaggggtgggcgtggctaccgcggcggccgccgggaggaggcggcggcggcggctgtacggcttctccgtctcgcttgtcgtcgcctgctgggtcgtcctgctcctgctcaaccccctcgtcggtcatgggaacggtcaacgagatgaagggatttttgcggatgaaggaagctctgatccctcgtttgattctgttgagcctaccttgagcgaaggctctgttgattcagttgtacagcaggagaatggggaaaatcatgcgttgccaggtgatagctgtgctaaacccgatgaaaatcatgtgctttctgaagagacactgctggagaaagatcagctttgctccaatgatgaggcacagggtgatagcatggatgctctgcccaaggataacgttgatcagggtgagaatcttccacggacagatgatgattctgtagttcatccagagggggaggtggagagcgaaggtgttccaagaccagcaaggttatcacgagttgtccctcctggtcttgatgaattcaagacacgagcgattgcggaaagaggaaagggtgtccctagtggtcaacctggaaatgtgatccacagaagggagcctagtgggaagttgtacaattatgcctcggcagctaaaggggctaaggtcctggaattcaacaaggaggccaagggtgcttctaacatcctagacaaggataaagacaagtatctccgcaatccttgctcagcagaggggaagtttgtcattatagagctgtctgaagaaaccttggtagatacaatcgcaattgcaaattttgagcactattcttctaacttgaaagaatttgaaatgctgagcagtctgaattatcccacagatagctgggaaacactcgggagattcactgttgcaaatgccaagattgctcagaattttacttttcctgagccaaagtgggctagatatctgaaactcaacttgcttagccattatggttccgaattctactgcacgctcagtatgcttgaagtgtatggaatggatgcggtggaaaagatgctggagaacttgattccagttgagaataaaaggctggaacctgatgacaaaatgaaggaaccagtcgatcagcaaacacaattgaaggagcccactgagggaaaagaatcctcacatgaacccctggatgaagatgagtttgaactagaagatgataaactaaacggtgattcatcaaagaatggtgctcatgatcaagttaccgagacaaggccaattcaggctggcaggattcctggagatacagttcttaaggtactaatgcagaaggtgcaatctcttgatgtgagcttttctgtcttggagcggtatctagaagaactaaatagcagatatgggcaaatttttaaggattttgatgctgatattgataccaaagatgcactcttggagaaaatcaaattggagctgaagcatcttgagagaagcaaagatgactttgcgaaagaaattgaagggattctctcatggaaactagttgcttcctcacagttaaaccagctactcttggataatgtcataatcagatcagaacttgaaagatttcgggaaaagcaggctgacttggagaatagaagctttgctgtaatattcctgagttttgtttttggatgtttagcgattgctaagctgtctataggcatgatatttaatacctgtagattatataattttgaaaaattcgatagggtaaaatctggatggcttgtgttgctgttcagcagttgcattatagcctccattttgataatacagtgatgtacctatcaactccatataattgcggctgcgctttgtaattgcctgaggtgtctaattcaaaatctattacaatgcatctttgagatcttacacaagggagtgtagttattataactcgtcggcgatctcagtttggagggtagaaaaggaaaaggctgtggtacccaggtcatttttaagttgcagcaagctaccagtgctagattatttttgtcagctgcatggtcctctccagtggaatgtagaagcaaatctacctggaaagcatgtgcatgcacctggagccaggcaatttcttttataagttcagaaccatgacaggcctccatgtgcttccttgtatattccaagaagagatggagtaatatatatcttggcatgatcgctgtgcactcgatgttcttaatctgagtggccttcctgcctggtgcacatggcctcaacatcatgttgctttacaaggcagtactccgtttgcttccagcttgagaggccgcattgataactgctaacggtactgaatgaagtcaatgacctcaaacatgtactacaaatgtacagctcttttagttgaaacagtactttgcactggtttgctgtaaatttgttggttgcttccagttccagatctcttgatagccatttttgcacatatctataaattataggagacttttgcacatatctataaattaaagtaagtaggcttccatg

SEQ ID NO: 22749 - DNA, 835 bp, Oryza sativa
  ref <308>: DATABASE ACCESSION NUMBER: AK072911
  ref <309>: DATABASE ENTRY DATE: 2001-12-06
gacacgtctcccaccacctccgcgatcccctctcctctcacctcgcctcccatggcggccgcgctcctccgccgcgcgctccacctccacctccacctccgccgcgcgctcccctcccctccccgcgccggcgcgctcctcctccccgccgccgcttcctcccccgcccaccgcttcctctccggcttcaccaccaccacccagcagaacagcgcctccaccaccaccatcgacctctcctccgacgagagccgccgccgcctcatcaacaggctggtgtacaggagcaagcagcggggttcttggagctggacctggtgctcgggacctgggtcgagcagcacatccactccatggacgaggccaacatccgcgccctgctccaagtcctcgacctcgaaaacccagatttgtggaagtggcttactagtcgggaacaaccacccgaggcagtgaactctaatcctgtatttatcgctgttaaatcgaaggtcacggacaacctgagcaagcactcttctcctgggaccagatcagcacctggtcagccatgggtgagagggtgggatgacaagcgaggcattgaagggccaaagtatggaaatcagtgatgagatatgcttcagagaatggtagcggttttatgcctaagtataatcctgttttgttgcccctatagtttggtgcttgtgtagaataaattaaatcatggtatccaatgatttggaaatttggagtgtcaccatgaatttggattgacaaataatgctctgtacaagtttcaaacactttctggttgaagacaaagcagtgtggtggtaacaacttaacatgt

SEQ ID NO: 22750 - DNA, 1358 bp, Oryza sativa
  ref <308>: DATABASE ACCESSION NUMBER: AK072912
  ref <309>: DATABASE ENTRY DATE: 2001-12-06
gatgctcggactccggctaatcatcggggcgtcacctgcgttatactaagtttctttaatttcactgccttcgatctctgcaggttcgtagatcgaccaggaattcgcgatggttgcgctctccaagttagtgctgatcactgcagtggcgctgctgggctgggcgtacaaggtcgcgcggccgccgccgccgccgatcttgggcggtccgggagggccaccggtctcctctccgagagtccagctcaaggacggccggcacctggcctacagggaagccggggtcggcagggagatcgccaagtacaagatcattttctcccatggcttcgcctccaccaaggaatccgacttcccggtgtcccaagagctggcagaggagctggggatttacctgctgtacttcgacagggctgggtatggcgacagcgacgccaacccgaagcgggggctgaagagcgacgccacggacgtcgaggagctcgccgacaagctgcagctcggggagaagttctatgtggttgggacttccatgggcggctacgttgcgtggagctgcctcaactacatcccttacaggctggccggcgtggcgctggtcgtgccggcggtgaactactggtggccgatgcccgccagtgtgtcggccagtgcgtaccgcaagctggacgtcggggaccggaggacgttctggatcgcgcaccacatgccttggctgttctacgcctggttcaatcaaaagtggttcaggatctcaccgatcgtggaggggaagcccgaggctttcactgaaaaggactgggagatcctagctgagattcagagaactggccaattggacagggggagggcgacgaagcagggagcctaccactcgctgtgccgcgacgcgacgatcctgttcggggcgtgggagttcgacccgacggcgatcgagaacccgttccccaacggggacggcgtcgtcagcatctggcaagggcgcgaggacaagatcgtgcgggtggaggcgcagcgctacgtggcggagaagctcccgtgggtacggtaccacgagcaccccgagggcggccacctcttcatgtgcgccgacgggttgggcgacaagatcgtccgggagctcctgctcggcgaggagccgcgagatttgtagacagatcgagttcgtgtcctgtttcgctacacagagaggggaacacaaactcacagattggggaggaatataggtccaagcggtgcttgtagttgttgatggaataaacctccgatttgctaaactagaaaatcgaacttaaaatcctgtgaatttctaacttctgatatgcaccgcagtctgtgctccgatcaggctagtgttg

SEQ ID NO: 22751 - DNA, 3217 bp, Oryza sativa
  ref <308>: DATABASE ACCESSION NUMBER: AK072913
  ref <309>: DATABASE ENTRY DATE: 2001-12-06
gaccggccaccaaaccggccatttccgcttccctattccgccccccttcctccgctcccaaccgagtccccggcgccgccgccggctacatcctcgccctgcgtcgagggccacggcgccgcgcccaccgcccgtcgcagcgcccccgctgctcggccacggctcgcacgaccgcgcgggtgagagaacagccggcgctgccttggcctcggctcggcggcgcgacgcccccacccactccaggctccacgtgaggaatttttaatgcttgaaatgactgaaagttggatagaaggctcaaaaaacacttcagctccagaatcagtttcttgttcagtttctagatatgaatcatcaccgccaagaagactggggaaaagaaatatttatcatctattagctcaacgggagatctctcctcggacaaaacaccaagctaaaaatatttggtctggatctccagaatgtgctactggttcaattgagttagcattttgggttacagatgctagacatgatcttttttcttgggctgaatcacaatccttgcatcggtggtctgccaggtattgtcttctcctgcctgctccaaggtcaaccattgcagctgcattcagtccggatgggagaacacttgcatccacacatggtgaccatactgttaaaataatcgattgccaaactgggaaatgtttgaaagtgttgcttggacattggcgcactccatgggtggttagatatcatccattacatcctgatatcgttgctagcggaagtttggataatgaagtttgtctatgggatgctaaaacctcccgttgcattggatcacacttcttctataagcaaattgcatcaattgcatttcatgcaaagggggagcttctggcggttgcttcagggcacaaactgttcatatgggactacaataaacgagatgaagcttctgacccaccaatgatattaagaactcgccgttcactgagagctgttcaatttcatcccaatggggctccgtatctactgactgcagaggttaacaatcttgattctgctgattcagaactgacccatgcaacatcttctggctattcaaactcgccttcggctgtattttttgcaatcatgaactccgcatgttgtccatactctgagtctaggttttcatcaccgtgcttgatctggcctgcatatgtcagagatgatggaagcatatgtctgcttcgcaatgactgggttagtggttcatccgatgtgcagcagccatcagattctgaaactcaacaggctggccatatggttacacctatggatgtatgccctggagaacctggggtgaataattatgatgatgaagattctgcatctttatcaaatagaatagaaatgcatactcccagttggcagaatagctcaagatttcacaacagtagtgctgctactgatcttcacaggattgatataagacaagtttctgacctgagcagtgatacgccaaatccagaaatgcctgcacattcaagaattgatgttccaaatagtatgccaatggatttgttcgccttttcaaatacaatagatgttcaaatgttcctaagagacgtagaggccggacatcaccataataattacactggtggatcacatagctgggaactgccttttctccagggttggttgatggcacaaaaccgtacaggattgcgtgcaacacttcctaacaatgaggttataggagacttacctatcggtggcactgctgggactgataatgtgatgaatgaatcatcaaacatgtacagttttgaacgtgtagggccttcatcatcaattccaattactacggacagtttgagagggctaagtaaacatcgtcatatgctggcctctgtacctggtggagcagggacttcgcttcaaggtgctcaaaatggtgaagctcatgttaatgttgtctcattaggtgttgggtcagaatttgctacgtcactgtttgctggtgacggtactgaattaccctgtacagtgaaacttagaatatggcggcataacattgacaacccttgtgctgtgttagcacctgaggcatgctgcttgacaatctctcatgctgttctttgcagtgaaatgggcacccatttttccccctgtgggcgttttttggtggcttgtgttgcatgcttactgcctcaaacagaagttggtgagcatgtaagccaatcgcctgtacagtatgattcaactggggctggaacatcaccaactcgccaccctctcccctctcgtcgagttatttatgagcttcgtgtttattctcttgaggaggaaacgtttgggacagttcttgtgtcccgggcaataagggcagcccattgcttaacttccattcagttttcacctacatcagagcacatactactggcatatggtcgtcgtcataactcacttctgaggggcattttcatggatggcaagaccacaatccctgtgtacactgtcttggaggtgtatagagtttcagacatggagcttgtaagagttatccctagtgctgaagatgaagtcaatgtcgcatgttttcatccttcccctggtgcaggtcttgtttatgggactaaggaaggaaagctcaggataattcaacacaatgttgcagactactaggggaaatattcttgaggaacttatctccacagattcatatgcccaatgaatcatatcccatcccagctaaatcatggtggtcaattttgaaggaccaacatgcagatgttcgccttcctgagtaatccacaacatgattgcactgagactccggaaaacattttgtgacgatcatgaagacttcgctctgcacctaggtaacagtgacgcgggtaagaactaagaagcaagctgtgagagaacagtcaaggaaaccgctcccggtggcagcatatgtgactaagttagtggttgactaatttcattgctagaggtagagcaggaggatgctggtgtattgatgctgccttagccagaaaatggggtagcagatgaaatctagcaattggcatacatgtcaatgtgtcatgttgctctgcatgacgttgtcctaatggactgtaacaatgggatgttgctgcaatcagaagcacatacgctcttattaacatgatttgctgttatgcaaatcttttttctgccggtatatggactggggttggtgtatgttggg

SEQ ID NO: 22752 - DNA, 3183 bp, Oryza sativa
  ref <308>: DATABASE ACCESSION NUMBER: AK072914
  ref <309>: DATABASE ENTRY DATE: 2001-12-06
ggcaagccacatgttctagtggctttcacagtttcactcattccaaggcaacgagctggagctctcctcctccaatgtatctatctatctctagcccaagatatatctggcttgccattctcatagcttgccagtttctgatgagccaagggagctctgtgcgtcgtcagctctcctgcccgggacagtgatgagggcaaggagccatgcttgtcaggttaggcgtcgttgttgtagcctccgtcgcagctttaactcttaagagagccaacagtggcaacagagatggccaagcaaggaaaggaaaggataaaactcgctactctgaacatggggagaaagaagaagagaaggaagaggttaaaacaatcagcggcataatcaattcagctctttcagatgatgacgacatgctctccgagatcgagagcctcctatcaggggagattgacatccccctaccaagtgacgggttcgacgtcaaagaacgctctcggtacaacagtgttaactccgagctggagaggctgcgtggacttgtgcgtgagctggaggagagggaagtgaagcttgagggagagctgctagagtactatggcctcaaggaacaggagactgatgttgtagagctacacagacagctcaagatcaagatggtggagatcgacatgctcaaaatgaccatcaactcgctgcaagaggagaggaagaagctgcaggatgacgtcgcccgtggcacaggagccaagagggagctggaggctgcgaggaacaagatcaaggagctgcagcgacagatacagatggaggcgaaccagacaaaagggcagctgttgcttctaaagaaccaggtgattgcgctggagtccaaggaggaggaggcagccatcaaggacgcagaggtgcagaggaagctgaagaagctcaaggagctggaagtggaggtagttgagctgaggaggaagaacaaggagcttttgtatgagaaaagggatctcatcgtaaagctggatgcagcacaaggaaaaataacagagagtgatgtagtttcccatgcaagagaggagatcaacaagctgaggcatgcaaatgaagaccttaccaagcaagtagaaggcctacaaatgaacagattcagtgaagtagaagagttggtttacctgcgttgggttaatgcttgtctgagatatgagctccgcaactaccaggcaccgtctgagaaaatttctgctcgtgaccttaacaagaccctgagcccaaaatcgcgtgagagggccaaacttctaatgctggaatatgcaggatcagaacgaggacagggcgacactgaccttgaaactgcttcttctgcaccttcttcacccagaagcgaagacttcgacaacgtttcagttgacagttcttctagcagatacagcttctttggcaaaaggcccaatctgatgcaaaagctcaagaagtggggaaggggcaaggatgacggaagcagcttagcttcaccgacacagtccttcactagtgactccccaaagagcgccagccagaaaccaaaggggcccctagaggctctcatgctcagaaacgcaggagatggtatgggcattacaacctttggaaagagggaacaagatcccagtgatatcatggatgaggcaaatgttgcatcttcatttcatttgatgtcaaagactgtacaaggttttgctgatgacaagtatcccgcttacaaagataggcataaactcgccacagaacgggagaaggcaataaaagagaaggccgagaaagctagggtacaaagatatggcggtgtcaacagttcaggtattgtgccatctccaagatctgcactccctccaaaacttgctcaaataaaggaaaaggctcctacagctaatgctgaatccagtgaccaacctagtgataaccagaacaaccctctagttgtgacacaactgaaacttgcaaatattgagaagagagctccaagagttcctaggccacctcctgcaccatcagccactgccaacactgcaagtgcgttacctccaccaccgccacgcccgccaggtgcacctcctccaccaccgcctcctggcaaacctggtggcccgccaccgccgccaccacgccctggttccctacctaggaatcttgctggtggtgacaaggtacaccgtgctccagaggttgtagagttctatcaaagtctcatgaagcgtgaagccaagaaggacacaacttctctgggatcaacaacatcaagtgtctctgatgtgagaagcaacatgattggagagattgagaatagatcaacattcctcttagctgtcaaagtggatgtggagacacaaggagactttgttgagtctctagcaaatgaggtccgagcagctagttttgtaaatatcgacgacgttgttgcatttgtaaactggcttgatgaggaactatccttcttggtcgatgagcgggcagtactaaagcactttgattggccagagagcaaaactgatgcactaagagaggcagcctttgagtatcaagacctgctaaaattagaacacaaggtttcgtcgtttactgatgatccaaagcttgcatgtgaagaagctctcaagaagatgtattccttgcttgaaacagtggagcagagtgtttatgcgctacttcgtactagagacatggccatatcacgctacagggagtatggaataccggtggattggctgtctgattccggggtagttggcaagatcaaattggcatctgttcagctggcgaagaagtatatgaatagggttgccacagagctagatgccttgcaaggcaccgagaaagagcccaacagagagttcttgcttcttcagggtgtgagatttgctttccgagttcatcagtttgccggaggctttgacgaggaaagcatgaaggcgtttgaagagctaagaagcaagatgtgtacaacacagacatctgctccacaaatttcatagctctaaccatgcatgctgcattccacagttgactggtttattttctttgttgaaacttgaaaggcaagattaattgagtggctaaaagtagaaaaatacaagtgtaaatcccaatatggcaggaaaggatgattaagtgtacagacgatgaatacatgcatactagattatgtatttctttgtattt

SEQ ID NO: 22753 - DNA, 1419 bp, Oryza sativa
  ref <308>: DATABASE ACCESSION NUMBER: AK072915
  ref <309>: DATABASE ENTRY DATE: 2001-12-06
gactcgctttctctctctcgcgtggcttcctaccgaaatcttcgaatccatcgtcgtcgagaagagacgaggacgccctccccagtggcggcgagcgccccccccccccacccccacccccgaggaagaagaagaggaggaggaaggttttgcgcgccgttcgcggattcctctccgtcctcacgccccggattcggttcgtcccgcggtcccgactgaagaatgaggatggacaggaatgaggaagagatggtcacgaatgactcggaccctcttctcaagagggaaaacgaggaggcagagtcatcgtcgcagctgacaccgcctaagccagcaaccttgagcgcgctggagattgaggatgaggagaccgacggttcttctgcagggtgctgccgcatttgtctcgagactgattctgagttaggtgatgaactgatatcaccttgcatgtgcaagggaactcaacaatttgttcaccgctcatgccttgaccactggagatctgttaaggaaggatttgcattttcacattgcacaacatgcaaagctcaattccatctccgagtggaaacttgggaggacaattcatggcgtaaaatgaagttccggatatttgttgcaagagatgttatccttgtgtttcttgctgtacaacttactattgctatgattggtgcaatttcttactttctagatagggatggaagtttcagaaacagtttcagtgatggttgggatcgcttcttgtcaaaacatccaataccattctattactgcataggtgttgttgttttctttgtgctactcggattcttcgggttgatactgcattgttcgtccttcaatgataaccaagacccatgcctagctgggtgccggaactgctgctatggttggggcgtcctggactgcctgcctgcttctctggaggcctgctttgccctggtggtggttttcgttgtcgtgttcgccatcctcggtatcgcatacggtttcctcgcggcaactatggctgtccaaagaatctggcagcggcattaccacatcttgaccaaaagagaactcacaaaggagtacgtggtggaagatcttcatggcagctacacgccaccgaagcttgatccagagcatgaggagcggctgaaaatgctgaagctcctctagcctctcatggcaattacagaactactaccgcctgtatatctgctcctcctctttcgcttcagattaacaaacggcaatctgttgtacaccagtgtaaatattgagtacgtgtgccgaaacaaaatgtctcgggtgagtgtttgttgtcaatttaattcgatcgatatgtttaccttgtcgcgtgagtgttcctcgatcatactgctgctggaactacactatgaacaactagtagtaattttatccttgcgg

SEQ ID NO: 22754 - DNA, 2206 bp, Oryza sativa
  ref <308>: DATABASE ACCESSION NUMBER: AK072916
  ref <309>: DATABASE ENTRY DATE: 2001-12-06
gggttgctcgatcgtctcgctctcctctcctcttctcttcgtctctcctcctgaccctttttccgctttcccttttcccccctcctcgatccgcggcgcaaccgaacacgaaagcgagagagagaggagtgcagccgctgccctgtcccctcaccgcgccgcgccgacatggagctgttctacgagctgctcctcacggcggctgcctccctcctcgtcgccttcctgctggccaggctgctggcctccgccgccaccgccagtgatccccgccgccgcgcgcccgatcacgccgccgtgatcgcggaggaggaggcggtggtggtggaggaggagaggatcatcgaggtcgatgaggtcgaggtgaagagcgcgcgcgcgagggagtgcgtggtttcggaggggtgggtcgaggtggggagggcctcgtcggcggaggggaagctcgagtgcttgccggaggaagaggaggctcccgcgaaggccgctcgggagcttgttctcgatgccgttttggaggaacgcgaggaggaaggacaagttggcgaagagcggtgcgatttggccgctgcggtggcggaggtcgtgggagtgaagccgcatgagttgggggttgaagctgctcccggggaggtatctgacgtgacgctggaggaagggaaggtgcaggatgttggggtggagcagcatgatttggtcgccgaggctgctccaagggaagctcttgacacagggttggagaaacagggtgttcccatcattgaagcggttgaaatcaagcggcaggatgatctgggtgctgaggtagctccgagtgacgttcctgaggtggaatttgagcaacagggagttcgcattattgaagctattgatgtgaatcaacatcatcgggttgctctggctgctcctgcggaagttgttgatgcgggattggaggagagggtccaagctattgaagcagggtcatctggattgacttccgagacagttcctgaagaggttcttgacgagttatctgagaagcaagaagagcaagttattgaagagaaggaacatcaattggctgcagcgactgctccagtagcaattcctggtgtggcattggcagagacggaggaacttaaagaagaacaatcctctgaaaaagctgtcaatgttcatgaagaagttcagagtaaggacgaagctaaatgcaagctccatctggttgatcaacaagaaggttcggcttctaaggtggagctggtggggaggaataccgacaatgtggaaattagccatggaagcagttctggtgacaaaatgattgctgagttgaccgaggaggaattgacattgcaaggtgtgcccgcagatgagactcagacagacatggaatttggggagtgggaagggattgaaagaactgagatagaaaagaggtttggtgtggcagcagcgtttgcatctagtgacgccgggatggctgccctgtcaaagcttgatagtgatgtgcagctgcagctgcagggactccttaaggttgccattgatggtccatgctatgactctacacagccacttaccttgaggccttcatctcgtgcaaaatgggctgcttggcaaaagctagggaacatgtatccggagacagctatggaaagatacatgaatcttttgtcagaggctattccaggatggatgggtgacaatatctcgggcacaaaggaacatgaagctggtgatgatgctgtagggtctgtcttaacaatgacttcaaatacaatcaaccaacatgacagtcaagggaatgaagacaatactggcatgtatgaaggtcacttgacaagttcccctaacccagagaaaggacagagttctgacatccctgctgaatgaacataacactcatggaagatttcttgcatcagtgatttcagcccattgctgagaccgctaccgatgccttcctcataagattagatttgtacagtgctcctgtggtgctaatattagtgttgtcatggtgttggtttgtgtatatatatgactgtatatatcagtaactgccggtcctactgcgtgtattccgccagcagcagacttatcatctggtattctggtgtagtctgtagaacaatacatctggtgagtcgtaattatatgtcgatacgatgcagtttggaaggagaaattgaagtggttggaaaaccagttgaaaggaccg

SEQ ID NO: 22755 - DNA, 669 bp, Oryza sativa
  ref <308>: DATABASE ACCESSION NUMBER: AK072917
  ref <309>: DATABASE ENTRY DATE: 2001-12-06
gactccagtactccaccacaagctctagcttacagctcactaccagcgtacattgttgctagttagctagagctagatctcgatcgagacaatggcgggtgctcgcaggacgatggcgctggttgcgttggtggcggtggtggcggcggcggtggtggcggagagggcgtcggcggcggtgagctgcggcgacgtgacgtcgtcgatcgcgccgtgcctgtcgtacgtgatggggagggagagctcgccgtcgtcgtcgtgctgcagcggggtgaggaccctcaacggcaaggcctcctcctccgccgaccgccgcaccgcctgcagctgcctcaagaacatggcctcctccttcaggaacctcaacatgggcaacgccgcctccatccccagcaaatgtggcgtctccgtcgccttccccatcagcacctccgtcgactgctccaagatcaactaattactagcttgatcatctccagctgagatcgatatgtatgggaagatctagagagtgactgttcactgctagctttgtttattttcttgctgcatgcgtacgtgcactatataatgtaataatgcgtttcaatgtttacatgtagtgtactatgtacactacttatatatttttcatatatataataatctaataataataatgttgtactg

SEQ ID NO: 22756 - DNA, 2289 bp, Oryza sativa
  ref <308>: DATABASE ACCESSION NUMBER: AK072918
  ref <309>: DATABASE ENTRY DATE: 2001-12-06
gattcccaacccgcgcgcgccccctcctccccgtcctcctcctcttcctcctcctccctggattcctacctctcgtttccccgagcagacgctcccctatcccgctgcgaaggagaggaggcggtggcggaggcggaggtggagatcgacctagctagctagctcacgatgtcgtggctccgcaacgcggtgcaccgcgcggtggaggcgagcggcgggcccctcctcacccgcaccgtccgctcctccctcggcaccgtcgtccaccacgccggccaggccgtcgcgggcggcgccaggctcatcaacgaccgcatcgggagccggagctacaagagcatgaggctgacggcgaagaggctggaggacgcggcgctgtcctacagaggggaggaccgggtgcagctgctgcgccggtggctcgtcatgctcagggagacccagcgcgcggccgcggcggagaaggaggcgaagcgcgcgggccatcctgatcaacacctgcccgtgttggatctgtatatggattacgagaccggggccgagccgatgaactttatccatgtcttcctctacagccaagcgctcgaatgcctcgttttatccatgattatggaattccctactgaagaagaagcctcgcttctctcagaagtttttggattgtgtcttcctggaggaaaggatgtccacaatgcaatacttagtagcataaaggagttggcaaagttattttcaacttaccatgatgaagtgttggcaaaacgtgctgagctgcttcaatttgctcaatgtgcaatctcagggttaaaaataaatcctggaatttcaagattagatgatgaaatcttgcagctacaacaacggataaatggaatggacgctcttcgatctaattcgaccagtaggcgtagcaaagcatcacaaacagtcgcggagggtttcagaactgcagttaatgagattcgcttatgctctagaatggaagaacttgtattgatgaagaaatcaatgcatcatggcaactcattcgagacttattttgagaaggttaataaattgaaggttttgtcagaatcacttgcaaattcagctgcaaaagcagaaaggagaatcatggaaaataggctacaaaaggaggaatctcttattttccgagttaccaaaacaaatgaagttagtgtaactgaaaaggaaatactggctgagatctctgggcttcagaagcaaaaggatctacttggggatgaactaaagaaagtaaataatatactgaatgcggctgtaatgaagcttaaaaaaactagagaggagagagaccaattcgatgaagccagcaatcagattgtgctgcacttgaaagcaaaggaggaagaactgtcaagatctattgcttcctgcaaagttgagtcaagcactgtcggtgcatggatcatatttttagaagatacatggaagttgcagtctttgtatgaagaactaaggaaaaaacaagccaatgatgaactggacaagtgtgcgacttgctttgcaaaattgattaatcatcatctttatgcacgagtggaagagctgagcacttgcattgatagtataaagacctttgttgataacttgaaaatatttgataacagatcggtatcagcggaagatggaaacaatggttcgtccgagcaatcaaatccacgtaaataccttgaggaagaatatctggaagctgagaaaaaggtggtagcagcattcagtttggttgataacatcagagcaatatatttgtccaatcaagattatcaagccaggagagatgatcctgacgtgaaaaaactatttgccaacattgacaagctgcgggtcgagtttgaatcggttccacggccactgctgcaaatcgagatcaaagaaagagaagagagagcaaagcaatctcgttccttgcaggctgctcgctcatcaagacaagcaggacacgagtccccaatacctgctcaactcaggacacgcctgccatcagagtccgactcagaactggcgaaatctgacccagagtacagggagtattcggctgatgacataagtgggtgggagtttgatgacctttaagatgatggggcaaggctttcagtgaaatctatataggaggagcatcaaatctgggctcaagtcctgaatagttcgtgtagggatagaatcactggcccaaaaatttggagaacgtgttgtagtggagtgctgtgtacaaaactgtacattgtagccttcgttgccgtaaagatttctttgcttcatcttgcg

SEQ ID NO: 22757 - DNA, 1027 bp, Oryza sativa
  ref <308>: DATABASE ACCESSION NUMBER: AK099309
  ref <309>: DATABASE ENTRY DATE: 2002-08-28
tcgccgccgccttctccatcgtaaaccctcgtcagtttggaacaatggcgttggctaataagattggtaatctgctcaagagagccacgagctcaagtccagctctctatcaatcaatcagatgcatgtcatcctcaaagctttttgttggaggcctttcgtacggcacagatgagcagagcctcagagatacttttgccaattatggtcaagttattgaagctaagatcatcaatgaccgtgaaactgggaggtctagaggttttggcttcataacttacgcatcaagtgaagaggcttcagctgcaatcacagccttggatggaaaggatctcgatgggcgtaacatcagggttaacactgccaatgagagaactggtggcttccgtagtgggggtggtggctatggaggcggtggctatggcggcggcggtggcggctatggtggtggtggctacagtggtggtggtggctatggcggtggtggctacagtggtggtggtggtggcggcggcggctaccaaggaggcggcggtggttatggtggcaacaatggagggtatggcaacaggggtggtggtggaggtggttatggagttgcagaaggatctgcagatgccttctctggaatcaacttaggtggtgatggtagttttggtggaaacccagctggaagctttggtgatgctggaggttccactggcggtggtgatttctccggtgccggtggtgacagctttggaagccgcaagaacgatgagctcatggatgacctcttcaaggatgacgagcctgacaactatgccaacaagcagggctaattaatctacgtccttcgagcctcagtttgcagtctcttagtgatgaaccggctcacctgaatggtcatcacctgctcaagcatcaaattccagaacaatacacaatgactgggttttctttttcttctgttctttttcatagatgtggtgtaataacgtaaacatcactcaaggtactacttctagttatgttatgttgagatggc

SEQ ID NO: 22758 - DNA, 1583 bp, Oryza sativa
  ref <308>: DATABASE ACCESSION NUMBER: AK072919
  ref <309>: DATABASE ENTRY DATE: 2001-12-06
ggtctcctcgacgcgatgccgccttcgccctctctcaaaccctagcctccgcctccgcctttccctcccctccccgtcgcgggcgcctccgccgccgcgtcccccgtccccgtccccatccccatcctccgtccgctagcgccgccgctccgtccttcccatccagatcgcgccaccccgtccgcccgcgcgtcgtacgcctccaccagctgccggtcctccgcctcccggtcaagatccggcaccgcgccgctttcctccgtcgccgccatcctccgtcgcctccgcctcccgttcgagatctgcagccccttctctgcacgtcggtttctgcgctgccgccaagaaggtttcaattttggtaggaacaccatctcaagtgcttatttagcagatatttgcttgtggcgagacagaaattggccctgtttgtgcaactaattcctttcttctgtaaccaagacagttcgcatttggcaagagagcgagggtggaaaatataattgcatccacacattgaaagatcatactgctgaggatattccgccattcgccaccatggctaacatcagaaccgtctccagcctcggggaggtcaacggtgccctgcaagagatgggtatcaatacgattgatcaagctcatcaagttcaatttcgtttacacaagcaaacatcccttaaagaagcaacagaaataaagatgatgatccaaactggaaggcatggattcaggttggttaaccctgagcttttagattgtaagtttgatgccagggttaagctagaggagtggtacaataccatgctcgacgcatgcatggcacagtgtgatcatgagctgttctcgcttgaagctagcattgcggagctaaaggatctcatgctttccacagacgatcagattccacatattggacctgaagttcaccacaggaaccgtggagtgcaacaaatgctctacccaaaccctccattcccgatcgatcctgattatgagtttggtactccgcaacaacgagtcccatatcaagcggcatacactacagatgcagagagaaatgacgcagtttctcgtgacaagcgtgctcagagggcggtttggaatactaatctccgtcttctagaggtgaagaaatccgccctggagaagaagaagactgagctggagagacgtctgaaggcggagttcaagaaagtgaatgagcagcaatctgacttgggggttggatatgcgaactaccagtctccttaccaggcataaagaggagcatccgtggtgctgaggttggtcaggttgcacagacgaagatggtggtggcatgccattgccgggcgctcatggaacctgtggggcatgtggcatgccattgccgggcgctcatggaacctgtggggcaaacatgccccatcaagccactagctagtgtcatgcttgctacccaaccattgcaatatggtgttggctataattcttcttgtcacatcccacaagtttggatgataaataaaacttgggaaatgatgtacgaactaaaatgaacaagtacttttgcttataattttaaacttgtatgtttgtgc

SEQ ID NO: 22759 - DNA, 3115 bp, Oryza sativa
  ref <308>: DATABASE ACCESSION NUMBER: AK072920
  ref <309>: DATABASE ENTRY DATE: 2001-12-06
ggcgaagtttttcagcaccaaaactctgtttttgctctgtttttctatgttgtcgtattttcgtcagatactgttcatcgttctgaactactcagacaagctaggatagccacaatctcgcgtgtgttcagagtgttctagctaacagtattgaactctattgttcttgagaattctgagtttggaggaagagggttgttaacaatctggtatcagagctgttcggttcgctggggattcttgtcatggaggtgttggggaggcagccatgcaagagggaggaggaattcggttggggaattgttcatccgagtagcgcccaccaactgttcgatgaaatgtcgagcccattcgaagtgtacgaggaagatactatccttgtcatgaaggaggagaaagtatccagggatgaagcactaaggttgttacttgaggaatggatggatgccaagcgtaaattagaggagaagctcaaccgggtcttggagaagtttgaagagatggaagctcacaatggcgcagaagatgcaactgtcatcatcaaggcagccacaaccgacctcagggaggcatcatctccaacacccaagacatcgctatctccagtgtgcttcaatgaaaacagcatgcatgcggcaacgagctcaagccacaacatcgggctgactgccttgacggttgccaagtgcttgaaggggtgctctaatcatggagttggagctggtagcttgatgcccacaaggtgcccgacgaattgctcaagtcccggcgtcatacccgaccacaccatggctacggtggttgcatgtgccaccacttctatggcgttcatggagttggttgttggagaggaggcaacctgtgacacctataccgggaccactaattgtcctgaggtgacacacaccaagtgttcgacattgggccttgacgtcaagggtgacaccgaccaagtcatggtcgcattcctggcccagccttgtgtgttccttctcaacatggacaacacaggtaccaaactagtaaacatggtagaggtgactagtctacagacttgggcacctccctgtcgagtcatatgcaagggttccctggttaagaagcatccagcaacttggttagagtttgagtggaaacaacatgatgtgcaacagatacaaccatggccaccgccacagtggctagaaacttggttattccttagttgtttttcagatgtagcgccacatgattcagtgagcccattcatcattgacataataccttatgcactagatgatagggaagaaatgctcaggagatcaattgagctgaggccctgtacacatccacagtatttggggaaggggaaatattgggcaggaacagctatgtcctatggaggcaatcacctgttagcagtcaaaaggttattggcaaggttcaaggaagatttctctatggttcctagttggatgagctggaattatgtgagaagaatattgtggtctccgggctgttctctgctttctgctagagaactttggaagtgtttacagttattttgtggtaaaggagaattgttggatggtgagagttttatgcagcgaaggagatcgaacatgacatcctatgaggtttgctgggaaaggaaatttatatcaaaaacatatagtgattcttctcagaattggttcgagttgtatacttcgctctcatcggaattatggcataagcccactggctataaactgatgcaatcagaagctacttctggtgcaacatatttaattagtgcggattggactataacagagagctgcaaattatcatacaaaataacacttgaagatggtgaagtagatgtgtactggttgaatactaaggaccaagaattctcgtatgaacaattgatattccacaaagaggagcttgctacagtttgggtttatcaaagtactagttttatcaaaagtaagggcagtggcagggttgtcaccattgcagcaagtacctcatttaccaactctataccagtgccactagctagtcatgtttggaaggaattttcttggacactacattattggaatgatgggtctgtgtggaaattatggttctgttatatggtctttctgatcagtgtcaaacaagctgcggtgcctatggatctcttggatggaaacttggaagaatctgatccagcaagattaaagatgtggcctgatcatccaaaatatgttcagaggccgtgtgtaaatcaaagggatgaattgcgtcttagtgcacctgatctacaaatatcatgggatcctggtggtttatgtttactcaagtttctagctatctcttctcttggacaagtcacatttcagtcagtcaaattctcatttcaagacagttcttctctctttcacatgcgaagtgccaggatttgcttgagctgttcttttgagacgcaagttttctgttggcaagctgaaaacaaattggacattgatgaagcttttggaacgatgcaagaatactggagaaatcaaagtggaggtttgccatttctgcaatttacttgtcatcgacttgtggacaagtcgaatttcaaggagaggagattgtcaggaacccattgagctacacatgggctgactcaattgctaatccatgccaaggcccaaacaaacaaaggagatgaatacaaaaggcagtagcaggagaacttcaagcaacgaacagattcatcgacggcttcggccacggcggcggcggcggcggcttggttcggttgaacctcgtcgatctctatctttttcttactctctcgtgttcctcttcactgccacttctagaagcttcctctacttcttctcactcaattcctcttctattttctgagattgtattgaactctattgttcttgagaattctgagtttggaggaagagggttgttaacagaacctttatggtcggctggcattgctggctcactgacagccaggaattgcatatttccatgatttggggtcccttagcgtaggatgtttaggctctgcaataggaaaataataccttagtttcacaatcgaaattaactgtacccaggggaaaaaaaaggaaattctgtcctattcaatttt

SEQ ID NO: 22760 - DNA, 1963 bp, Oryza sativa
  ref <308>: DATABASE ACCESSION NUMBER: AK072921
  ref <309>: DATABASE ENTRY DATE: 2001-12-06
ggcagagttgccattgccatcgcattcagttgcgttgatccgatggcgcagtagcaaaaccgagtctcctctcctccctccctccctcccttccctttgccatcaaacgcaagccgggagaagcaccaccacctagatagaacaataaaaattgctgcatccgtcagagctggccactacaaaaaccagctgcatcacaggagagagcaggcagagaggcagctctccagctcgcgtttggggttgaccagttactccggcgaaccgacggcaagccggcgccggcggcgagggtcgtcgggagcggaagagagggagaaagaatggccaccaccgcctccgtccgacctcccctgctccgacaaggttcagaaaaagcctcactcctttgcaaaccaaagcagagagcttctgtcagaagaagaagcttcactgccagggccagctcgaatcctgtgagcatcccgaagcaatggtacaacctcgtcgccgacctgccggtgaagccaccgccgccgctgcacccgcagacgcaccagccactgaaccctagtgacctgtcccctctcttccccgacgagctgatcaggcaggaggtgaccgaggagcggttcatcgacatcccggaggaggtcgccgaggtttacaagctctggcgcccgacgccgctgatcagggcgaggaggctggagaagctgctgggcacgccggcgaagatctactacaagtacgaggggacgagcccggcggggtcgcacaagccgaacacggcggtgccgcaggcgtggtacaacgccgccgccggggtgaggagcgtggtgacggagaccggcgccgggcagtggggcagcgcgctgtcgttcgcgagcagcctgttcgggctcacctgcgaggtgtggcaggtgcgcgcgtcgtacgaccagaagccgtaccggcggctgatgatggagacgtggggcgccacggtgcacccgtcgccgtcggcggcgacggagtcggggaggaggatcctggaacgcgacccggcgagcccgggcagcctcgggatcgccatctcggaggcggtggaggtggcggcgagggacgccgacaccaagtactgcctcggcagcgtgctcaaccacgtgctgctccaccagacggtgattggggaggagtgcctggagcagctggcggccgccggcgacgtccccgacgtcgtcatcggctgcactggcggcgggtccaacttcggcgggctggtgttcccgttcatgcgcgagaagctcgccggcaggatgagcccggcgttcaaggccgtcgagccggcggcgtgcccgacgctcaccaagggcgtctacgcctacgacttcggcgacaccgccggcctcacgccgctcatgaagatgcacaccctcggccatggattcgtccccgaccccatccatgcaggagggcttcgctaccatggaatggcgccactaatctcccatgtgtatgagcttggattcatggaagccattgccatccaacaaactgaatgcttcgatgctgcgttgaaatttgcgcggacggaggggatcatgccggcgccggagccgacgcacgcgatcgcggcggcgatcagggaggcgatggagtgcaagaggacgggggagaagaaggtgatcctgatggccatgtgcgggcacggccacttcgacctggcgtcctacgagaagtacctgaggggcgacatggtcgacctctcccactccgacgagaagctgcaggaagccctcgccgccgtccccaaaatctgatcaatgcgatacaaaaataatcatcagtaaccaagaagaataatctctgttgttgtgttcttggcatgttgttgttttgccttggcgaccgtgttcatctgctgttgatttagggacgcatatggactgaataaatttgatcaataaatgaagtagtttcccctaataggggaatgtttggc

SEQ ID NO: 22761 - DNA, 879 bp, Oryza sativa
  ref <308>: DATABASE ACCESSION NUMBER: AK072922
  ref <309>: DATABASE ENTRY DATE: 2001-12-06
gctttttccccgccgacctctcctatcctctcctctcctccccgcagcaacggctgggcgtaggcggcgacggcggcgcggcgacggtgcgcagattcggtagccagccgccctctctcccgcgggatctcgttcccctcccctccccttccttcttccctccccgaatccggcagaggggaggggcatcggtggcggtgcggccggaggggagcgaggaggccgtcgggagtgcagatccggcggcggcccgccctccccccacgggattcggctcccctcccctccccttccttccgtccccagatccggtggaggggaggggcgtcggcggcgggtggcgcggaggccggcgagagggcggatccggcggctggcggcgtggaggccaccgccgacgacgacgagggtgggagcggcgccctctcgacgactacgacgaggaagaggatgaggacgacgacgacaaggaggcggcggctaggagcggcggtgcagcagctggattcgttttttgaaattttatttttttcggaattttgtttttctgtgcgggcgacataagcacccgccggcgaaaatccggcgacgccgcattcgttttttgaaattttattttttttcggatttttgttttttcgtgcgggcgacataagcacccgcatgcgaaaatcggatttttcgcgtgctggtgtgccacccgcacgcaaaaaccgcgattttcgcagacccttggttgcgtgcgggctgtccacccgcacgcgaaaatcacatttgaccgcatgtaaaagtcacgattctagtagtggagcttcggtggcaaacatgatcagatgtgcgcatcgaagcatgtttcaacaggggcttccgttttcatgg

SEQ ID NO: 22762 - DNA, 1015 bp, Oryza sativa
  ref <308>: DATABASE ACCESSION NUMBER: AK072923
  ref <309>: DATABASE ENTRY DATE: 2001-12-06
tttgatccattcagagttagcaagctcttctaattcatatatagaactcagaatggcaggtgctcctcgaggactagttctcctcggcgtttgcgccgtcctgatggtgctcgccgtcagtggcgaagcggcgtcggtcgtcatcggcacggccaagtgcgccgactgcacccggaagaacatgaaagccgaggatgctttcaagaatctccaggtggcgatcaagtgcaagaacggcaatggcgagtacgagagcaaggccgctggaaagcttgacggctccggcgctttcagcgtccctctcgacaccgaccttcacagctctgactgcattgcccagctccacagcgcaaccaacgagccatgccccgggcaagagccatccaagatcgtgccattgtcggagggcacctttgtcaccgtcgctggcaagaccagctatccgtcggctttgtgtgcgtcggcgaccatctgcggccccatcaagaagaagatcatcgaccacttccataagaagccggtgccaccgaagccggatcccaagccagagccgcccaagccgaagccagagccagagcaccccatcctcgaccacttccacaagaaggagaaggacttctttgaccacttccacaagaagcccgtaccacccaagcctgagccaaagtcggaacccaagccacagcccaagccacagccagcgcctgagtaccacaaccctagcccaccagcgaagcactaaacattatctacgtttggtcttgtatgatttcgtgccatatcagtgtgtccgcagaataacgctttctacccccgtgtgagattatacattgaaatataatgtacttgctagctttcatccgcaggagttttttttttaaagtgtgaccgggttcatttattggatatcgcatgcatattagcagggcacgatgtgtactgtaatatctgcctgttgtttttatttctctacctaaatgaagttaaccacaaaggacaaacataaattcacatg

SEQ ID NO: 22763 - DNA, 1586 bp, Oryza sativa
  ref <308>: DATABASE ACCESSION NUMBER: AK072924
  ref <309>: DATABASE ENTRY DATE: 2001-12-06
gaccccaacaaacaccaacacacccaccttctccccctcttcgtcttcccccaattcaagaagcggaggagagagcgcggcgggggtggagagaaggttctagattgttctggaggtggagggatgtgggggcggcagtactggggcggcggccggcggccgagcggcggcggcggcggggtggtggtgatgttcgcgtggctgtcgagccaggagcggcaggtgcgggcgtacgtggagctgtacgcggcgcggggtgggcgtgcctcgtctgccactccgagttcctcaccctgtttttccctgataaggctgccatgcttgctgatagggtgcttgcagaactagttaaggaactgaaggttagacctgtacctgttgtgtttgcctcattctctggaggcccaaaaggctgcacatacaaggttcttcagctgatcgagagaagatgcgagggtcaactgagcctggaggagtatcaacttgtaagagactgtctttgcgggcagatgtacgactcgagtcctgtagattttgttagtgatttgggcacccgatttctccttcacccaagtgtcctgaagatgtctcaaccgcctcgtatcctatcatggatgactagaggcattgcctcgggactagacacgctgttcattggcaaatttgaagcgcaacgtgcagaatattgggacacactatactcatcagtggtatgtcactctgttctctcagtgacttgtaatctgattgtcaacggaagtgtttgtggatatctgagtaaacattggtctattgtactttcagcatgttggtccaatactcatattctgttctgaagacgatgaacttgctccgtgttcaattgttcaaaaatttggtcgacgtctgctggagcttggtggtgatgtgaacctagttaaatggcaaaattctcctcatgtaggtcactacaagcatcatcctgaggaataccgagctgcagtaactgagctactcacaaaggcttcaatgctttacatgagcaggaggcaacttaacagctatgatctaggcacaagtgagcatagcgacatgttggcctccgacgtgcataaagctggcacgaattcaaacaacaggctaagaagggcaccagatgatccgattgaccatttcttgctaccgagttccatggagtatcatgaaagcagcaacgaagagccgaaaccggagttgttcaacatgcccagtgtggaaagcattaacaacccccatggagtgttgggtcagatgctttacgatgtatgcgtccccaagaacgtagaaggctgggacttcaagccttctgcatcaataaacgggaggcatataaattctattgctcgtcagcatggcactttcaatccgataaaatgcatacggcgctcaaaattgtaaaaatgttcaactggagtaccctgatgcatatagctgaccagtgtatactatgagagaacattgtttgatggatgctggtgaaaatttgagatacctgctatccattgaataaaatgcgagatatttttgtagataaagtaatgaagtataatatgttactattgctgagg

SEQ ID NO: 22764 - DNA, 2424 bp, Oryza sativa
  ref <308>: DATABASE ACCESSION NUMBER: AK072925
  ref <309>: DATABASE ENTRY DATE: 2001-12-06
gtggagccgagatgggaaaggaagcaagcgcgatggttgcgaggagaagcaccagccgccgtgattggaggaggtggtggtggtggctgctgcctctcgcctgctgcttcgtttgttgggttgcctcgtcggcggcgacggtggcgccggcggccggtgtcgccgtgacgagccttcctggattcgacggcccactgccattctccctcgagaccggatacgtggaggtgaacgagagtacgggcgtgcgtctcttctactactttgtccagtcagagaaggatcctgatgtagacccacttttattgtggctatcaggtgggcctggctgttctagtctctctggcctaacccacgagataggaccattccaattcgccgcaaaacggtattacagtggaggattgccgaaaattatctatcaaccagagacttggactaaggtgagcaacataatttttgtggattctcccgtaggggcaggattctcatacgcggcaacacaggaaggctccaagactagcgataccaagacagtgaaacagcttgttattttcctcagaaaggtaactcgggtgctgaccaatgccccagaatttcagatttttacaccacctatcttgtatggaattggtttaatatattttttgtttgccttatggttttcttcgagaacatccgcaggcttcgaatgccatttcagtaacatccaccatccgttacaaaatattatgtttttttaggttgcttagaaaatactacagttaggacgaaagatttcttttctgtcacttgagttatcaatttttaaagtttaaatatatatcttagatttcctttccaaacatctgattggtgatataaaattggaatcctagagatacttatattttgaaatggagagagaatgagaaagtgcttgtacggcacgtaattaagttgcactggttattactactgaaattgtaaatattatattttaaataatatgttgaataagttggcaatatttcggtgaacgaacacttggactttttttatttctgaagaaggaacaatttactttgttattatgttccaaaaatcaaaattattaattagaaatacttatatagaatggatccttatgtttctgctgttacattgctgatgttgggtccgcagcatttgctatcatgtaatatagaaatttagaattagtgagtatcagtaaacccagtttagatatcattttaaatttaataataccaaaacatataaataagagatatcaagttgtactttgattgtgcctcgattatcttttacatggtttaataattctaaagctcataattaataagtgtattgaactgcattttgggttggggatcaaaataatagccattaagggttaaaaaattccaaaattggtaattaataaacaattgagtggtactggataaagagtttcaatggtagtttttcaaggttttaaatcattccggaaaattcgatagtagtgagtatccacatatgtagtccggttggagcccccattatagaatttccctgaggtaatagttccacggggaaataattaatccctaatttgttttcccccaaggtatatttattgtaaaaccaattctgatcctgttctatagtaaataataccatcccactacctaagggccttattttccaattacctactagtggaatataatataaaagatgtattcgggtgttggttattccctcgtgattattcaatatgatgccatttgaaatgaaatatgtgttaacttagcgatatataaaatataattaagaaaagattcacttactgcccgtttaaagatgctgcctggacaggtggaaaatatttaagtgcatgctgaagattgagcgaggttgatttgtaatccctccgtccactgactaatgcgcgctcttcaaaactagtatttgactttaaatttattatatattataaacaaaagttgtaaatccaaaggttaatctaatcatattattttcataaaaaaatttaattcctaataaaataattattggtccaacatttaggttgagttcgttcatttactttcccactcatttctctttttccatgtgcacacttttcaaactactaaacagtgtattttttgcaaaaaaaaaattatatagtaaagtttctttgaaaatcatattaatctattttttaaaaaatgataatacttaattaataatgtgctaataagtaactatgttttgcgtaagtgaaaggttagtttcaacctcaataaaagaactcagtcttaaaatttgaatcttgtgaacgccatattcagtgggacaaagagagtactattatgattttgtaagcttctaattaatgaaacgggaagtttagtcattcgtgcttcttcggtaaatagg

SEQ ID NO: 22765 - DNA, 1150 bp, Oryza sativa
  ref <308>: DATABASE ACCESSION NUMBER: AK099310
  ref <309>: DATABASE ENTRY DATE: 2002-08-28
gccagcttccactccacgaaaaccctctgcctccttcgctcgctgcaccctcgtctcggcgatccatccatggctgccaggaagttcttcgtcggcggcaactggaaatgcaatgggacaggggaggacgtgaagaagatcgtcaccgtcctcaacgaggccgaggtgccctccgaggacgtcgtcgaggtggtggtgagcccgccgttcgtgttcctgccgcaggtgaagggtttgctccggccggacttctccgtcgccgcgcagaattgctgggtgcgcaagggcggcgccttcactggcgagatcagtgccgagatgttggtgaacctgcaggtgccttgggtgattctgggacactctgagcggagagcgctgatgggcgaatcaagtgattttgttgctgacaaaattgcgtacgcactttcccaaggtatcaaggtaattgcttgcattggtgagacccttgaacagagagaagcaggaacaacgatggaagttgttgcagcgcaaactaaagctattgcagagaagatatccgattggaccaatgttgttttggcatatgaaccagtttgggccattggaaccggcaaggttgcaacccctgctcaggctcaggaggttcatgatggtctgagaaagtggcttgtgactaatgttagtcctgcagttgctgaatcaaccaggattatttacagaggctccgtaaatggagcaaactgcaaagaacttgctgctaaacctgatgttgatggattccttgttggaggagcttcattgaagcctgaatttgtggacatcatcaagtctgctaccgtcaagtcttctgcttagtgttctgggttgcaaccagatgatcgtaggagttaatgctgccaattttaagttatgacatgtttgaccagcttgctttgttatatctcgaagtcagtgaactccatatcgttccatagagcatgcagccacctgtggttgctttttttctttttgactttttctcccgagaggatcagatgaactgaaagtgccgttaatgtctgtattatcagaagtttgttgatggcttgatgctataatagttgaacctgatacttcctgagtgaagtactgtcctttgcatgtttgattgatgattacttgttttcgt

SEQ ID NO: 22766 - DNA, 1198 bp, Oryza sativa
  ref <308>: DATABASE ACCESSION NUMBER: AK072926
  ref <309>: DATABASE ENTRY DATE: 2001-12-06
gatggttacagatggccttgtcattgctgctgggagcagctgggcgacgaactctatggaaggttggcaaaagaatagggaccgagtgagcagcttggatgatgagacattgagccgtcaaggagtagcaagaaggtaagcactggcgaggtagtaaggatccacgcgtggaggcaggaagacaggagatggctactcattgcaggggtgagtttgggcatgtcatctggaagcacacatcgtggggaggaaaaggaaaagaatataaggtacccatgctgcacgaatgttggctcaatctgggtcggccatgcaaaagaggataaactatccagaatcgaaacccacatggcgaggtcaatcgcacatcaaggttgatactgactacaagaatgggctagtgcgattttgttgactaaaattcatttgctgagtttgctgcagattttgacatagtccagaaaagaagatgtggaggcagtgacgagataaccacaataggctatagggccataagtccatccttaagtgcctatagactgaggatgtcggcaggtttggtcacccttggagaggcggccaatccatttgctcccgtcatgttcaagatctaccacctagccattgtgattgtcctctgatgtgcaaagcctctagcgggagcaacaagtatttcgcactctatgccgtccaccacatcatcaccaccttctcatggtccccctatctaccttaatctggtgagctcaagccatgagatacaaaaacctagctggttctagagaccacctcctctggttctagcgatggctaatgttgttgtaataggcaacacgatgatgagaacattttctcatttgtattttgtgtttttaatcgcaattgtaaatgtatacaatgcttgttaaaatagagcacttggtcatgcctatgagatgaggtgtcgtctagacctacatgaaaaattgtagttgtgtacaaaccatgagacattgttatctaggtgattcccagatgggcagagctagggtctagagttacgagcttctacagggtatgtttggtttaagatttaccttggtttggatgtcatttctcatagacttgctgccttcttgctctttcattcaattcatagttgatttcaatccatgatgtctcattacaactgattcaatgtatgatgggccttggatcc

SEQ ID NO: 22767 - DNA, 3905 bp, Oryza sativa
  ref <308>: DATABASE ACCESSION NUMBER: AK072927
  ref <309>: DATABASE ENTRY DATE: 2001-12-06
gaccaccaccgctccttcgatctccttcctcccttccctctctctctctctcccgtttccagatcgccaaaaaaagattccgcgtagcggcgagaggggagggggcgcgcgtgcccagatctgcggggtctcgccggcggagatggcgtgcatcaagagcgcgcagagggcggcgctgacggcgctggcgccggaggcgccctacctcgccgccggcaccatgagcggcgccgtcgacatgctcttctccgcgtcggccaacatcgagatcttccgcctcgacttccagtccgactcgcccgacctccccctcctcgcctccgccccttcccccgaccgcttcaaccgcctcttctggtcccgccccggcgccgctgacggcgactccttctccctcggcctcctcgccggtggcctcagcgacggctccgtcgccgtgtggaatccgctgagcatgatcaactcaggggaaagcggaggatgccttggttgcgaggctcgagaagcacaccgggccggtttgcggactggagtttagcgagctcacaccgaatcggctcgcctcaggggctgaacagggggagctttgcatctgggatctcaagaacccctccgagccagtcgtgtttccgccactcaagagtgttggctccagtgctcaagctgaaatatcttatttaacctggaacccgaagtttcagcatattctagcaaccgcttccagtaatgggatgacagttgtttgggatttaagaaaccaaaaaccgttgactagcttttcagattcaaacagaacgaaatgctctgttcttcaatggaaccctgacatgtccacccagctaattgttgcatcagatgatgataactctccatctttgagagtttgggatgtgaggaaaaccatttcaccagtaagagaatttgtgggacactcaaaaggtgtaattgctatgtcgtggtgcccctatgatagttcatacttgcttacctgttctaaagataatagaacaatatgctgggatactgttagtggagagattatgagtgagctaccagcaagctcaaacggtaacttcgacattcactggtatcgaaaaataccaggtgttgttgcagcatcctcatttgatgtgaaaatcggcatatacaacttagagttctctggcctttatgcagctggtgatagtgctattggtgccccagcacgcccaagagctccagctccaaaatggttgaaatgccccactggcgcatctttcggctttgggggcaaacttgtttctttccaccaagcagcgcccacccaaggtgcacaagtgactacttcagaggtgcatgtacataatttggtgattgagcaaagtctggtaagccggtcgactgaatttgaagctgctatacagaatggggacaaaagttcactgcgtgctctgtgcgataaaaaagcacaagaatctctatctgatgaggagagagaaacatggggcttcctaagggtaatgtttgaggatggggatgctgccaggacaaagctgcttgctcatcttggctttaaccctcctcaagaacagacttctagttcaacagatgaactgaacagaacattggcagatactcttaaccttgatcatggcgcgccaactgatacatcagattctcaatttatggttgataatggggaagattttttcaacaatcctcaaccttcggaggctagtttggcagaagaatcaatttctacaaatggtcaacagatcgagcaggaaatgcctgtaaatgttgaaccatcagatctatcagttgacaaaagtattcaacatgcactggtagttggtgattataaaggagcagtcaatctgtgccttgctgccaatcgaatggctgatgctctggttattgcccatgctggtggttctgctctatgggaaagcacaagaaaccagtatcttaagaatactgtatcaccctatctaaaggttgtttctgctatggttggcaatgatttgatgagttttgtgagtacatggccattgaatgcttggaaggaaacacttgcgctactgtgcacatttgccaggaaagaggaatggaatgttctatgcgatacccttgcatctagactgttgggagttggagatacactagctgcgactctctgttatatttgtgctggaaatatcgacaaagctgtggaaatatggtctcgcgacttgaagtctgaagatggtgggaagacttatgttgatcttctccaggatttgatggagaagaccattactcttgcccttgctacagggcataagagctttagcgcgtcactgtctaagcttgtggaaaactatgcagaacttttggccagtcaaggccttcttaaaactgcaatggaatacttaaaattgttgggatcagatgaacattcacacgagctggcaatattgagagaccggattgcattttctacagaagagaatcatgctgccagtacttcagttcatgcgggcagtattaacagttccgcgtaccctacaattcaaccgagctatagcaccccagacccttctcagaacctttaccaggggacttcacaatatgctgtgccaagtaaccagtatcaagattaccagcaacaatctaatacagcatatggaacatacaacagtacatattctcaacaaccaacccagatgtttgttccatcaaacaccactccagtgatctcccagccaaatgcaactccagcaccagttccacaacaaccagtgaaggcatttactcctaccaacttgccaggtctaaaaaatcctgagcaataccagcaaccaactttgggctcccagctttatgcgggtgctaatccaccatatacttctggacaatcgactccatatcaaggtgtacctcccaccacataccatcagcctagaccacctacacaattccaaacagttcccacagcacctccagctgtttctagtgccactgtaccaggaacgaccccaagtcagatgttccctggtccagttgctaataacccgacttccaggtttatgccatcaaacaatccaggttttgttcaaaggccaggtttgagtcctgtacagccctcaagtccaacacaggcacaaggacaaccgcagcctgttgttgcacctcctgcacctcccgcaactgtgcagacagctgacacatcgaaggtgtctgctgagctgaaaccagttattgctacattgactagactatttgatgaaacatctaaagctatgggtggatcacaagttaaaaaaacgtgaaatcgaagacaactcaagaaagatcggaacactatttgcaaaactcaattctggggatatatctccaaacgtttcatcaaaactcattcagctttgcagtgcacttgatagcggtgattttgccactgcgatgcaccttcaggtacttctgacaacgagcgactgggacgagtgcaacttctggcttgccgcattgaagcgtatgatcaagacgaggcagaatttcagaatgtaaacgagtgccgcgttttgcagctagttctgtatacacacaccttttcgacttcttacaaaagttgttagtgttagcaacttatgagggtttgtctgcacagtagtgctatcttgcttcttgtgttccctcctgccaattatactgaagcttgtcgcttaaaagtggtctgttgtctgggcgattactttttgatagttcttcgacattcctttgtgaggatcagttcttgggtgatggtggttggatttcacgaggattacttgtaagtgggcatctagttgttatagctggcccattttgttttaccttataagttagattttacctgtttggacattggaagtactctcgataattaatacaaggatattggcttgttt

SEQ ID NO: 22768 - DNA, 1173 bp, Oryza sativa
  ref <308>: DATABASE ACCESSION NUMBER: AK072928
  ref <309>: DATABASE ENTRY DATE: 2001-12-06
gagcggcgagccaccggcaacctcatggacaagtgggtcatcgccaatggcttgcccagcgaggtcgagtacgcgctggatttcccatggaaggcaagcttgccgcgagtcgagacgagggtgtatctggagcagtacggcgctagcgaggacgcgtggatcggcaagggactctacaggatgaccctagtcaacaacgacctgtaccttgaggcggcaaaggctgacttcaccaacttccagaggctctcccggctcgagtggctcagcctgaaaaggtggtacatcaggaacaatctgcaagcgcacggcgtgaccgaacagagcgtgctgagagcctacttcttagccgcggcgaacatcttcgagcccaaccgggcggcggaacgcctgggatgggctcgcacggcgatcctcgccgaggccatcgcgtcacacctccgacagtacagtgccaacggcgccgccgacggcatgacagagaggctcatcagtggactcgccagccacgactgggactggagggaatcaaaggattcagcagcgaggagcttactgtacgcacttgatgagctcatcgacctccatgcgttcggcaatgcttctgacagcctacgtgaagcgtggaagcagtggctcatgtcatggacaaacgagagccaaggatcaactggtggggataccgcattgctgctagttcgcacaatcgagatctgctcaggacggcacggttcagccgagcagagcctgaagaacagtgcagactacgccaggcttgagcagatcgcctcttccatgtgcagcaaacttgccaccaaaattcttgctcagaatggaggaagcatggacaacgttgagggtatagaccaggaagtggatgttgagatgaaagagctgatccagcgtgtctacgggagcagcagcaacgatgtcagcagcgtgacgaggcagacatttctcgacgtggtgaagagcttttgctacgtcgctcattgctcgcccgaaacaatcgatgggcacatctccaaggttttgttcgaggatgtcaattaggaaaatggttgactactagaaaggcaataaaaacaagagttgtgtctaccagcatggctcgtaaagtgatgactgcgaaaattttctcaaagtgagatgaatttagtcgatatttgtttc

SEQ ID NO: 22769 - DNA, 3195 bp, Oryza sativa
  ref <308>: DATABASE ACCESSION NUMBER: AK072929
  ref <309>: DATABASE ENTRY DATE: 2001-12-06
gactctcttcgcatgcaacagcggccgccattttccctagattcaccttccattggtagcttggttgttcaccaatggcgcacttaggggcggtcctctgcatccgtgttgctctcgtcgtcgtcctcctcccgtcgcttctggcgaccgtcgccgtcgcgcacaacgacaccggcgagcacaagaactacctcatcatcgtgcgcaagccgtacgagtacgaccacaatgtgtacaagaccgtgtcgagctggcacgcgtcgctgctggcgtccgtgtgcgacacggccaaggaggagctcgccaccgaccccggcgccgagacgcggctcatctactcctaccgcaacgtcgtcaatggcttctgcgcccgcgtcaccagggaggaggtgtacgagatggccaagaaggactggttcgtgaaggccatcccggagaagacgtacaagctgatgaccacgtacacgccgaaaatggtcgggctcaccggcgccccggcggcctaccatggcggcttgtggaacaggagcaacatgggcgaagggatgatcatcggggtgcttgacaacggcatcgccgccgggcacccgtcgttcgacgcggccgggatggggccgccgccggccaggtggaagggccggtgcgacttcaacagctcagtgtgcaacaacaagctcatcggcgcgcggtccttcttcgagtcggcgaagtggaagtggagaggggtcgacgacccggtgctccccgtctatgagctggcgcacggcacgcacacctcgagcacggcgggcggcaacttcgtgcccggggcgaacgtgatgggcaacgggttcggcacggcggccggcatggcgccacgcgcgcacctcgcgctctaccaggtgtgctccgaggacagaggctgtgatcgggatgacatattggcggcgatggatgacgccgtggacgagggcgtcgacgtgctctccatctcgctcggcgatgacgaggccggagatttcgccggggatcccgtcgcgctcggggcgtacacagccatcatgaggggcgtctttgtcagctcgtcggccgggaacaacggcccgaacccattgacggtctccaacgaggcgccgtggctgctcaccgtggcggcgtccacgaccggccggaagttcgtggccaccgtgaagcttggcaccggggtcgagttcgacggcgaggcgctctaccagccacccaacttcccgagcacgcagtggccgctgatagcggacacccgcggtgacggcacgtgttccgacgagcacctaatgaaggagcacgtcgccgggaagctagtcgtgtgcaaccagggtggcaacttgaccggactccggaaagggagctatctacacgatgccggcgccgccgggatggttctcatcggccctgagttcatgggctcaatggtccaacccaagtcgcacatcctccccgtggcgcaaatcgtctacttgtcgggggaggagctcaaggcctacatgaaatccacgaagagtccgacggcggcgctgatctacaaaggaacagtgttcggcgaccgcaagacgccggaggtggcgcccttctcgtcccgggggccgagcaggcagaaccaggggatcctcaagcccgacatcaccggccccggggtgaacatcatcgccggcgtgcccgtgacctcgggcctcgccacgccgcccaatccactggcggcgaagttcgacatcatgtcaggcacgtccatggcggcgccgcacctcagcgggatcgccgcgctgatcaagaaagcgcacccgaagtggtcaccggcggcgatcaagtcggccatgatgacaacggccgacacgttggaccgccggcggaggccgataaccgaccagaaaggcaacaatgccaatatgttcggcctcggcgccggcttcatcaacccgacgaaggccatgaacccgggcctcgtgtacgacctgacagcgcaggactacgtccctttcctttgcgggctcgggtacagcgaccacgaggtgagctccatcatccacccggcgccatcggtgtcctgcaagcagctgccggccgtcgagcagaaggacctcaactacccgtccatcaccgtcttcctcgaccgggagccctacgtggtgagcgtcagccgcgccgtgacgaacgtcgggccccgcggcaaggcggtgtacgcggcgaaggtggatatgccggcgacggtgttggtgacggtgacgccggacacgctcaggttcaagaaggtgaaccaggtgaggaagttcacggtcaccttcaggggcgcgaatggcggcccgatgaagggcggcgtcgccgaggggcagctcaggtgggtctcgccggaccacgtggtgcgcagcccgatcgtcgtctccgcccaaaagttcttgaacggtaacacgagctcctccgatcacgcgggccattgattgttgattacgtagctttgccagtaaatggggtacttgattagacccccaaggattataaactgccccctgatgattgtcctcgaaaaaagatgaagagaaagacaaaataactctattagaagatggaccaagatgcgaagggattgcgtggccggaaaaaaaaaaaagcaacatgggattctttttccatgatggccatggcctggatatgtgcccctgaaccaaactgcttcgatattgggcttgatgggtttgttacggatttagacctttatacaattagcatagctaaaatttcgatcttattgttgtgggttggatattggatgatagcactacggcactacctttgtggataagggatatatctcacacacaattcattcaaatttagacatttagtagtagataaaatggtgaaaaaattacattaacggcacacaaattttgataagattttcttttgttcttttgaaaggtctccgcgggggtagatctccaatgaacacgcacattcacaaaatttgataataattttttagaagtcaaccaatacaatatactcgcacagagtcattgatgcaaatagaaaaaaaaaaacaaaaacaccaagaaactgctcgccaaggacgccgtgctgatagagaaaatttccacgcgtatgtacttaggaaagttcctttttattaagaaaataggataaaaactttgtctcgtatatattaataaaccataagtatcc

SEQ ID NO: 22770 - DNA, 2618 bp, Oryza sativa
  misc_feature (7)..(7): "n"=any one base of a, t, c, or g
  ref <308>: DATABASE ACCESSION NUMBER: AK072930
  ref <309>: DATABASE ENTRY DATE: 2001-12-06
gcgccgncggaggccgcggcaagcggcggaggcggcggcagaatcgccgccggacgcactattctcgctgggcctcgacgtcctcgacaacatcctctcccgcctccacatcacatctacgaggtggtccgcacctccgcgctctcccgcgcgtggcgccgccgctgggcggcgctcccctccgtcgacctcgcccgcagcccggggatctcggagcccgacgtcgacgcgatctcctccgccgccccgccgcgctccgcaccttccgcctcgtcgcgcgcgcgcgcaagggcacctggtccgtcgacgccctgcaccactggctcctctacctctcccggagcggcgtccaggccctggacctctcgttcccggagctccgcttccggctccacccatgcctcttctcctgcggggagttcacctcgctcgccctcaactcctgccgccctcccaccggcgccctcggggttcgccggattccccaatatcaagaccttacgcctcgaggatgttgacgtcccgaggcacggggggaaggaagtggcggcgctgatagccgcgtcgccattgctcgaggatttggggctcttggccgtgaagctcattggggatggccctgacgaggagtgggttattcgggcgcccaatctgcgtaatctgacaatggtgtgtgaaactgcttttggtggccgagtggaggatctcccacgactggacgaagggagattgtttggtcccaattgcgcaaagttcttggcaggaatgtcgcaggtgaccaagctcgatttcttctgcaactgcatgttgtcaactgaagttgatgtgctggagagattaccgttcttgtttaagaaccttaagaatttatccctggctgtgaattttttttaaaatgtcccacatgctagcgattttctgccttttagaagttccccatttattgaagaacttgatgtttggggatgcactgaaggagctaaggaatttgaagcaaacgacaaattcttgaatgctcagttgactgatgatatgtttgtgaaacttcatgttgtgcaactgaagaatattgcatgtgttcgtaatgaaatgcactttatggagtttgttctttctaaagcaagactgctaagaaagctatatgttcgtctttcattctacgctatatgcagtaatgaggaggcagttattgatatagcagaatatccgagaacttcatctgatgctgagatcatcttcatgggtagagaatcagaatctttattgaagtaagcattttgattctgaaagtttcttctcatcttgctccatatattcattgatttatctatttttgagtggttctaaactgctattttttactgggtaattcctttttctagacaattttggacatccgataagtacaatatattcaattttcaatgtgtgccttaaacagtgatctaagaccagcatctatgtgtatggaattgagatgctatatttatatctgttcacagcttggatcattttaacacactgaccttgaacaaatatctccttttttttggaaaatctcgatgaatatgacgttgagtttctcctctcagtgaaatgcaacgccatcatggatacatccactgaggaatgaggtggaggagacatgaacaagcagtggattgagcaatgacagtaagccatagaccataggagtcggcgcctcggcggcggctggaccatagagtctgtggcacaactggaggagtttgaggtgatgataaagctagaagaacagctccaccagatgagtcatctatcatggatgtctcacgtctgtggttcattgctaagataatggtactaaacatggtagctttactgaccttaactttatatgtcctacaagcaaatgattattactggctgatggaaatgcggctctatctaaagaatgtggcattgactgtcctgagtttccagagctaacagctcctcatcaagtaagcaatgctcgatcgattctgtatttctatctgacaactgtaacatgtatttccttgattcctactacttttgatgataattttatgtgacaacaattgcagcccatcttaaattcaagtcttatacaacttttgatgttaaaggccatgctcagacaaggagacattactgatcctgtcagtaacggtgttggcaatgcacatgtgtattctgaagagggccatatcgtcaaccatgttgccaatgttaatgctgattctccagagggccatgtctgggatcgggaggcgacagactctcatcccatcgtccatggttctgtcagtgccgtgcagatctggagcagaccatgcttgctagtcgtaggtgcactcgctgtcttttgtgattatactagtatattctagtaacctgtatcttttatttcttcctgaaccctgatgttattctgttttctgtcaccctggagtatactgtattgctgatctacatactagttgcttctacttgggagcaatacatatgctcggtttatcgtttcctgattaatggattatctcattaccccatgagtttgtaatgcgatgcaaattctattgacataatatacttcttgactgatggattacgtg

SEQ ID NO: 22771 - DNA, 1761 bp, Oryza sativa
  ref <308>: DATABASE ACCESSION NUMBER: AK072931
  ref <309>: DATABASE ENTRY DATE: 2001-12-06
gaggagcgtggatcggttttaccgggatcaccaaatggaccgtgttcttctgagctctcaattgtcatcacaaacggttgttaacacaagggttcaacaaggaagcggtggtatcaacagcataggatttgctgttatcagaaaggggagcttaaaattgagatgttatgcaattggtggacttgggggaggagagaatttgaatgatcctttaaaggaaagcaataatggacctgttttgcaaggattcaatggatctagtgcttcctttcggactgttggtgctaaaatcactcaggaaactggtgatttctttgttagcgatgcagagggtgacccagacaaaccaactgatggtttttcctctattgatgaggctataggcgcattgcatgaaggaaagtttgttattgctgtagatgatgaaagcggtgataatgaaggggatcttgtcatggcagctacgctggcagacccagaatctattgcattcatgatcaggaatggttctgggatcatctcagtgggcatgaaggaagaggacttaacaagattgatgattcctatgatgtctccaattgcagaaattgaggatatttcagctgctgcttccacagtaacagtggatgccagagtgggcatatcaaccggcgtctcggctgcagatagggcaaaaacgatttttactctaacctcccctgattctaagccaactgacctcagaagaccaggccatatattccctctaaaataccgaaacggtggtgtgctaaaaagagctggacatactgaggcatccgtcgatcttgtcgcgttggctggcttgcgccctgtgtctgtcctgtcaaccgtcatcaacccagtggatggttcaatggcaggaatgccagtgctgaaacagatggctttggagcatgatatcccaattgtttcaatcgctgatctcatccggtatagaaggaagagggagaagctggtggaactgattgctgtatctcgtttgccgacgaaatggggccttttccgagcttactgctaccaatccaagcttgatggaaccgagcacattgctgttgcaaagggcgacatcggcgacggcgaggacgtcttggtgagggtccattccgagtgcctgaccggcgacatcctcggctccgcccgctgcgactgcggcaaccagctggacctggcgatgcagctcatcgacaaggccggccgcggcgtcctcgtctacctccgcggccacgagggccgcggcatcggcctcggccagaagctccgcgcctacaacctccaggacgacggccacgacaccgtccaggccaacgtcgagctcggcctcgccgtcgactcccgcgagtacggcatcggcgcccagattctgcgggacatgggggtgcgcacgatgcggctgatgacgaacaacccggcaaagttcgtcgggctcaagggctacgggctcgccgtcgtcggcagggttccggtgatctcccccatcaccaaggagaaccagaggtacctcgagacgaagcgcaccaagatgggccatgtctacggctccgacctccccggcaacgtcccggaggaattcctcaacccggacgacatcgccggagaccaagacgaagacgacacccacaactgaatgcaacaacaaaattcacaaccacagattctccacatctcattttgtgatcaaattgcatctcaaactgcaccgatcttgttatactagtaacaaatcttgatttggaaccaagc

SEQ ID NO: 22772 - DNA, 1068 bp, Oryza sativa
  ref <308>: DATABASE ACCESSION NUMBER: AK099311
  ref <309>: DATABASE ENTRY DATE: 2002-08-28
gacccctttctcgccttccccaactttatcctcgctcactttccatctcacacgacggccacactgacgagtagtagacggtgaacagcctacagggaggaggcgtgggggtagccgtgacaatggcgagctacgccgccgtcctgcgcccgcacgcctcgtcgacgaggactccgcgcgggcctcgtcgtcccgcgggcgcggtgccacctacgccgcgccgggcagcgctgcgagctactacgcggtctcctccggctgtcgctgccactccacctccgcgggagcgggtgcagcagcagcagcagccgggtgacggccagacgacgacgcggctctactcgctggcgccgtgcccgctcctgctggcggcgctgctgccgggggccgagccggtgcgcgccgtgttcgagccgttcgtcgagctggtcaagacgtggggcctccccggctggctcgtgcactggggccaccccggcaacatggccgtggtgctctttgcaatgggtggctacggaacatacctgggcttcaggatcaagctatcggatgaccctgaagagaaggccaaggccaaggacctccacccgaagctcctcgccggcatgttcttcttcttcgcagctggcgccactggtggagtcaccgctcttctcacgtcagacaaaccaatctttgagagtccgcatgctgtgaccggcatcatcggccttgcactccttaccattcagtctatcctgccgacattgttcgagggtaatccttcgctgagaaatgcacatggactcctcggcagcggcatcatgaccctgtttctaatccacgcagccttcgggctacagctcgggctcagcttctaatcctcagccacaacatctggggtttgcttctctgtgattagctctcagaggcatccctgttacacacatcgaagagaaatgaaacacagagagagttttctctctcttgttttccctttgtttcttttcaccctgcgaatgttgacaataatgtagacctggtgttggattgtgtattgacgacaacgaattccatcgtgttgcgctg

SEQ ID NO: 22773 - DNA, 842 bp, Oryza sativa
  ref <308>: DATABASE ACCESSION NUMBER: AK072932
  ref <309>: DATABASE ENTRY DATE: 2001-12-06
gttcagttcaattttgtcataatcggctgcttcttcgcttcaattctgtgttggtagcaggcgacgctcggtgtcttagttcatggctcggagggatcagctggtctctttcctctgcttcttcctgatcgtctctgccgtcgccggcggcttgtgcgtctcggccaccgtgctcccgatgcgggtggggaagcagtacgtcgtcggcggccgtagcgggtggaggacgccgccgccggctagcgtcgacttgtacgccaagtgggccgccggcatccgcttctacgtcgccgactccattgagttcgtgtacaagaacgattccgtggtgaaggtggacaagttcgggtactaccactgcaacgcgacggcggcggcggccaacgacggcagcgtgctcttcctcctcgacgcccccggcttcgcctacttctccagcgccgacgccgatcactgcaagaagggccagcgcctcatgatcaacgtcgactccgccccgtcgccatcgccttccccgagcccggcgccccaagaagccgcaacggcgagcgccgcaacgtcgtcgtcggcggcgacagcggctcacgcattgctcctggccgcgatggccatgatgggcttgattcttggagagtggtagtaacaacagagtttgcattgagctaggccatcagggtgttagttaattaggatggttaattacttcggtgcagtatggaacgtactggctggagcttaattaccgtcgctgaactgaataatttcgatgtgaattagacgattagttgttgatttgtcgctttagaatcgaagaagaaattaagatctctccattttcatgc

SEQ ID NO: 22774 - DNA, 2029 bp, Oryza sativa
  ref <308>: DATABASE ACCESSION NUMBER: AK072933
  ref <309>: DATABASE ENTRY DATE: 2001-12-06
gagtagtacgcagaagggacgaggcggaagcggcggtaggacgcgttgaggatgcggacggggtcgaggaaagcagcgccggattcggcgagacggtagattccggtggcctcgaatgcccggagctcatcggactcggagatccccatcaccggcggcggcggcggggagtcggggtttcgggccgtgggctacggacacggaaaggccaggtgggttgggttaatcctgtgggccccaccggtcagtgaccagtggcctccgtccacagaagccgaagcaaaaccgactgacccgccgcgaaatcttcaaacccaccgaagccatgcccatggcgctgctcctctcctcgccgccgcggccttccctccgccgcgtgactcgatggagcgcggcgtccctctccccccgagcctccctcccgtctccccggcgtgtgggcctcgcggtcgcggccgccagttgggatggtgccgggaggtggcgcgtcgagacgacgacgacgcgcgcgcgggcggccgcgagggctggggcttcgggggaagggggcgatggtgaggttgagggtgggggtgggacggggatcgccgcggcggcggcggccacggtggtgctcgcggtgatgaaccgggtgctgtacaagctggcgctcgtgcccatgaggaattacccgttcttcctcgcccaagccaccacatttgggtatgttatagtatatttctctattctttttataagatatcatgctggcattgtcactaaagaaatgctagcacttccaaaatcacgcttcatgttgattggcttactagaagcactaggtgttgcttcaggcatggctgctgcagctatgttgcctggaccttcaattccagtgttgtctcagtcctttttagtttggcagcttatcttatctgtcctcattttgggaaggaaatacagagcaaatcaaatatttggatgcctgctcgtcacagcgggggtaattctagctgtggcaagtggagcgaacagtggtccatttctatctgatgtcaagctgttctggccagcagtactgatggcttcgtctgcatgtcatgctggtgcatccataatcaaggaatttgtttttattgatggtgcaaaacgccttaaggttagtaataattctattatcagggaaagaggcctgacatatttgtggtcaactcctttgggtcaggttttcaggccctgtttgtcttcctactccttccgtttctgtctaacttaaaaggcatcccgttggctgagcttcctgcatacataaaccgtggtgcagcatgctttctgaatattggaggtaatctgaaggattgccatggagctcctttgctgccactgctcttcatagctatgaacatggccttcaacatttctgttttaaatctggtgaagatgtctactgcactggttgcttcgctaacagcaactttagcagttcctctttccatctatgtgttgtcactacctctgccatacattcctggtgggacaaatttaagcacttcatttttggttggtgctgctatcttagttcttgggttactcctatacaatcttcctaaaaattagccggccgaatgaagaccgactaatctataccaagtcaaatacaaggatgacaggaaacttttgatgccccatgttgatacaaagattataattccgtttcgttgccaaccagcagcaaaaatttgttcagaacttctgaagagcgcctcgccgccgtgctactgcagttcctcagcctgtgtgacttcaaccagaaagcgcctagtttcgagtacttaggaactccttttttttgttttttgttttgtgccacagctactttcagcctttcataggttttactcacatgcttccaggtaagtcacgaattttaatttgctcagttaggataggatttagctcaaatgtaatggtttttatatgggtattcggtattccctatactggttttagctatctccctgtttatattttgagttttcgtataacaggc

SEQ ID NO: 22775 - DNA, 862 bp, Oryza sativa
  ref <308>: DATABASE ACCESSION NUMBER: AK072934
  ref <309>: DATABASE ENTRY DATE: 2001-12-06
gatcgtttcgtttcctctctctcctcgtctcgtctcttctctctccatttttctcgaagcgagagtgcgttgcgttgcgagcgggaagcgaaaactcgaaaccatggccacggccggcgacgagcagcagcagcaggcggcggcggcgcagacggcggaggtgacggaggcggcggcgaaggaggtggtgtccgtggagatgccggcgccggaggggtggacgaagaagtttactccccagagaggggggagatttgagattgtttttgtttcaccaactggagaagagattaagaacaagagacagctgagccagtatctgaaggcacaccctggaggccctgcatcctcagagtttgattggggaactggtgatactccaaggcgctctgctcgcattagcgagaaagttaaggctttcgatagcccagaaggggagaagatcccgaaacgttctaggaactcatctggcagaaagggcaagcaggagaaaaaggaggccaccgaaaatgaagaagcgaaagacgctgaagctgacaaggaggcccctagcgaagatgctccaaaggagactgatgtagagacaaagcctgctgaagaggcgaaggaggcccctagcgaagatgctccaaaagacaccgatgtggagatgaaaactgctgaagatgccagcaagaccgcagacgccgacactcctgctccagcaccagccggaaccgagaaggaagatgcaaaaccggctgaatctgaggctgctcctccagcaccatcggaaggaggagagaagaaagaggatgcaaagccagctgaacctgaagcagcagctgctccaccaagcaacccaactgagccttccgcaccc

SEQ ID NO: 22776 - DNA, 1992 bp, Oryza sativa
  ref <308>: DATABASE ACCESSION NUMBER: AK072935
  ref <309>: DATABASE ENTRY DATE: 2001-12-06
gttttggtgagtccgcctggccgccgtctgcgccgagcggctccgccgtcgttcctgcagcttccgccgcatcctcgccgcagctgaacccctcccatcccatgccctacgctatgtccgcccctgatattgcgaggatgccgctggttctgtttaggcaggggacaacggattcccgtgatacctatgttgttggattggagtttcctgcatctaatcggactcagagtttgatggcgcgtcctcgtttggttttctatataactcgttccagggggagcctgccctctctatcaaacctccaagattgcagctttcgcggtggtcctgcacaagcagttcatcttccaagagattgcacctctgccagtattcctgcacaagcgattgatctgctacgagacgctctgctccagatggagatgtgcagcagagaggagattatggatctgtgccgtcaggctatacaccaaaacatgtgctatgtagttcccagagttttgcctcagcagctatgccttcctccaccttcaccaaaggatgaacttcattcgacgctgacaaaaacttcgactcgcaaattttcagacctgccacatgatatcctgatggatatcattgccatgttggagatccctgatgccctgcgtgcggcttccgtctgctcctcgtagtgctccgtgcataccaaactgcacaaccttggaaagtacaaacgacctcagacgccgtgtttcctctacacctctcaatctattggtgaaaacatcgcttgcctctacagccttgcagagaagaggacctacaagttaactctgcctgagccacccatcagtaggaggtatctgcttgggtcttcagatggctggctggttaccgctgatgagaggtctgagatgcacattcttaatccgatcaccggtgaacagatcgctcttccgtctgtgataaccatcaaccaggtgacgcccattttcaaccacaaaggcgtgctctgcaaatatcgttactcacggcacacagcggagggtgttaccgactcacccatgacgcttcctcttgacaaactgcggtacttcttccattgcaaggcctttgtattttatgataaatctgtaaaaagctatattgtggtgctcatccataacccatgtgagcagctctcatttgctagattaggatatgacaagtggacatggctgccaccacacttgagatttcaggattgcacctacaaggatggcctattgtatgcagtgacgtcattgggggaaattttcgcgtttgatctcaacaccactgtgatcacagcaaagataatcatggacaggacaaaggagtattcgcgtgagagaatttatattgttcaggctccatggggtgatctgttgcaagtttggagaccaccacaaggagatgggcgtgggtatgatgaaattactggccgttcagctcttgtgagcaacactgggaggacaaaattatatagagttgatactctggctaaagagctagtggaaataagtgacctgggtgaccatgtattgtttatggggaataaccaaacttattgtctttgtgcaaaggaatacccactgttgaaggcaaaccatatatattttacagatgattctgagtgcttggcactcagaaccctgtggggtttccgtcttgatattggactccttaacttgagagataagagtgtggaggaaattgtatcccctcggctttggttgaagtgtcgcgctcctgtgttgcttgtaccgaatcctcggaagatgaattccacttgtcacaattagacacaacatccgggaacctccttttcttgggaattttaatgttgccaggcaagatagtattgatacattgtaataagaaataggaatgttcttatatgccctgttgcattgttaaatatgttgtagcctgttttattctgtgacatttgtaaggttattctttccttaatcttaattaattgtaact

SEQ ID NO: 22777 - DNA, 1166 bp, Oryza sativa
  ref <308>: DATABASE ACCESSION NUMBER: AK072936
  ref <309>: DATABASE ENTRY DATE: 2001-12-06
ggcgtggagagcaacgctcgctgcgacctgcgacgccgccccgcgccaacttctctccctcccacctccaccacctcctcctcctcctcctcctctcctacagcgccacaatgccgcgcgccccgcgtcgtccacgtcatgctcctcctcttcgtcgcgctcggcgcgtgccgtgccacccacaacatcaccgccatcctcgccgaccaccgcgacctcgccgagttcggccgccagctcacggccacgggcctcgcggacgacatcgacgggcgcaacaccatcacggtgctcgccgtcgacgacgcccacatggcgcagctcagggcgcgcgggctcccgcgcgaggcgctgcgccacgtgctctcgctgcacgtcctcgtcgactactacgacgacgccaagctgcaccgccctccccggcggctccgcggtcgtgtccacgctgttccaggcgctcgggcgacgcgcccggggagcgaggggatggtgaagatcgccgtgcgccgcggcggccgcgtcgcgttcgtgccccagggacgtcgacgacgcccgggccaacgtgttctacgtcaagtccgtgcacgaggcgccctacaacatctccgtgctgcaggtcagcgccgtgatcacgtccccggccgccgaggcgccgtcgtcggcgacggagtcgaagcccaactctacggacgcctcgtccaagcacgggccgccgaatgctggtgcacacgcctgcaccgtcgccggtggggcaaggttcgtcgtccgacgacggcgccgacgaggggaagaaatccggcgacggaggagatggtggcaagaagaacggcgccagcgtcggcgcggcaccgcgtgggctacccttcgctctggcgtttctcatggctgccagtgccatcctcgtggtgaattggtgatcgtgtgaaactgtgaagttgatcaccaacgttgtcttgtgaaattcattttgggtgaatttgcacgtttctgtgccacttttgttggggatttcgtgagtttttccactgttaggtaccttaggttcatggtgcattggtgcttggaaatgtgttgaattgtggtttgcaagttagtagtaccattttgtgtcgtcaacttaatttgcacgcgaacgtatgatcattcatcagctgtattctgagtcc

SEQ ID NO: 22778 - DNA, 2038 bp, Oryza sativa
  ref <308>: DATABASE ACCESSION NUMBER: AK072937
  ref <309>: DATABASE ENTRY DATE: 2001-12-06
gagttcgaccgaggccctcgccggcgccggcgccgccacgcccatctccatccccgaccaccacttcttctccggcgagctcgcctcgggagacgaatccgcagctccagaggcagagaatcgaatgctactaccacccgtgaaaggtacggtgtgtcgtgtaccgccttgaaatcttagctggttcgccggtgatcatgccgtgaagccgccgccgcaggcatcttcccggcgagcgagttggtaggggcgcttccactcgcgtagctacgaatcttggccttcccggcggcgattggatggtgcccctgaccctgaggtgaattccaagaagatccaagaaccatcccctccccggatggatgacgcggaggcgaacatcctcgcgtccctcggccgcgtgcgcctctgcgacctcgccgccgccgacggcctcccgtccgacggctacaagatgtgcgtgtcggccctgatgcagtcgctggcgcagtactcggcggccgtcgtcgagctgcctccggccgacggcgccctgctgaggtcggggctggactccgcacgcctcttcttccaccagcgagggtacggatccggcgaggccggcggcggcggcggtggcggcggctcgggtgatgcccgggagtggtgcaagacgtctggctactatgctgatcctcagatgtggctggaaatgtatgatttcaggcccggcatcacgccggtagagccgaacggtgtggcggaattgccgccgtccgggttgcctgatatgttttcggtgcttgggaaggtttcccgggaggtcttggacgcgattagcttctcgctgaatctgcgtagctccacatttacgggttgcttgacaacatacccttgagaagccaggaggtatcatcttctgttctttcggcatgttgtcattcgaggccgtcgatggaaggagcacagcagcatagcgtcgcttctcaggatgatgaacaattgctcatgttttcggatcaggagaaccagattgacaagactttgcttacgctggttaagtcggataggtcgggcctgtatatcaaagatttgcaagggcgctggattcttgtcgatggggatcttggtccgcttgatattgttgtctatcctggccttgcgctttatcgggaaacagctggctatgtaaacccagctgtgcacaagacggaggtcggcaacttgcaggaatgtatgtttgggcggtgttcgttggtgttcaagctcatgcctaggtcagttgcaaggctgagtggtgaagagatgagggctgctggccatggtgttgatgctcagtttcaggtccccatactagttaatgatttcatgcagacagaacattcagcaaatcaactttttcccaagaacaatgaaccatcaccacatgttgaacaggaagcatcgtataactttgtgatgaagagaaagaaggaaggtagaaaaacaaaggcactccctccttccaaaagacttcgcctagaggcgcagagggtgctcaaggagcgtgtccaggatattgcggataagaaaggcatcaagctgagattttgcagtctcagggactgtgaaagccacataaaatcgttagaccgtccatgtgagaacatcagaactgaaatcggatggccgccaggggttccatttgtccatccacatgaccttccaaacaaagcaaagctcatgtttctggaagcctatgaacccggatggactgcctcccagcaagatttagagagcaggtctctgtaaatttagatgcattaccaaccttggatatgttttgaattgcagggttggatcagtagtttaatgatctcacctacatgctgaggagtgaggagctagaaatgtattgctgacgccaaatggatgtagaaatgcataccaagattactgacagtctgacaccaaacgccgttgagaacattgagcttgagcatctgtaaatgtaacctacttactgctgcgattgtgttatattcagatgtgctgtgatcggatcgagatcctttgactt

SEQ ID NO: 22779 - DNA, 1142 bp, Oryza sativa
  ref <308>: DATABASE ACCESSION NUMBER: AK072938
  ref <309>: DATABASE ENTRY DATE: 2001-12-06
gatcctcccaacccaaaccgagcgcagcgcacggaccgagatctgcgcccggcagcggcggcgaactccggtgaaccaaccatggccgtggacctgatgggctgctacgccccgcgccgcgcagacgaccagctcgccatccaggaggcggccaccgccggcctccgcagcctggagatgctcgtgtcgtccctctcctcctcctctcaggccgccggggctcacaaggcctcgccgcagcagcagccgttcggcgagatcgccgaccaggccgtctccaagttccgcaaggtcatctccatcctcgaccgcaccggccacgcccgcttccgccgcggcccggtcgagtcgtctgctcccgccgcccccgtcgctgctgctccccctcctcctcctccaccaccggcgccggtcgctgccgccctcgcgccgacctcctcgcagccgcagaccctgacgctggacttcacgaagccgaacctgaccatgtcggccgcgacgtccgtgacatccacgtcgttcttctcgtcggtgacggccggcgagggaagcgtttccaagggccggagcctgctctcctccggcaagccgccgctgtctgggcacaagcggaagccctgcgccggcggccactccgaggccaccgccaacggcggccgctgccactgctccaagagaaggaagaaccgggtgaagaggacgatccgagtgccggcaatcagctcgaagatcgccgacatcccgccggacgaatactcgtggaggaagtacggccagaaacccatcaagggctccccttacccacggggctactacaagtgcagcacagtgagaggatgccccgcgcggaagcacgtggagggcgccaccgacgacccggcgatgctggtcgtgacctacgagggcgagcaccgccacacgccggggcccctcccggcgccacccgccgccgccgccgtcgccgcgatgccggtgtccgtcgccgtgtccaccggcaacggacatgtctaacctaattagctccataatttttttcttcctttttttttagttgcttctcatcaatctaatgatgcgtgtaaagaagaaaagattgtagaaagaggacgagggaaacttgatgctagagaattaccgtctcc

SEQ ID NO: 22780 - DNA, 752 bp, Oryza sativa
  ref <308>: DATABASE ACCESSION NUMBER: AK072939
  ref <309>: DATABASE ENTRY DATE: 2001-12-06
tggtctctctcgctcctctctcgcgagttcgcacagatctaaaatccccatcgattctgttcgtctccggaagcgaggcactactgatttccccctccagtctccctccctgcttcgcccctctctcccgcacctccctccctattccatgccgctccccttcgttcctgcttctcccacctctcctccttctctgcgtccaccaggctacggccacaaggatgcagggacggagcgttgtgagcggagcggatgcggctcggatcgacgatgaaggcgagggggtatgttgttgtgttgttggagaaggcggaagcgacggggagatgggcgtcatcggcggcggaggcgacgagcggccacggtgtcagcgacggggtcttctatcatgtgcggtggatctgatacagttctccatgcacgagccagcaaacaacgccacatttcgttttttctaagctttgggttcttgctatgttcctcctatttctagtagtactagttcttacggtgctattgctagtactagcagttcgtacaggtgaattcagagaatttcttttctcaattggagagatgttctagtatttctctttttctttgttcttggttcttcatgtttttggtactcctacttgctgcgtgtggtacgctgtgctgggatgcaggtagttacggagggatcgagggaatctctttgcctattgttgctttttttatttgaaagatgaattgaatgttgtactttgtgc

SEQ ID NO: 22781 - DNA, 976 bp, Oryza sativa
  ref <308>: DATABASE ACCESSION NUMBER: AK072940
  ref <309>: DATABASE ENTRY DATE: 2001-12-06
gatttattatctcgtcgtctcgtcttcctccctcctccgcctgatcgagatcgcttctgctccagccgccgccgccgccgccgccgaagtccgcaggtgcgaggacgccgacgagtctccagagagcagggtaagacaagatgaacaggaagccaggagactgggactgcagggcgtgccagcacctcaacttcagccgccgggacctatgccagcgctgcggcgagccgcgtggcgccgctgatcgcggcagcggtggtggcggtgactacgccaacttcggcggccgtggtggttcctccttcggtggaggctttggcactggctctgatgtccgcccaagtgactggtactgcaactgcggcgcgcacaacttcgccagccgctccagctgcttcaagtgcgctgctttcaaggacgatgctgccgtcaacagtggcggcgctggtgcctttgatggtggggacatgtcgcgctcgcggggctacggcttcggcagcggcgccgtccgcgccagccgccctggctggaagtctggcgactggatttgcaccaggtctggatgcaatgagcacaacttcgccagcaggatggagtgcttcaggtgcaacgcaccgcgggactccggcactgaggtgtaatttgccgtacgtgtccgatcgatctggatccgatgaggcttgcagcagtgacgacgagcagcagaagcagcgttaagagttgtgatgtctacataagaagaagaagaaagtagaatgcaaaagaaatctccccatggttttactagttttgtttcttcccgttttagatttggttctgattcccatttgggaggacccgtcgacccctgattatctatgttttacccgttttatttcctgtttctttcggcatgtttgctcttcgatcgagtcgtgtaacccgaaacgcttgcgcttgagaagtattattattattaactagtatgttgcttctt

SEQ ID NO: 22782 - DNA, 1738 bp, Oryza sativa
  ref <308>: DATABASE ACCESSION NUMBER: AK072941
  ref <309>: DATABASE ENTRY DATE: 2001-12-06
gggtgaatccgacgtggaggctctccattggtccgcacacgcgtccgtccgtcttcctcgcgagcgaacttaaaatcgcagtcgcaccccggcgccgatcgcaaggtccacctcctcccctctccactccttctagaaccttctcgaccccgccatgcgccccgcggtcgccgccgccctcctcctcgtcgccgccgccgtcgcggcctcgccggtttccgccctctactccgccggctctcccgtcctccagttcaaccccaacaacttcaaatccaaggtgctgaactcgaatggggtggtgctggtggagttcttcgcgccgtggtgcgggcactgccagcagctgacgccgatttgggagaaggccgcgggcgtcctcaagggcgtcgccacggtcgccgcgctcgacgccgacgcgcacaaggagctcgcgcaggaatatggaataagaggatttccaactattaaggtgtttgttcctggaaagcctccagtagattatcaaggagcaagagatgtaaagccaattgttgaatttgctctttcacaggtcaaggctcttcttagagatcggttgaatggaaagacatcagcaggttcaggtggcaagaaatcaggtggttcaagtgagaaaactgaaccaagtgcgtcaatagaattaaattctcaaaacttcgataaacttgtcaccaaaagcaaggatctttggattgttgagttctttgcaccatggtgtgggcactgcaagaaattggcacctgaatggaaaaaggctgcaaagaacttgaagggccaagtgaagctaggtcatgtggattgtgatgctgaaaagtctttgatgagcaagtacaaggtagaaggctttcctactattttggtatttggtgccgataaggagagcccattcccttaccagggggctagagttgcctctgctatcgagtcctttgcattggagcagttggaagccaatgctgctccacctgaagtttctgagttgactggcccagtaagttttcgtgatattaacaaagttatccttttgtggagacaatggtctgggattgatgttttgacgaggtggtttggcttctgtaggacgccatggaagagaaatgtgcttctgctgccatttgctttgtatctttccttccagatatcttggattcaaaggccgaaggaagaaacaagtaccttgagctgctattatctgttgctgagaaatttaaaaagagtccatacagttttgtctggacagctgctgggaagcaagctgatcttgagaagcaagttggagttggtggttatggctatccagcgatggttgctcacaacgtgaaaaaaggcgcatatgctccactccgtagtgctttccagcttgatgaaataactgagtttgtgaaggaagcagggcgcggtgggaagggtaatcttcctttggacggtaccccaacgatagtccaatctgaaccatgggacggcaaagatggtgaggttattgaagaggacgaattctcccttgaggagctgatggccgacaactctccagtaaatgacgagttgtgattctgataattccggaaatgatgttagagttgattagccagactgtaaatctgagtaacactaatgcttcactcgtgtcaactgtacaatttgggcgggacaattttcagaatgctcctttggtgttattacagtacattttagttgacgaaaaacatcgtttgtggtc

SEQ ID NO: 22783 - DNA, 1236 bp, Oryza sativa
  ref <308>: DATABASE ACCESSION NUMBER: AK072942
  ref <309>: DATABASE ENTRY DATE: 2001-12-06
ggcacaccacaccacaccacacagcaaccagccagctgccacactagcttgaggcgagcgagcgaagcttagctagcggatataacaagtcgtcgatctgcttgctgcttttgtgaattgcggtggaagcatgtcgagcgcgtcgtccatggaagcgctccacgccgcggtgctcaaggaggagcagcagcagcacgaggtggaggaggcgacggtcgtgacgagcagcagcgccacgagcggggaggagggcggacaccctgccgcaggggtgggcgaagcggaagcggtcgcgccgccagcgatcggaggaggagaacctcgcgctctgcctcctcatgctcgcccgcggcggccaccaccgcgtccaggcgccgcctccgctctcggcttcggcgcccccgccggcaggtgcggagttcaagtgctccgtctgcggcaagtccttcagctcctaccaggcgctcggcggccacaagacgagccaccgggtcaagctgccgactccgcccgcagctcccgtcttggctcccgcccccgtcgccgccttgctgccttccgccgaggaccgcgagccagccacgtcatccaccgccgcgtcctccgacggcatgaccaacagagtccacaggtgttccatctgccagaaggagttccccaccgggcaggcgctcggcgggcacaagaggaagcactacgacggtggcgtaggcgccggcgccggcgcatcttcaaccgagctcctggccacggtggccgccgagtccgaggtgggaagctccggcaacggccagtccgccacccgggcgttcgacctcaacctcccggccgtgccggagttcgtgtggcggccgtgctccaagggcaagaagatgtgggacgaggaggagggggtccagagccccctcgccttcaagaagccccggcttctcaccgcgtaattcagcagctgcatggatccgatccgtcagagagtttttgtctagggagtgaaattcagtcgaaacacactattcgttgattcgttttgtgccgctattgtttaatttgttcctgcttttgtacagagcaagcgagtgatacatagccatacatacagtcatacagatataggtctagctcttccttggttctttgtaacactggaactgtacctgtatcttttacactttgttctttgacagtcatatattgtagaccatattcgaccatacttggattgtgtttagttcagcg

SEQ ID NO: 22784 - DNA, 2634 bp, Oryza sativa
  ref <308>: DATABASE ACCESSION NUMBER: AK072943
  ref <309>: DATABASE ENTRY DATE: 2001-12-06
gatgagagaaaacgcacgaccttaataatgcatgcgtaactgttctcccgtcacgacctcaagagagctcagcctaaggcgggcagcagctaagccagaggccgggatggagctctgcgccgtcttcttctcctcggtcttctccctcctcctcctcctcctcctctcagcagccaatgacgtcgtcgtgtcggcggcgacgtcgccgccgctcaagttcgggatcaactacggccagatcgcgaacaacctgccgcacccgacgcaggtgtccggcctcctccagtcgctgagcgtcaaccgggtgagctctacgacgccgacccggccgtcctcgccgccttcgccggcaccggcgtggagttcatcgtcggcaacgaggacctccacaacctgaccgacgcgcgcaagggcccgggcgtgggtggcgcagcacgtgcagccgttcctcccggccacccgcatcacctgcgtcaccgtcggcaacgaggtgctctccggcaaggacacggcggcgatgcagagcctcctcccggcccatgcagtccgtccaccaggcgctgctcgacctcggcctcgccggcagggtgaacgtctcgacggcgcactccgtcaacatcctcgccaccagctacccgccgtccgccggcgcgttccgggaggacctcgcgcagtacatccagccgctgctcaacttccacgccgaggtcggctcgccgttcctcgtcaacgcctacccgttcttcgcctacaaggcgagcccggcgagcgtgtcgctgccgtacgtgctgttcgagcccaacccgggcgtacgcgacccggccaccaacctcacctacgacaacatgctgtacgcccagatcgacgccgtgtacgccgccatgaaggccatgggccacgccgacatcaccgtgaggatctccgagaccgggtggccgtccaagggggacgacgacgaggtgggcgccaccccgcagaacgccgccgcgtacaacggcaacctcatgaagcggatcgccgccggggaagggacgccgctcaagccggccgtccccgtcgacgtgttcgtgttcgcgctcttcaacgaggacatgaagcccggcccctcgtcggagaggaactacggcctgttctaccccaacggcacgccggtgtacaacatcggcttcgacgccgcgtccttcagcccgtcgccgacgacatccacgttttcctcctcttccaggccaacggtaacaaaaaagaatttgaattttattctacttcgaaattttgaatatgcaaatttgagtttcatagaacaaagagaacttctaatggccatgtcttctcttattgtcttaccagaaaaaatatccgtgcgttgcaacgggtgaaaactattttaattttattatagttaagatgaaatttattgtgggatttcacttggatatatatatttttagaaaatcatgagctgcaattaggagtctgttcgtctaaagttatcatgcaagttttcttatacaactccttatgtatttccaaaagcgaacgaacttaaaaaccgactcatacatgaatgacatatcaaagtaccaacaaaaacatcttcaatttttatatattgtcttattagaaaacgtacattttttttttcgccagaccttaatataatggtaagtttctgattgcaaattattttgcttatgttcgttctgcagagtacatttctgatgggggtggttgtcctactcgccgcattcctcctctgacaattttctccacaagtatattgcacgaatgatttgggattgttttttgaccgatatagttcgatttgtggttggttgcatagcacagaaaagcagatacattgttctaacctcgaggtaagcttgtcttgaccatgttcttgttcagttgctcacacagttttcagaaaccgttttttgtcagtaaaattgccatcttacaagttacaactaggttattgcttactgtgttagccatgaaattgattagttcagcataattttgtagacataatggtaggtgatgggtcgatcctatctcagtggcaagatatgtttggacattttcgcatctggtgcgtcatgtgaaagatgtcgttcagttagcgcatttcccagggaggtaggccggtggttgatcggttgttgcatgttttaggattctagctctggctatctcttcagaactctaaactgaccgaccaaccaacgcccaacgagaagattctagtttgcgtcatgggcaagaatcgaataagcatttggcacagaagtgggcattattcagaagccattgattgttcatcaatttcgtcaggaacagagcattaaactaactaaatcctcaataattttctcatttcgttatcttaattgtggaatcttggaagaattgaattgactgtttgttgtagaaaattaggtgggctttttttttcattctagcatatggatgtttaggcagatctcttactattcctcacaattgaattaggtaggagtaagaagagtactctgtcgctaagttgacaaaatgtggaatatatgcgaggacagcgttttcattcattgtatagtggagatgatcaaacaagactgtactttacctgcttttgcc

SEQ ID NO: 22785 - DNA, 1488 bp, Oryza sativa
  ref <308>: DATABASE ACCESSION NUMBER: AK072944
  ref <309>: DATABASE ENTRY DATE: 2001-12-06
ggccatcgcgcgcttttgcccaccgcttctctcctcctcctctccccccttccctttccctcccggcgtgtggtggtcggaggttgccattcattggccgcccccaccaccgcacccgccggtgaggagggacaccgccatcacattcttgctatatccaacgacctccattgattaactacgtgcgtgtgagaaactaatcaaccggccggcgtgctggctttcctcatcttcaagatgcaccggtggttcattgccagctgcggagacatacgtgcggcggcggcgcgctcatcccgccgccgaggaggcgatgcgattgcgcccaagtcggcgccgccgtcgccgtcgccgccgccgaggctgaggaagacggtgtcggagacggcggcggtgatgctggccgtgcccaaggacgtggaggagttccggaccatgccggcgtacgggaccaacctcgagctgttcacctacgaccagctcagggccgccaccgccgacttcagccccgaacagatcgtcggcgagggcggcttcggcgtcgtctacaagggcctcatccatggcgccgtcgtcgcagtcaagcagctcaaccccttaggccaccagggcgacagggaatggctgacggaagtgagctacctggggcagtacaaccatccgaatctggtggagctcatcggctactgctgcgaggacgatcaccggctgctggtctacgagtacatggccaatggcagcctcgagaaccacctcttccgacgttcatgcaacctctcatggacgacccggatgaagatcgccttggacgtggcgaggggcctcgccttcctccacggcggcgaccggccgatcatctaccgcgacttcaagacctccaacattttgcttgacacagatatgaaggcgaagctgtcggatttcgggctggcgaaggagaggccgcggggagggaagacgcacgtgtcgacgagggtgatggggacgtacggctacgcggcgccggagtacgtcgccacgggccacctcaccgcgatgagcgacgtctacggcttcggcgtcgtcctgctcgagatgctcgtcggccgccgcgcgctcgagccgccggccgccggctgcagcaagtgcaacctcgtcgactgggcccgccccatcctcatccggcccaagaagctggagaggatcgtcgaccgccggatggcgctgccggcgccggcggcggactacggcggcggcgtcgacgccgccgtcgagcgggtggcgcgcctcgcctacgactgcctcagccagaaccccaaggtcaggcccaccatgggcagggtcgtgcacgtcctcgaggccgtcctcgccgaccaccaccaccacgccggtgctgctgccgccgctgcacggccggcagccgccgccgccgccgccaccgccaccgccggccggttatatgtatagatgtacatgtttgggaattaattaatttcatcattgattacg

SEQ ID NO: 22786 - DNA, 1406 bp, Oryza sativa
  ref <308>: DATABASE ACCESSION NUMBER: AK072945
  ref <309>: DATABASE ENTRY DATE: 2001-12-06
ggcgcatttaatttaagttgatatcgagcatgcatgggtacggtacgcgccggtcggactccggtggtgatcgatcaatggcgaggctctcaacagctgcgtggccgttcctggccgcagtggcggcggcgctgctgtgctccgtcgacgcggtgatcgtcgaaggcctccaggttgggttctacaaccagacgtgcccgtcggcggaggaggccgtccgtgacgtcgtcacctcggagatcggcttggaccgcaccatcgccgccggcatcatccgcatcttcttccacgactgcttcgtcacgggatgcgacgcgtccatcctcctcgacgagacgccgtccggcgacgtcccggagaaggaatcgtcggcgaacggcttcaccctccacgggctgaggacgctggacgtggccaagtccaccgtggagtccatgtgcccgcgcaccgtgtcgtgcgcggacatcctcgcgttcgcggcgcgcgacgccgccgtggccgcggggatccccttctacgaagtggcggcggggcggatggacggcctgcgctccaacatggacgacctgccggggaacatgccgacgcccagccaccaagtcccgcggatgtcggagctcttcgtcaagcgcggcctgtcgcaggaggacctcgtcgtgctctccggcgcgcactccatcggcggcgcccactgcttcatgttctccaaccgcatctacggcttctcccagggcgccgacatcgacccggcgctggagccggcgttcgccgagaagctccggaaggtgtgcccgccgcggaaggacggcgacgacccggagcagtcgcccaaggtcagcttcgacggccgcacgtcggagaagctcgacaacgtctactactccgagctgctggccagccgcggcctcatgacctccgacgacgcgctcatcaaggaccccgagaccaagaccaccgtcgatctcttcgccggagacaacgccgtgtggcaggagaagttcgccgccgcgatgcagaagctcggcgccgtcgacgtgctcgtcggcgagggcaagggccagataaggaagcaatgccggctggtcaacaagccgtccaagcagtccaagcccacgtcgacgcggcagtccatgccggcgttgcggccaaagcgcaagaagcctcgcttgggcttgggcaatttcatccctggcttccacggcttcttctgacagaggtgaatgaaattaattaagaaaaacaagtactactccacttccctcccataggctcgctcctatggtttttctttttctttcttcttttttttttttgagagaggagcttttgctcctacggttactactacactctgctgcaactatatgttaaatttcttttcttaaaaaaaacatgttgaattgcct

SEQ ID NO: 22787 - DNA, 1132 bp, Oryza sativa
  ref <308>: DATABASE ACCESSION NUMBER: AK072946
  ref <309>: DATABASE ENTRY DATE: 2001-12-06
gggcagcagccacagtttggggataatccgattctctactccccaagtgactcactcaccgatggcgcctcctcctatctcctcctccctctcgctcatggcctccaacccaatcccgtcgcctccggtcgccaaaccgggcaggccgctcaccgtcgcggcgtgcagcaacagcagcagcagctcctcctcctcctccccgtcgtcgacctcgtgctcggctgcctggagtctcccggtggcgacgtcggccggcaggagggggctgctcgcgctgggcgcggggttcctggcttcccctgggcttctgtgccccgccggcgacgccggagcgacgcgcatcgagtactacgcgacggtgggggacaagctgtgcgacatgaacgtcgtcaagtcggggctcggctactgcgacgtcgaagtcggcaccggcgcccagcccccgcgcggccagctcataaatgtacactacactgcaagatttactgacgggatagtgttcgacagcacctacaagcgaggacggccactgacaatgcgccttggcgcaggcaagatcctccgagggcttgaacagggaatcagtggtggcggtggtgtgccacccatgctcgttggtggaaagcgcaagcttatgatacctgcaactttggcatacggacctgaaccagcaggttgcttctcaggagactgtaatattcccggcaacaccacactcctatacgacatcttcctggttggattttacaagtgagcatatgatgaaaaggaatatgcatgacttgaacagactaggtgcaaacaagattttcgagtaaattttggcgtttcatacaagaggcgggactacggacagatgaagagaaagggtgcgacatgcctaagcccagacgccgaaggcaaatgcgtcaccggagctccttgggtctccaatacgcagagtactacatttgcaatctgtaccaagaagtgaaaggatatataacaaaccggtcctctgatatactatcaaattggtcttatgttttctagagaagaaaagtcttgtgtttgtgtaagtataacgttgtaaagacatgtctcattattcatactgtcattggtagagccaaacacaacaaaaattcccatc

SEQ ID NO: 22788 - DNA, 2485 bp, Oryza sativa
  ref <308>: DATABASE ACCESSION NUMBER: AK072947
  ref <309>: DATABASE ENTRY DATE: 2001-12-06
ggccaggccaccagaacaaagcaggaggagtcaccaaacgcatgcgtacaatcggagcaagtagcagtagcagtaaacagagcagtagaagaaaagaaaaagatttagtaaaactttagtttaagggaggaggaggaggagcacttggttctctcgacacgagaaaaggtgaaacagtgctagttaaatagtggcaataattgttcggtttagctttttgggaatcccggcgccactgtttccatctcctagcgctgaattccaagagatctcctcctctctctctctgtcctggcaatcacagcagtagcagcagcagcagcagcagcagcagcagcagcgaattctctctttctctcgtcgtcgtcgttgtctctcccccttccgtttggtggtgcaagttgaggtggaatcggcacacggctttggcttttttgggcggagaggagaggagaggagcaggggagagcttggctctgcttcttttttcattcgtgttcgggtttctctctcgcctttgggaggcggggcccccgcttttctgggcctccccattggaaggcgcaaaggtggacgcgcaccaatttaaaggcggccgagatcgagccaaacgagggaaccgagccgagcgccaccacctcccacctcacgcactgcccagcctacctcagtgtacgcgcgcgcccgtgtactcgccgccgccccccctgccgcttcagggacacccccaaaatctgcgggcgcggctgcttcgcttccacacccccgcgggttagcggcgcctttcccgagcaaaggaagtgtatcgtgctattttctataatctggttgtggttgttggaaagatatttttgctaaagttttgatatcatcgtcgtagtttggatggcacccttggttattttggtgggtttatcgagctctggatgccgaactcgcctatgcttcatcaaaacggaagtataactggtgctacaaaagttccctcattgaaaaagaaagttaacaaagtcaagcattcttccaaagcttgattatgtttttttgaggctgaagggggagcatagaatttcatctggcatgcagatgtcaacaaatcctaaccactatccggtatttccacattcattccgcaaccaacatgtggtctcattccaaacaagcacaattgccaatggctcaggagccatcccagtttgcccagccagttcgggagggatgaacagcgatatgacattgctgaacaccacaccttcaacgattgtttcaacatcttcacccaacatgcttgctgattctaaccagagcctcaagtatgctgcaccaatggctgtggattggtcatatcctgagttacagctactgaacgacggcctccttaaatatgcaaatgaaccgggaatcatgaagtatatcaagatagcagctatgttaccagagaagacagtaagggatgtagccatgagatgccaatggatggcggcgaaaaaggaaaatacaagacgaaggaagaccgatgaacattatcttggaaaaaagacaagagatcgaaaggataaaatggtggagtcttcatgggctaccaatcgacaagttcagacaacagatattagaagtccttccaccttggcatgtaacacagttcgtgataatcaatttcagtctggagcctctgaaattgatcgcgcaatgcttaatatattggaagaaaatgctcgggttctcaaacaaataggagaaaatattatgacatcacaggttcagaacaatattgatctattccatcatgcaagaaggaacatcagtgatcttctacaaagcatgagccaaatgcctgggataatgagcaaaatgcctccgctgccagtttcgattgatgacaggctagctagttacatactccctggagtcaatttggcacaagttttcggcagcagccatttgaggagctaagagaatggtaagccacagccaaacaaggtggcttcaattttcagcagaaatttgaagattatgttaatgttgggagagccatttgcctccatttctgcatggagaagcagagacaaaacattgatcttgcttttcctgtgcctggaagttgaaggaagaaatgcaagtaacgtggttacatggccttcaaataaaagcagccgagcttgccttctattgaagactgcaggcaatatattaatattgttattatactagtgatcgaaatagcgagggtttttcggcaattgcagtagtttctttgttgcacatatcgattctttttggtttctcccctgatgtcttctgctccagaccaagtggcgatcttaacagaggtgtagcatagaaatttgatatgaataattagcaggaaaagcctttttgttagttatacaaggtaacctgtctctgtctgtaatgcaagtgcttactctctggaatcactctccactgtatgagctaagtataacgaaactgcaagtttccaacc

SEQ ID NO: 22789 - DNA, 2679 bp, Oryza sativa
  ref <308>: DATABASE ACCESSION NUMBER: AK072948
  ref <309>: DATABASE ENTRY DATE: 2001-12-06
gttccgcaaccttggatcgatctcactcgcctctctctcgagtcttccttggactcgccggagagatgggcgacgcggcgtcgtcggcgtcggcggcggagatggtggggcgcgcggtgggtgaggtgcgggaggcgctgaacgagcacgcccgccctcgactccttcctcggcttcttccacgccgtcgactggaaggtcggtttctttcttatagccttcttgccccccatctgccctggatctacctgggatctaacttcccacttcaaccttttgctcctcaatcatcaagtaattaaataatgtaagaaaattcgttcccctgcctcgcgcgcatcaatatcagtatgatagattagacaagacaagtgaaaagcaatagggctacctgatacagtatatagttgagggcttatcaaagggagtagtgctagtttagcaaatgaatgacgacacccaccttgtgatgcttgctattcatccaaaatcccacaaaaaaagatgatgcatgcttcttgtgacggatctaactatataatttctatggcgataattctttgccccaatcaacaatattgagtgcctgtctttcctatgtacatgaaaccatcgatagatggagaaaactaatgagctttgggttttttacaagtgtactgtactgtgtagtcataccatgcttacggaatgacatatctaatctattttgttttcttcacaagcaaagaggtagccctctccctttccattatcataaacacaacgcaacagctctaacatctcagggaaattataaaataaaggaacatgtctaatcttctatcgggacgtgataccatacttgagttttcgcatgctttgcactgtcatgctatgttgctccatctatgccgacaggccatccgtgtaccatgttgctggggaaagcctccttgacccagtcaaccatacaccttgaatttctagttccttccttttctcaaaacaaggaatactaaatgaaagctaatataggtagttggaattgtaaaatgaataaccaactgcacactatccgtggtattaaagacaaacaaaattcagtggtgacccgaatactttgggtagtggatatccatattttgctacatctaatttgccttcacgtttaattgtctgtttcgtcaacctagcaaacatttagtaaatgcaatatctcatcgtatcaatttttatgtctgtgctataatctttattattcccttcatcaggaaccttggttgatcagcatgttaatttttcatgccattctgctgctggtaacaatcatctcaaggagaaatgtcaacttccaacttatcttgtcagctttaacatgtaagttttgatttgtcttggttgctgatattgtcctgcatggttctcctgcaattttataatgtttattgaatgcttatattcacataaatactattatccttttttcctatattctgctggtatcatattaaatgttatactctaccaaccataattgtcttgtttttatgtgctttctaacttaacgttttccctcaaatgtggatagaggttccctaaaaccataaaaaaaacaacatatttgtgtggagttctacctacttgcttaaatttaatgtaagtttctttagtggtagaaccttctgagttatacattggtaggaatattgaacaagttactggcgaattatgtcaattaatgcactgtaaacctttccagattcttgttccatgcagtagatgtgaagggcatgcattgctcttgtttcagctatcttcagcatgaattaactatatgttaggatgaatatctcaaccctagtttgcaagacgatagcggagcattagtgaaaattctctttcatattctgacacatgttattttgtacgtttcatcaattttaaagaatgaatttatttctggtatgctagcttactattttatttacctgctcttgttggtttggtgcagtttctggtgtatttctcgctgagagaataaatacattcttagggcaacactggaagagcttctcaagccagaattattttgatccccaaggtctgttcatttcagttgtctggtctgggcccctccttttgataacgatccttattttggtaagtgcatgtctcatccagttgatcatttctgtcttccatcccgtgcattgtgggcaactgtttcttgtcttgtttctgtaggtgaacactcttgtcacactctgcctgctgatggtaagatggaaaagggcggagcttaggcaccgtgctcgtgaggttcgtaacaagcaggattgatcttaagctacctgaaaagctgaaactacgctgtttggtggccagcagacaagttgcttcccttggactgttgatctaaccgaaggaatttttttgtgtgaacttaccatgtgtagacatgtagcagtcgttcacaaaaacagtgtttatttagggatcatttcacatttgaagaaatcatggccagaggcccagagcttgactcttttgcctgtagcttgtgtattcccacgcattcttgtttttcatgcgaaggcaggagtcgagttactgtatttgctgaaatatgtgtaatagggcaaatcctttttccattgagaatctggctccatgaatgacagggtattttgcaattgc

SEQ ID NO: 22790 - DNA, 3690 bp, Oryza sativa
  ref <308>: DATABASE ACCESSION NUMBER: AK072949
  ref <309>: DATABASE ENTRY DATE: 2001-12-06
gaccgttcccctttcgtctccacctcgcgcgcgcagctcacgacgctcgcccttgtcgcttcctggcgaggccatccgcggccgctgttgcttcttcctggacgccgccaccatctccccacccccacgcggcaccccgtctcgccctctctagggttttctcggatcaagaatcgctgtaagccacatttccccacccgtgctactcccgaatccgcaatccccatccgaagatccttgcgacctccgccccaagagtcctcgccgccggccagcgctaccatcttctcgcagtgcaagcagccatcgccttgtcgccttacttgccggcgacccagcgccgcttcgtcgtcgtcgagctagcggcgccgcagctctcccctggagccattgtcctgcaccacctccccgcggacacggtgccggctgcagccgtagtcttctcgtggatccaccggccaacaccgccaccaaccatctcgtccacggccatctcctcgcttctcatggctgctgctcgtcggctcctccacacctctccagttggtactgccatgctctgtgcgtaggatacacactggtctgggatatcaataatgttcctcttccattgttacaggtttcatggctttgcagatgcttttgtagctttcatgtgatgacgagggccttcatttgtgcgaatatacacgagttgctggcatttcttcattttgcatagtacaaactctgctggtatgtgcaaatgaggccatatggatggttcatcaccatgaggcttcaatccatagtaaccggcaaggtcacaaatttataataacaggattgatgtgcaaatctgattagaaaagggagtaaactacagacagatcatgactcttttcactttttactgatgacatgcttcctcagttaatgatgcttttattgatccgctgcttcttccactccatgcggtacacctgtgaaatgtgcctgctttgactattttgtatacaacaatacaagtacccacctctttcctcttgacaagtgcccacctctccatcaacccctttccttctctctaggtgagtattaaaggtgcacatgagctagctatataatttttggtctttcttcaattgacatgcgtagaaaagttctattagtttctctattaaattgtctatatccagctttaccttcatatcacatccaggtaaattgttccttttcccttcacatggtgcatcctaaactgccagaatatatgccatgtgatacgtcttattttttgcgtgcacgtgtggatgacatcgctatatgcatgactgtcccttttgggtatatgcccaggatggcatcagtatgcacacccagccttagaagcaacaccatttgtttagaaggtctgcattatagccgctaatgtaaatagctgctgtcatatatatggtgtttgcttcttaaaattcttttgctttacataaaactgcaatccagactatgaacgagcacttatggttgaaatcctatagctcttaattattattactctgaatgtctactactttgctatgcttcttattttcagggtaaacatgtgccatgaaaagttgcattaggtaagtctcagccagctattgctgataatctggcatgagctacatttttgttaggctacattactgttgttatggaaaaatgaaaaggtattaaactggggtactattgttgctaatctgggatgagttagatttttgttgggctgcattactgttgttatggaaaatggaaaggtattaagcaggggtacatatgtgttgctaatctgggatcaactacatttatttcccagttaggttcatctctagcagcatcagctttatagatcttttatcttagttaatcctattgaatagtgctattttgccttaattttcctttcttatcttctggaatagcatatctttactttcctaattattttctacaataatataacatatgttgtaaatcatccttaggtgctgtattttaatcttaataaaagtctggcaccttcaagcagtctgccaacaaacatcttcatataccgatattttccatagtatctattcatacaccatgtaaccaattcgttcttccatcacctaaaattgagattaatgttatagatatattttaatgtttgagtaattgttgtgatagatatttttttattgaagtttgccttttggcgtccgcggcaacgccgcggggtccttgctagtacttaatgaacttgtagtctcctataactttctttggtacaatatttcctttccaagctctagctggtaaccatccgtatcgctcaataatattgtggtcagagtaaagtcagagataaaactaagagtggacaaaaagctcgaaactcgtggctcggatcggctcgtagcaagctttgctttcatcgatttgaactcgtagtcttaatgagtcaaatcgagctagccttttagctcgtgagcttaatgagctagctcgcgagctgctcgtttagctcgttagtataaaacatcaccatatcttcatgaacttagtgtttgttgactagtgcttagtcttttaattacatcaaaactattcacatttattgagtactatattagttagtgtttattattatgttaatacataataaaatgttaaaatagataatattaatatgatatcaataagatatagctcgttaacgagcctaacgagtttaacgagccagctcgcgagtcgagccaagctagccttttagctcgttaatattaacgagccgagccgagcaggctcgttaagacaacgagctcaaacgacccgagctggctcgttatccagccctagataaaacacatgtatcatgtcgagacaagagaaagtgtaagtctgtcataccaaatcttatacggaatcaaacggaatcaaacgttacacgtatagtggaagtcctaaaaagataaaaaacgagtcccaggtaaggagagagaagcaacgtcctactcggcactactaggtcgcatccatagttgctagttctatttggacaagaaaatatccgacggtataaatacaagacaaccccaaatgacaaggcggtccaacgagtgccacaagatccatagccacatccaattttatcgagttcttgttcgagcaaatcagtaacagctagccatcgatcccatgctcgaactttacaccgctatactgacagactagattaggttctactccctattgtacttgtaagagattgtgattatataatgataacaccggttccacccaacaggagtatagctattacccgtcagtagaggagcttgaacctatatcaaaatctatgttttccggtctcttttaccgcaatctcgtatatgccctagcatcaacgtttccaatactttacaattatcgtagtcaagtacaacccgtcaacactttaaaataatagaaacgtattctatgcatactgactaataaatatcataagaactagtatattataataaaaaatataagcatttctagtcattttctaaattatatttgggcggagagatgttcatatatatatatgtgtgtgtacatcatttccaaatcttcactgacatttattagttggtctccttggtgtgtaaaccctgagagctccttttaaaagcatgc

SEQ ID NO: 22791 - DNA, 2099 bp, Oryza sativa
  ref <308>: DATABASE ACCESSION NUMBER: AK072950
  ref <309>: DATABASE ENTRY DATE: 2001-12-06
gggtcttcctgcttaatgggccggccttgttagtcgatgggtcttctccctcccccgtgactcgacgacggcgaagggaaacccaaccccatccatccctctccttgccgccgccgtcgacccgatctccatcgctggcgacggcgagcatcgcatcgcatcgcatcgcggcggtgcccaagcgaggcaatctccccgtccgtcttccctcccggcctcggatcccggaggaggtctctcctcctcgctaggagcggcggcgggtgccgtcgtcctgctgcttcccttccgcctccggtccacccctgcaggcggcgatggcgttcttccggggcctgaccgcggtttcgaggattcgatcccgcatggcacaggaggccaccacgcttggtggtgtgagatggctgcagatgcagagtccatctgatcttgatcttaagtcccagctgcaggaattgattcccgagcaacaggatcgcttaaagaaacttaaatcagaacatgggaaggtccagcttggaaacataactgttgatatggtccttggcgggatgagaggaatgattggaatgctttgggaaacatcattgcttgacccggaggagggtattcgtttcaggggtctctcgattccagagtgccagaaagtgctgccaacagcaattaaaggtggagaacctttgccggagggtctcctttggcttcttttgactggaaaggtgccaaccaaagagcaagtcgatgctctatcaaaggaattggttacccgttcgagtgttccaggccatgtgtataaggcaattgatgctctccctgtaactgctcatccaatgacacagtttaccacaggggtgatggcacttcaagttgagagtgagtttcaaaaagcttacgacaaaggaatgccaaaatcaaagttctgggagcctacctatgaagattgcttaaatttgatagctcgccttccaccagtggcttcgtatgtttaccggaggatcttcaaggatgggaaaactatagcagctgataatgcactggactatgcagcaaacttttcacacatgcttgggtttgatgatcccaaaatgctcgagttgatgcgactatatgtgacaatccacactgatcatgaaggtggaaatgtcagtgctcatactggacatctggttggaagtgctctgtcagatccttatctttcttttgcagctgcactgaatggtttagctggaccattgcacggcctggctaatcaggaagtgctgttgtggatcaaatctgtaataggtgagacaggtagtgatgttacaactgatcaactcaaagagtatgtgtggaagacactaaaaagtggaaaggttgttcctggcttcggtcatggagttctacgtaagaccgatccacgatatacatgtcagagggagtttgctttgaagtacttgcctgaggatccacttttccaactggtctccaagttgtatgaagttgtgcctccaatcctcactgagcttggcaaggtcaaaaacccatggcctaatgttgatgctcacagtggagttctgctgaaccactttggattatctgaagctcggtattacaccgtccttttcggagtttcgaggagcataggcataggatcccagctcatttgggaccgtgctcttggtctgccgctcgaaagaccgaagagtgtcaccatggagtggctggaaaaccactgcaagaaggctgctgcttgaagctacacacgcctacaccgctgctgttaattcttctaacaattatcatcttggatgttaataactgaggataaactcgaaacgttcagccacattttaatatttttttcccaggccaataactagaggaagatgctctcgatcggctggtacatttttgtagccatcgctgttaggatgctcatatagttaatctgccattgggcaacaatgtgattagtttaagttgcttagagctttatcctttgatgaataactttttcgagccttctaagttagctcgagttaacataccagttgtggattatggcacatttcttcatttcctttctgttgttaaatttacaagtacgattcattttc

SEQ ID NO: 22792 - DNA, 1127 bp, Oryza sativa
  ref <308>: DATABASE ACCESSION NUMBER: AK072951
  ref <309>: DATABASE ENTRY DATE: 2001-12-06
gagtcctccctccctaggtgtgctccaaatccaagactccctgccatggtcctttgcccagatccaggctgccacgtcttcgattgctcacatctgcacttgatcgtggtcttcggcgacagcctgcaagggagaggagacctgacggtggggattgaagcggtgcgatggagatccggcgggagggaagaccagtgcttgctcccgccgagcgtgttctcgactgcgcctcctccttcccacctcaaagaaatcagttcgatttaatctaccacaggtaatgcttcacttgcaatgttacctggcaaatacaacttcttagtgcttttgaaggtagctgctgcggtgagagagtctggtacgtcttggatcttcttggtttggacttgaccaaaagcaatgaatagtcaggcagatattcctctagacgaaaaatgtctgcatgctttgctttgttgaatagataaagtgggtcaaaacgggagtcctaatgtgcaagcagttggtcaagaagctgaggatatcccattccaaaaaaaatatgtgccttctttgcatgtaatcaagccatgcagatttaatctttgatcaagccaagatcagttttgtcactatctgaatttgccgtaggaaaatggcagatttccttctcacaggcataattgcagactgtcaataactcaatactttgaaagggtagctttgcccagagttaattgtgacaacatgagcaacggtgaagaagaagaaagagcatgaattccatgactaaatattgtggtctattttgtaaatccattgccggggtatctgttcatgtaatccacaaaaagacttggcccgtaaatccaccgcagttaacattcttggcccccacaagaatatgggtatatttcacaattcaaattgaaggctcccattaaataattataggtgtatttggtggatgactcgagttcagtttcgatggaatgtacactttctcttcaaattcagcttgatttttttctcagtttataagttagacatgtgcagtgtattgtgcttggttgtatgaaatggagtactgatcttttttttaactattaatttgcatggaaattgaaatgaatcctgatttcatcttt

SEQ ID NO: 22793 - DNA, 653 bp, Oryza sativa
  ref <308>: DATABASE ACCESSION NUMBER: AK072952
  ref <309>: DATABASE ENTRY DATE: 2001-12-06
ttgggcagctgcactatcagtcgatctgtcacaatgaggctcgccgtcgcgacgttcctcgccatcgcattgtccctctccctcctgctcgccggcgcgcttgcccggccgcccccggcgccggtgaggacggatgccggcggcggcgcggcgccggctccgcaggacaagggcggcaacctcaccgacatcgacgactacgtcccggcgccgccgccggacccggcggcggggaagggcggcgccaagaggtcggcgtccggaccggcggtggtggctcacaaggccgcgagctacggagccgctgccgcgatgaccttgctggtgtcgtgtttgtgaggctgtggcttggctgcgcgtacggggcaaccaaccagacgtcaatacttgttagtgatcggagtatataatatattgttaccttagtaaggagtatatatattatttgtatgtgtgatgtttctacgtgtcaaagttcacgagatcagcgtggaagcgtagtagcgtacggggtgtgtgtgtgatagtactctcgtaggaataagtccaccttcagtcccttcaaatataggctaatatgatttgtatccctcgatcatagtagcaggtatcttgaacctttaactattaaaattagtgcaatttaagtccct

SEQ ID NO: 22794 - DNA, 1339 bp, Oryza sativa
  ref <308>: DATABASE ACCESSION NUMBER: AK072953
  ref <309>: DATABASE ENTRY DATE: 2001-12-06
gggggttcgaggccgagcggctccgcctcgacgcagaggcgcgggccgggatggcgtccgcggcggcggtggcgggggcggaggcggcggaccccaaggcgtggaagtgggcgatacggaagcgggtgtgggacgcgctggaggcggagggcgtcgcgcgcgacccgcgccccgtccaccaccgcatccccaacttcgatggcgccgcagccgccgcggactcgctggggagactcgacgtgttccaggatgcacaatgtgtgaaggtcaatcccgactcacctcagaagcaagttcgcttcttaacactctcaggagataaaaagttgctgactccgcaacctcggctaaggacaggatttttctcagttctggaatctcacatgatacccattggatgtattccagaagcatgtacttctgttggtgcagccaaatacgggagacctataggtctagatgaaaaaattaaagtggatttgattgtgattggatcggttgcagttgatccaagcacaggagcacgactaggaaagggcgagggatttgcagagctggaatatgggatgctgcgttatatgggatctataagcgattcaaccatgatagtaacaactgtgcatgacaaacaattagtgaatgacattccagttgagaagctgttagttcatgatgtaccagttgacattatctgcactccaactcaggtcatattcacaaataccacgatcgcgaaaccacaagggatttactgggaaaagttatctccagagaaattgggccaaatccgaattctacaggagctgaagagacgcatagagagtgaaacaggaactacacttccttgtggcccttctgagaagctaccaccaacagcgcagcgaagaagaagaaaacgaagacggtgatgattgagtgtgtacgcatgccctggtgctgacgtggacgaatgcacacggtgcgatatcgcgattggctcttgtgtcgtggcgggaggcgtaacgaatttgccgaagtacactcggttttcgtacggaagaaaagggaagagaacaaaatgacatgcgagtaagagtacctagctactagtggctctatcataaaaaacaaaatattacgaatttttgtcaactggagcggtcgacagatttttgtaatttttcattatttctttgatgtcgatactaatttcctcgttgctgtttcttttctttttccttttcttttttgaagactccttgttacacaacactgataacaacaaacgagtcgtacagtcttgggtaatagccaattttagagcttatatgaatacatgattctcaaataatacgagtcg

SEQ ID NO: 22795 - DNA, 1655 bp, Oryza sativa
  ref <308>: DATABASE ACCESSION NUMBER: AK072954
  ref <309>: DATABASE ENTRY DATE: 2001-12-06
gctggctcatgcatttgctagctagctcatcgtcgataccaatggcgactaccagggccacatcgacgctgctgctgctgctgctgctggtttcggcaacatgggcggcatcggcgccgacgacgagtcgggcgaggaacgtgataacacacgtgaaggggttccaagggaggctgccgttccacctggagacggggtatgtggaggtggacaacaccaataccgttgagctcttctactacttcatccagtcggagcgcagccccgccgatgaccccctcatcctctggatcaccggcggccccggctgctccgccctctccggcctcctcttcgagattggccctctcaagtttgacgtagctgggtacacggaagggttccctcaattgttctacttccaagattcctggaccaaggtgagcaacgtgatatttctggacgcgccggtggggacggggttctcctacgcccgtgaggaacaagggtacaacgtcaccctcacacagacgggacagcagctggtggtgttcctcaccaaatggctgggcgatcacccagagttcgcctcgaaccctctctacatcggcggcgactcctactccggctacaccgtcccagtgacggcgctccagatcgccaacgacgacgacgcccgggcgcggctgaacctcaagggctacctggtgggcaacgctgccacggacgtcaagtacgacagtgggggcaaggtgcccttcatgcacggcatggggctcatctccgacgagatgtacgaggccgcgcggagcagctgccgtggcgactacgtgtccaccccgaccaacgccgactgcgccaacgcgctgcaggccatcagcatggcaaccttcgccatcaacccggtgcacatcctggagcccatatgcggattcgcgctgcgcgggcgcgcgatgcctgagacgacgatggaccagcgcctgcgcctgggcctccccgtggagtgcagggacaacggctaccggctgtcgtacctgtgggcggacgacccggaggtgcgcgccacgctgggcatccacgagggctccatcgcctcctggagccgctgcacggcgctgccgctcttccggcacgacgtggacagcgccatcccctaccacgcggagctcacgcagcgcggctacagggcgctggtgtacaacggcgaccacgacctggacatgacgttcgttggcacgcagcagtggatccggacgctgggctacaacgtggtgaccgcctggaggccgtggtactccaaccgccaggttgccggcttcaccaccgtctacgaccacaacctcaccttcgccaccgtcaagggcggtggccacaccgccccggagtaccgccccaaggagtgcctcgacatgctcgacagatggacctctccggccggcgagctctgaattactttactatactaattcatcaccgtccgtatatatgtccgtttatgggaaatcttacccccttcataatttatctacttatcttttatcatgtcttatctttctcttttcttagcctatactacacacacttacttacaaaattcggagcatttgtgtggtctgtcgttcttttcccactcggtttccatttcgagagtgacgaggccctcctttttttcctgt

SEQ ID NO: 22796 - DNA, 1623 bp, Oryza sativa
  ref <308>: DATABASE ACCESSION NUMBER: AK072955
  ref <309>: DATABASE ENTRY DATE: 2001-12-06
ggaggatatttaataaaaaataagtacaaaacccaccgccatggcgtcgccggcgtggcagccgccgcaccgcctccaacctcccccgccggcgcagctggacctcaccgacgagctcctcgaggaggtcttcgtccgcctccccaccgccgcggacctcgctcgcgcatccacggccttcgcctccttccgccgcctcatcaccggccacgccttcctccgccgcttccgccgcctccacccgcctccgtcctcggcatcctcgccgcgggattcctcgcggcgcagccgccccatccgtcggccgccgcggcccgcgccctcgccgaccccgacgcggccgacttctcttgctccttcctcccctcccgcgaccgctggtgtctccgccacttctccgacggcaggtacctcctctccgccatcccggaacgcagcgacccggctcccgaccaccgcgccttggtcagggaattcgctgtctgcgaccccttgtaccggcgctacctgctgctcccacccatccccgatgacctagcctcagtagtaaatcaatcagagattgtgaatttcgagcccttcctttgtcctgctactgaagatgaagaggacacaatgttcagggtgatctgcttggctcagtgcgaggccaaactggtcgccttcacctactctaggtgttctgggcaatggcatgctgtggagttcgatggctggagagatttgaccagggggactagcaatccgtttccatccggtgagcctagttgtccggacggtactacgcgcacggatgcttctgctgggtgatgcattgggtgaacaagttgcttgtgctcgatgcccgcagcttcgagttcagctctatcgacctcccacctgggccctcatcacgtcggatggtcattgtggaggctctggaagggaagctggggctctttactctctgcaatgacaatgccttatactatttcctatggtatgacatcttggaaaatgatgatgagggcgcgcttcagtggtgcatgaaggagattataccactacatgaaaattttaactataacatcttgggtgttgctgggggatacttactcctacaagggtttcctcatgactttaggccaaagaaactctgctttcactgaatctcaggacattcaagcttgagtggttttgtgggactacatatgccatcatatctccggacatgtacgctggttttccaccaaccttgtcaccaccagctatttgaagtgggtggttaatctgcacgcagttgaggcttcgtctacgtcatgcgctggtggggcttcgtcgctttgagttacaaggatggctggctatggtggttcacctcttctatgctagtttagttcggtcggttatgtacctatcaatgatgattgatgtcaagcaatatatatcgtcctccttgatgcatagataactctagcactacatatctatttggtttttgagacgtactcttaagtgtacttactaaagtcttatgttgcaatatccagtttgaaatcaaacttagtgattggatgatgtcaaatgtctgatgctagctgctcgcaaaaggcaaatgatggttccaagccctcatttcatacc

SEQ ID NO: 22797 - DNA, 1152 bp, Oryza sativa
  ref <308>: DATABASE ACCESSION NUMBER: AK072956
  ref <309>: DATABASE ENTRY DATE: 2001-12-06
gaccggcttcaacccacccgtttctccggcgatgcggcggctacccctacggctcctgcgctccgccgcctcctcaccccgacgccgccccgctccctcccctcccccctcgccgaaccccgcggcgccgcctgcactcctctcccggtgggggtgggggtgggcgccgccgcggaggggttactcgcggttcgcgaccgggttcaccccactgcagcccaagccgctcgcctccatcctcgacgtcgagcgcgccagcggactctcccccgaccacctcgtcgccgcctgggatgactaccacttggggagaggtcatataggtgcatctatgagtgcaaagctttaccatcttatggagcaaagatcagctacatgccgtcattttgttatccctttgtggaaaggaactggatatactaccatgttcatgcaaggttattactcagtcttttccatatagtgttcagatgccgcatatgatcttcaccggacttgaagactacaaagcaaggggcactcaagcaagcccttactatacgatcactcattatacagagtttgcagagaccaaggatacagtgcttatccggggagacgttgttttcaccagtaaactgactgattcagaggcgaaatgtcttttagagagtgctcactcattctacctgaatgatgtgaggtacaggcttgtagagcgcttcaacaaagaaccacatgagtttgagttcaaagatgtcctgcaagtgcttgaaatgccaaccatgtgacaagattgaagacctgcaatagcaaagcttcctggagcatgtcagtgcatttttacagtggcagggtctagattgcactaatacactgcgtatcactctgagattgctagctgaacatcaattctacggttgtgtggtagcaataataccataataccatgagaaaaatttgtgtaagtgctaagcagttacagccgtaagtcctaggaggaattccttaactatcttctgccgtttcttttgaacctcttgtctgcaataacatggtggaaccagaagtccagaacccttatccactctcaaaaaccattgtgtaaacttaacctgaagtcagccgttattgttgctgttctgactttttgttaaggctgagtttagttcc

SEQ ID NO: 22798 - DNA, 1331 bp, Oryza sativa
  ref <308>: DATABASE ACCESSION NUMBER: AK072957
  ref <309>: DATABASE ENTRY DATE: 2001-12-06
gttagccgccacttctctctccccgcctccgccctctcccaattcctcctccggcggcggcggcggcgttgggacgcgcgagcccatcaccatggcgggcgggaagatccagaagaagcggcacggcggaggagcaggcggcggcggcggcggcgggggcgggggcgcgcggctgcagggagggatcccgttcgagaagtccaaggggcagcacatcctgcggaacccggcgctggtggactccatcgtcgagaaggccggcctcaagcccaccgacaccgtcctcgagatcggccccggcacgggtaacctcaccaagcgcctcctccaggccggcgtcaaggccgtcgtcgccgtcgagctcgacccccgcatggttcttgagctcgaccgccgcttccagggcgaccctctcgcctcacgcctcaaggttatccaaggagatgtccttaaatgtgatcttccatactttgatatctgtgtggcaaacatcccatatcaaatttcatctcccctcacattcaagcttctgtcacaccgcccaatctttaggtgtgcggtgattatgtttcaacgtgaatttgccatgagacttgtagcacagcctggagatagtctctactgccgtctctctgtgaatgtgcagctcttgtcacgtgtgtcacacctcctgaaggttggacggaacaacttcaggcctccacccaaggttgattcatcggttgttcgtatcgagcccagaaagcccctacctcctgtcagcttcaaagagtgggatggacttgtgaggctttgtttcaaccggaagaacaagacattgggtgccatctttaagcagaagcgtgtccttgaattgttagagaagaactacaagacaatgcagtctctacagctcacctcagatgcagaaaaaggtgaggagaagatgtcaccagatgatgttgcattgctatcaagtatggtcgatgacatgaacatggaaagcagctacgagaatgatgatgatgatgagatggaaatggatgatgccgatatggtagtagagagccgtgcatgtttcaaagaaaagattatggggatattacagcaaggagattttgcagagaagagagcatcgaagctcagccaggttgacttcttgtacctcctgtcgctcttcaacaaagctggtatacatttttcctgaagaaacccgttatggtctagctagaaaagagtattttctttctttcttagtacgtcttgaaaggtgtgaaggcactgcgagaattttgttctaactatgtatatttttatttctagtatggaaagtaatttaattcaatgttgcc

SEQ ID NO: 22799 - DNA, 1287 bp, Oryza sativa
  ref <308>: DATABASE ACCESSION NUMBER: AK072958
  ref <309>: DATABASE ENTRY DATE: 2001-12-06
ttgggctttttatcgctcgatcaggtggcagcgacaacgagagggagagcgagagctaagttcgccggagaagatggcgatgcggcggtggagagaggatgcggtggcgctgtcgctgcgcgggtgcggattcggcgacggggacgacgaccggccggagaagccgcggcggtacggggtgacggagatgaggagccccttctacgccttccgccccgcccaccacgcgctccaggaaatattggattctctaggtccttttgttgatggtttgaagtttactggtggatctcatagtttgatgggaaaagaactggttagagagattactgatttagcacacaagcatgacatatatgtgagtacaggagattgggcagagcatcttctgcgtcaaggaccttcttttttcaagcaatatgtcgaggagtgcaaggcattaggatttgacaccatcgagctgaatgctggatctctcaagctcccggaagaagctctcctgagattagtccgcctcatcaagactagtggtttgcaagcaaagcccctgttttcagtgaagtttgacagttctgatattcctccatctggagatagggcatttggggcatacatagttccagtgaagcagaattcagaaagagtcgaggatgttgacctgttgataaggagggccgagaggtgcttggaagcaggggcagacatgatcatgatcgatgccgacgacatttgccagcgcgctgactctctacgggcagacatcgtcgccaagattgtaggccggctcgggctcgagaagaccatgttcgaggcttccaaccccaacacctccgagtggttcgtcagaagatacgggccacgggtgaatctgttcgtggatcactccgacgtgatgaacctggagcgtctccgaggcttcaacatgcgtggagtctgcaactctcccttattcggaatcggctcgcccttcttcctgatgtgacgacctccctgaatcctcctgatgtatacgaccttcctgaatcgtgccagtcctatctcgcatggaatgctgtgttcgtggtgttgagatgccttcctgcaataactggatctggatgatgtgtagtatgaaaaaaatgtactcctgtctgctagcagtatcagctcatgtatcgtatgtactcttcattctctactcctgcccggaaacttattactccttgtcacagtttatagggtgttcttttacaagaaaaaaataactcggtaaatgtttgactaataacaattgcccctaatcgtcgc

SEQ ID NO: 22800 - DNA, 2619 bp, Oryza sativa
  ref <308>: DATABASE ACCESSION NUMBER: AK072959
  ref <309>: DATABASE ENTRY DATE: 2001-12-06
gatttctccccttctctcccccgatccaatctcccggcgagcgagcgagtggaatcggcggcgatcatggcggcgacggcgttccggcgaggtggagcacgcgtgcgacgacaagcgccgagcggcttccatttgccgtggctgggggcgcagccgagaagggcgccaagccgtgccatggcgttggcggtccggcgaggcggcggagcccgaaggtagctgccaagccggcgcttatcgtccccggcgagggacggtgaggaggggactccaaggcggcgcgcgcatggacgtcaaccagcgcgaccgtgatggagaggcggcgagggcacgccgaggcacacgtgggcgaaggagttgcccgtgcggcgacgacgacgatgccttcttcccggcgaagcccgtacggcggcgctaatgtcgtgcggcatctccggtggcttagggcttcaacgatccgaaggtcctgcattactgcaaacggatcctcatcaggggaaagcagtacaatggagcgtcgttgactgatcaccaaccccagcaaacactagatgcagcatacaaatggcttagctgagcacaagaagttataggctgatggtagaagctaggaaggaatctgaaggagctctggttcctggcttgattgatcttgctgctgcttctccgatcctccggcctctgctatgttcctcgactcctgctccggttgctatctcacacatctctctcaatttctactgatatattttttcagtcctttatttccagaccaccaaagaacaaactaaagctcagatcgatcggtagccatggatgccgtggtgagtgtctcacatggggcactggggccgctactgggcaagctcagtaccttgctcgcagacaagtacgcgtgcttgaaaggtgtccgccgtgagatccattccctaagatcggagctgagcaacatgcaagcggcgctccacaagtatgcgtcactcgaggaccctgacatccaggtgaaggcctggatcaccgagctgagggagcttgcctatgacatcgaggactgcatagacaagtttatgcaccaacttggtgccaacggtgagcagcaccgcaccagtaatagcatcgaggacttctttaggaagagtatacaacgtctcaaaactcttggcccgaggcataatattgctggcgagattgaggaactgaaggcacgagttatctcggtgagagatcaaaagaacagctacaagcttgacgatattttttgcagtagctctagcaataccaatgcttctgttgatccacggttggctactctcttcgcggaagagaaccatcttgtcggtatagatggcccaagggttgaacttgtcaattggttggatgcagagagcaggttgataaagtgtcgcaaggtattatctattgtggggtttggaggtcttgggaagacaactctagcgaatgaggtatatcgtagggttaaagttcattttgactgccatgcatttgtgtcagtgtcacaaaagcccgatttcaagaatatcttcaaggatataacatacaatatgcctacgaaagatggtttcctcaaagatattgacacatggaatgaaaagaaatttattgaaaagctaagagaactacttgtggataagaggtaattctctagttcttttttcccctcttcgataaagttgtatacccacactcatgataatagagtggtttttcattcacaaacttatattgttgataaactttaactaggtatcttgttataattgatgatgtatggtctatttcggcatggaaagctatcacggttgcattcccggataatgactgttccagtacaattatagttactacacgcgtttccgatgttggatggtcatgctgcttaaatggcattgaccgcaattatcagatggaacctctaagtgaagttcactctggaagactattttgcaagagaattttcagtacaaatgaggatggctgcccagatattttacaggaagtttcaacagatatattgaagaaatgtggcggtcttccattagcaattattagcatatctggcttattagcaaatagaccagttatcaaggaagagtgggagaaagtgaaagaatcgattggttttgcattggacaagaaccaaaatctagaaggaatgaaaatcatactgtcccttagctttaataaccttccaaactatctcaagacttgtttgctatatttgagcatatttccagaggattgtattattgaaagaaacatggtagtatggcgatggatagctgaaggctttatctctgaagactgtgggcagaaattggaagatgttgcggagagctacttttatgagctcatcaacaaaagtctggttcaacctgtggacattggttttgatggtaaggctcgtgcatgccgtgtccatgatataatgcttcaatttatctcctcaaaagcaacagaagagaattttgttacattattaggtggccaaactagaaaaacgaattcgcatcattatgttcggcgattatccattcaggacactaataatcatttgtcaactctgttagcaaacaaaaatttatgccatgttcgatcccc

SEQ ID NO: 22801 - DNA, 2247 bp, Oryza sativa
  ref <308>: DATABASE ACCESSION NUMBER: AK072960
  ref <309>: DATABASE ENTRY DATE: 2001-12-06
gctcctcctttcggcctctcctctccttcctcttttgcttcttcttcttctctctctctacaactcaagctaataggtgtagtactagcaaaggccagcatccatatcgaggctatctagggttggtgctagctacctagctaggttggacccttctcttcatcctcccttgcatatcaagcctcgatagatatagccatcagcccccctctcgatcgcccttgccttttgagatcgatcaccaggttactgtagaagtacagatcggagcgagcgatcgatcgaggaagaagaagaggtagaggttgtagatggctgtgtcggctggcggcggcggcggcgcggcggggcagttcggcgacacgacgctgacgaaggtgttcgtggggggactcgcgtgggagacgcagaaggaggggatgcggggatacttcgagcagttcggcgatatcctcgaggccgtcgtcatcaccgacaagaacaccggcagatccaagggctacggatttgttacattccgcgagccggaggctgctatgaaagcttgctttgatccgtacccggtgatcgatgggaggagggccaactgcaatcttgcatatcttggggtccagagatccaaggcagctgcagcgtctctgcaaccttatgctgggcatatgagggcaatgaagtccattatccagacaggcggtggtggtgccagcttgagcatggcagatcatggcatccagcaggggatcccgacctacaatgtgtatgggtactcaccttatttctcggattacggctatccgctgagctactatcaagcgtacggtgggcttggagcccagtaccagatgttcgctggtggcgccgccgccggggcggcggggctaacaatggcgaatcctaccggcggcggtctctactcgccgtacttccagtacggcccagcggtggcggcgaacgcggctgctgccgggtacgccggcatgcagtaccctcagatgtaccagtacgcggcggcggcggcggctgtcggagccccgacggcggcgacgacggccagccagctgaccgccgtggccgggctccagcagtacgctggcactgtggctcttgctcctaactctaccggccaagcagcaggcatgacaatgtctctgacagctccaactctgccggcaccatcaccacagtatcagtacaggctcatttcttctcatgtcgctgcagctccagagaaaccattggcctagaaaaccacggctgccttaagtctgcatccatctaaatacagtatcttcttcctccacacacatgtgtcagtcatatctcatatgcatatcatctgtcctagctctcatgagtatacttactcagctcacatatttactaattacactcacgcggtcacgccaaatgtacccacttatgggttgagtggtgtatttggcatgctaacaaaggactgtggtaagtccaattttgcattgtgtagtctggtctagcaattaaggtcttcttaattctcctttaaggtgaacgttgcattaattttttacaagaaattctctcatccaatgtgtcgtcagtctagtacacgagtaaattaaccatcctgcatgtataggtcacaggttagcatcttcagttaatcagtgtgttcatgttaacttagcttctaggaaaagttttgttgtgccttgtacctcttaaggaagagagtgcaggggaaataatatgtggtagagtcgctgctgatttttcatatgcagctttagttcaagatgtctccacagaagcttgtgggggctactgaaagagttcaattaattgtgtattaatttgtagtacgtagtcacatatttcattttcacctatacatcttcatttctttttttcttgtacactaactaggtcagggtccctttcgatccattctctattcgatctggtccttcatttctggttttcttccatctcactcgttatgtatcaccatccaccctttcacccataattaaggcagcaatgcattatatatatgcataattaaggtcaagcaggcccaagaaatcagatgaaaaattgatggaagccattaccagacatattattactctggagttctccaaatctccaattagtataacgacttgtatggattattatatgtagcttccttttgagaagctaaatgtaccacgtacgcttatctttcagtacatttacatgaactctgctaaatggcaaacttct
